United States Patent Application Publication US 2011/0183924 A1 - sequence listing, part 161

SEQ ID NO: 417353 - DNA, 1954 bp, Homo sapiens
ggggtctggaggggcgtggccgaagaggggcagtcgagggttttggggggataggagggaggaaaaggtcgtcttccccattcagtcccctttggaagctggagaggtggggcactggttggggaagaacctgaaaggaggcctcagaggcaggggctccgtggtggcggtcgcttccgcaggctgagcgatgctatggtgctctactatgccagatgggaaggtcttcaagctggagatgcgcttggggccgcgctggaagggcgaggccctggagcaggccatcatcagccaggccccgcaggtggagaagctcattgctacgacggcccacgagcggatgccctggtaccacagcagcctgacgcgtgaggaggccgagcgcaaactttactctggggcgcagaccgacggcaagttcctgctgaggccgcggaaggagcagggcacatacgccctgtccctcatctatgggaagacggtgtaccactacctcatcagccaagacaaggcgggcaagtactgcattcccgagggcaccaagtttgacacgctctggcagctggtggagtatctgaagctgaaggcggacgggctcatctactgcctgaaggaggcctgccccaacagcagtgccagcaacgcctcaggggctgctgctcccacactcccagcccacccatccacgttgactcatcctcagagacgaatcgacaccctcaactcagatggatacacccctgagccagcacgcataacgtccccagacaaaccgcggccgatgcccatggacacgagcgtgtatgagagcccctacagcgacccagaggagctcaaggacaagaagctcttcctgaagcgcgataacctcctcatagctgacattgaacttggctgcggcaactttggctcagtgcgccagggcgtgtaccgcatgcgcaagaagcagatcgacgtggccatcaaggtgctgaagcagggcacggagaaggcagacacggaagagatgatgcgcgaggcgcagatcatgcaccagctggacaacccctacatcgtgcggctcattggcgtctgccaggccgaggccctcatgctggtcatggagatggctgggggcgggccgctgcacaagttcctggtcggcaagagggaggagatccctgtgagcaatgtggccgagctgctgcaccaggtgtccatggggatgaagtacctggaggagaagaactttgtgcaccgtgacctggcggcccgcaacgtcctgctggttaaccggcactacgccaagatcagcgactttggcctctccaaagcactgggtgccgacgacagctactacactgcccgctcagcagggaagtggccgctcaagtggtacgcacccgaatgcatcaacttccgcaagttctccagccgcagcgatgtctggagctatggggtcaccatgtgggaggccttgtcctacggccagaagccctacaagaagatgaaagggccggaggtcatggccttcatcgagcagggcaagcggatggaatgcccaccagagtgtccacccgaactgtacgcactcatgagtgactgctggatctacaagtgagtgccagtggggaggggacccggctgggctgacccctggaaagtcctggtgcccgatgagttgatgtcaatataactctacccaatgtcatctcacccaaagcccttcacccagttcatagcctttgcagctgccccctacccccacacccagctctccaacacaccagggtttgctgtcctgctccagtgtgccacaccctgccatcccacctgtgggcctgtgcctcagcatctaaaacctcagccatcactcaacacatggaccctgcaacacgcaaacaggtccatactctgctactcaacctatgacactgacactcagggcatgagatgattctccagtacccaacac

SEQ ID NO: 417354 - DNA, 2737 bp, Homo sapiens
ggggtctggaggggcgtggccgaagaggggcagtcgagggttttggggggataggagggaggaaaaggtcgtcttccccattcagtcccctttggaagctggagaggtggggcactggttggggaagaacctgaaaggaggcctcagaggcaggggctccgtggtggcggtcgcttccgcaggctgagcgatgctatggtgctctactatgccagatgggaaggtcttcaagctggagatgcgcttggggccgcgctggaagggcgaggccctggagcaggccatcatcagccaggccccgcaggtggagaagctcattgctacgacggcccacgagcggatgccctggtaccacagcagcctgacgcgtgaggaggccgagcgcaaactttactctggggcgcagaccgacggcaagttcctgctgaggccgcggaaggagcagggcacatacgccctgtccctcatctatgggaagacggtgtaccactacctcatcagccaagacaaggcgggcaagtactgcattcccgagggcaccaagtttgacacgctctggcagctggtggagtatctgaagctgaaggcggacgggctcatctactgcctgaaggaggcctgccccaacagcagtgccagcaacgcctcaggggctgctgctcccacactcccagcccacccatccacgttgactcatcctcagagacgaatcgacaccctcaactcagatggatacacccctgagccagcacgcataacgtccccagacaaaccgcggccgatgcccatggacacgagcgtgtatgagagcccctacagcgacccagaggagctcaaggacaagaagctcttcctgaagcgcgataacctcctcatagctgacattgaacttggctgcggcaactttggctcagtgcgccagggcgtgtaccgcatgcgcaagaagcagatcgacgtggccatcaaggtgctgaagcagggcacggagaaggcagacacggaagagatgatgcgcgaggcgcagatcatgcaccagctggacaacccctacatcgtgcggctcattggcgtctgccaggccgaggccctcatgctggtcatggagatggctgggggcgggccgctgcacaagttcctggtcggcaagagggaggagatccctgtgagcaatgtggccgagctgctgcaccaggtgtccatggggatgaagtacctggaggagaagaactttgtgcaccgtgacctggcggcccgcaacgtcctgctggttaaccggcactacgccaagatcagcgactttggcctctccaaagcactgggtgccgacgacagctactacactgcccgctcagcagggaagtggccgctcaagtggtacgcacccgaatgcatcaacttccgcaagttctccagccgcagcgatgtctggagctatggggtcaccatgtgggaggccttgtcctacggccagaagccctacaagaagatgaaagggccggaggtcatggccttcatcgagcagggcaagcggatggaatgcccaccagagtgtccacccgaactgtacgcactcatgagtgactgctggatctacaagtgggaggatcgccccgacttcctgaccgtggagcagcgcatgcgagcctgttactacagcctggccagcaaggtggaagggcccccaggcagcacacagaaggctgaggctgcctgtgcctgagctcccgctgcccaggggagccctccacgccggctcttccccaccctcagccccaccccaggtcctgcagtctggctgagccctgcttggttgtctccacacacagctgggctgtggtagggggtgtctcaggccacaccggccttgcattgcctgcctggccccctgtcctctctggctggggagcagggaggtccgggagggtgcggctgtgcagcctgtcctgggctggtggctcccggagggccctgagctgagggcattgcttacacggatgccttcccctgggccctgacattggagcctgggcatcctcaggtggtcaggcgtagatcaccagaataaacccagcttccctcttgtctgagcgccctcatcttttccggggtgagggtaggtgtcaggggaggggtgggttatgaaaagtgcatggaggtgactgttcttgtgtggactgagcctggaagtgacccctgggaagatggggctgggtcccactctccaccctagggacaccttcatgtgagtgagcggctggggtggagtggggaacctgaggccaggcgggtgtgggcccaagggctgcgtgcctggctgagcccagctcccctgtgtggagatgagtgtgccccatgccaggtgcacgttaggatcacctggagctattttaacaaacgctaaccccccctcccccatccagctggggtcttcaccccccaggggtgccttgcaaatcatgagatacaatgcttttcattggtagatgcacgtattagctcccgtatgaaccgtattactgaatttgaatctgaaaaataccaaaatgcaaacattgtttttaaattaattgttttaaaagctaatgaacgaattaagacaaattgcatcaatttagtggtttcttaaatcgtggtttgcaggtagttcagttttattaaaattcatttgtgagtcgctgaacgacttacattatgtaaaatatatcagacagtaaatgaattgtggctttcaaagcct

SEQ ID NO: 417355 - DNA, 2082 bp, Homo sapiens
ggggtctggaggggcgtggccgaagaggggcagtcgagggttttggggggataggagggaggaaaaggtcgtcttccccattcagtcccctttggaagctggagaggtggggcactggttggggaagaacctgaaaggaggcctcagaggcaggggctccgtggtggcggtcgcttccgcaggctgagcgatgctatggtgctctactatgccagatgggaaggtcttcaagctggagatgcgcttggggccgcgctggaagggcgaggccctggagcaggccatcatcagccaggccccgcaggtggagaagctcattgctacgacggcccacgagcggatgccctggtaccacagcagcctgacgcgtgaggaggccgagcgcaaactttactctggggcgcagaccgacggcaagttcctgctgaggccgcggaaggagcagggcacatacgccctgtccctcatctatgggaagacggtgtaccactacctcatcagccaagacaaggcgggcaagtactgcattcccgagggcaccaagtttgacacgctctggcagctggtggagtatctgaagctgaaggcggacgggctcatctactgcctgaaggaggcctgccccaacagcagtgccagcaacgcctcaggggctgctgctcccacactcccagcccacccatccacgttgactcatcctcagagacgaatcgacaccctcaactcagatggatacacccctgagccagcacgcataacgtccccagacaaaccgcggccgatgcccatggacacgagcgtgtatgagagcccctacagcgacccagaggagctcaaggacaagaagctcttcctgaagcgcgataacctcctcatagctgacattgaacttggctgcggcaactttggctcagtgcgccagggcgtgtaccgcatgcgcaagaagcagatcgacgtggccatcaaggtgctgaagcagggcacggagaaggcagacacggaagagatgatgcgcgaggcgcagatcatgcaccagctggacaacccctacatcgtgcggctcattggcgtctgccaggccgaggccctcatgctggtcatggagatggctgggggcgggccgctgcacaagttcctggtcggcaagagggaggagatccctgtgagcaatgtggccgagctgctgcaccaggtgtccatggggatgaagtacctggaggagaagaactttgtgcaccgtgacctggcggcccgcaacgtcctgctggttaaccggcactacgccaagatcagcgactttggcctctccaaagcactgggtgccgacgacagctactacactgcccgctcagcagggaagtggccgctcaagtggtacgcacccgaatgcatcaacttccgcaagttctccagccgcagcgatgtctggagctatggggtcaccatgtgggaggccttgtcctacggccagaagccctacaagaagatgaaagggccggaggtcatggccttcatcgagcagggcaagcggatggaatgcccaccagagtgtccacccgaactgtacgcactcatgagtgactgctggatctacaagtgggaggatcgccccgacttcctgaccgtggagcagcgcatgcgagcctgttactacagcctggccagcaaggtggaagggcccccaggcagcacacagaaggctgaggctgcctgtgcctgagctcccgctgcccaggggagccctccacgccggctcttccccaccctcagccccaccccaggtcctgcagtctggctgagccctgcttggttgtctccacacacagctgggctgtggtagggggtgtctcaggccacaccggccttgcattgcctgcctggccccctgtcctctctggctggggagcagggaggtccgggagggtgcggctgtgcagcctgtcctgggctggtggctcccggagggccctgagctgagggcattgcttacacggatgccttcccctgggccctgacattggagcctgggcatcctcaggtggtcaggcgtagatcaccagaataaacccagcttccctcttg

SEQ ID NO: 417356 - DNA, 827 bp, Homo sapiens
cagttgtgtaagaacactcctgctgccctacttctttgccaacattttatatgtttagactttctcttttttccaaactaatgggtgtaaagtggtatttaattttaagttgcatttctctgattactaatgaaattgagtacctctttatattactagttagttatttggctttttattgttgtgacgatttaagatttcatgttgatgtagatcttaattttgagttggtcaaacatatcactttttaaaatcttatactttataattttagggcccagggccacagagttattttctgacgttttgttttctgttagtcacatttacattcaggccttgattcatcttgtggtcacctttggttatatcagcatcgtttgaggtagcacattcacactctcaaatacagtgtgatagtttggtatgcactagagggccatgctgtatcatggattcattttgaaagagtatttaatgaaaaatataaaagaaggctattcatagcatattgccatttatgaaaatttaaaacacacacacatatatgtaaaacaacacttaatatttttcaaagaaacactccatatccaaagacagatgccagacaattaagtttttgcttatgaaggtttaggaggaaatgggggagtagtgataaagggggtaaaaaaataaaataagccaacagaggccttggacagactgataataatagtataccctgaattgaggagtatgattatccccacagtcagggtgaatataatttaggagagatgacctcctaataggttagtgatgagcaaagctggaaaaagttaatt

SEQ ID NO: 417357 - DNA, 2520 bp, Homo sapiens
cctggggctttcgttgttatatactggcccttcgtcttacaaattaacaagcaaaacgggcacactagtcacccccgagggaggccaccatcactgtaactgttggccaaagctacaaaagaagcgagggaatccaaccgagcgcagcgacactgagaacagcttcccctgccttctgcggcggcagaagtgaagtgcctgaggaccggaaggatggtgcagtcctgctccgcctacggctgcaagaaccgctacgacaaggacaagcccgtttctttccacaagtttcctcttactcgacccagtctttgtaaagaatgggaggcagctgtcagaagaaaaaactttaaacccaccaagtatagcagtatttgttcagagcactttactccagactgctttaagagagagtgcaacaacaagttactgaaagagaatgctgtgcccacaatatttctttgtactgagccacatgacaagaaagaagatcttctggagccacaggaacagcttcccccacctcctttaccgcctcctgtttcccaggttgatgctgctattggattactaatgccgcctcttcagacccctgttaatctctcagttttctgtgaccacaactatactgtggaggatacaatgcaccagcggaaaaggattcatcagctagaacagcaagttgaaaaactcagaaagaagctcaagaccgcacagcagcgatgcagaaggcaagaacggcagcttgaaaaattaaaggaggttgttcacttccagaaagagaaagacgacgtatcagaaagaggttatgtgattctaccaaatgactactttgaaatagttgaagtaccagcataaaaaaatgaaatgtgtattgatttctaatggggcaataccacatatcctcctctagcctgtaaaggagtttcatttaaaaaaataacatttgattacttatataaaaacagttcagaatatttttttaaaaaaaattctatatatactgtaaaattataaatttttttgtttgtaatttcaggttttttacattttaacaaaatattttaaaagttataaactaacctcagacctctaatgtaagttggtttcaagattggggattttggggtttttttttagtatttatagaaataatgtaaaaataaaaagtaaagagaatgagaacagtgtggtaaaagggtgatttcagtttaaaacttaaaattagtactgttttattgagagaatttagttatattttaaatcagaagtatgggtcagatcatgggacataacttcttagaatatatatatacatatgtacatattctcatatgtaaagtcacaaggttcatttatctttctgaatcagttatcaaagataaattggcaagtcagtacttaagaaaaaagatttgattatcatcacagcagaaaaaagtcattgcatatctgatcaataacttcagattctaagagtggattttttttttttacatgggctcctattttttcccctactgtcttgcattataaaattagaagtgtattttcagtggaagaaacatttttcaataaataaagtaaggcattgtcatcaatgaagtaattaaaactgggacctgatctatgatacgcttttttctttcattacaccctagctgaaggacatccagttccccagctgtagttatgtatctgccttcaagtctctgacaaatgtgctgtgttagtagagtttgatttgtatcatatgataatcttgcacttgactgagttgggacaaggcttcacataaaaaattatttcttcacttttaacacaagttagaaattatatcccatttagttaaatgcgtgatttatattcagaacaacctactatgtagcgtttattttactgaatgtggagatttaaacactgaggtttctgttcaaactgtgagttctgttctttgtgagaaattttacatatattggaagtgaaaatatgttctgagtaaacaaatattgctatgggagttatctttttagatttagaataactgttccaatgataattattacttttatatttcaaagtacactaagatcgttgaagagcaatagaacctttaagacagtattaaaggtgtgaaacaatggcattcaaagtgttgggaatacaggcatgagccaccgcgcccaggcggtctcaatcttttaatactgccttataatgcaaatataaaggtcacctgaattgctacttggcttgaattagcacattccaattgaagttttaagtttttaaaaactaatttaaatgtttactaattgtatagaagtgtactaaaaataattctgttgttgcaaaactttgtacttggaaatccaagtacatgaggggattttttttctttcaactataatttatgtgatccctttcttagaattataacaataatggtgatggcaaatgaaagtttcacatgatacgggctctttagcttgcattaatattccctgatcatcttttaatgct

SEQ ID NO: 417358 - DNA, 716 bp, Homo sapiens
ggacatccagttccccagctgtagttatgtatctgccttcaagtctctgacaaatgtgctgtgttagtagagtttgatttgtatcatatgataatcttgcacttgactgagttgggacaaggcttcacataaaaaattatttcttcacttttaacacaagttagaaattatatcccatttagttaaatgcgtgatttatattcagaacaacctactatgtagcgtttattttactgaatgtggagatttaaacactgaggtttctgttcaaactgtgagttctgttctttgtgagaaattttacatatattggaagtgaaaatatgttctgagtaaacaaatattgctatgggagttatctttttagatttagaataactgttccaatgataattattacttttatatttcaaagtacactaagatcgttgaagagcaatagaacctttaagacagtattaaaggtgtgaaacaatggcattcaaaggtcttttgtagaactggttttcattgtagttcactgccatgctgccagtggatagcactgtgattcatgcatatttgatgttttatgaaccagtatctcaaaaatagaaataatgattagaagattacttgaagttgggcggggcgccatggctcacgcctgtaatcccagcactttgggaggccgaggcggatggatcacaaggtcaggagttcaagaccagcctggc

SEQ ID NO: 417359 - DNA, 2549 bp, Homo sapiens
gaggtgaggttgaagctgcctccgccatcttggagatgggagacgggcgatggctgtggtccttctgctaatgcaaacaacaaaacgggcacactagtcacccccgagggaggccaccatcactgtaactgttggccaaagctacaaaagaagcgagggaatccaaccgagcgcagcgacactgagaacagcttcccctgccttctgcggcggcagaagtgaagtgcctgaggaccggaaggatggtgcagtcctgctccgcctacggctgcaagaaccgctacgacaaggacaagcccgtttctttccacaagtttcctcttactcgacccagtctttgtaaagaatgggaggcagctgtcagaagaaaaaactttaaacccaccaagtatagcagtatttgttcagagcactttactccagactgctttaagagagagtgcaacaacaagttactgaaagagaatgctgtgcccacaatatttctttgtactgagccacatgacaagaaagaagatcttctggagccacaggaacagcttcccccacctcctttaccgcctcctgtttcccaggttgatgctgctattggattactaatgccgcctcttcagacccctgttaatctctcagttttctgtgaccacaactatactgtggaggatacaatgcaccagcggaaaaggattcatcagctagaacagcaagttgaaaaactcagaaagaagctcaagaccgcacagcagcgatgcagaaggcaagaacggcagcttgaaaaattaaaggaggttgttcacttccagaaagagaaagacgacgtatcagaaagaggttatgtgattctaccaaatgactactttgaaatagttgaagtaccagcataaaaaaatgaaatgtgtattgatttctaatggggcaataccacatatcctcctctagcctgtaaaggagtttcatttaaaaaaataacatttgattacttatataaaaacagttcagaatatttttttaaaaaaaattctatatatactgtaaaattataaatttttttgtttgtaatttcaggttttttacattttaacaaaatattttaaaagttataaactaacctcagacctctaatgtaagttggtttcaagattggggattttggggtttttttttagtatttatagaaataatgtaaaaataaaaagtaaagagaatgagaacagtgtggtaaaagggtgatttcagtttaaaacttaaaattagtactgttttattgagagaatttagttatattttaaatcagaagtatgggtcagatcatgggacataacttcttagaatatatatatacatatgtacatattctcatatgtaaagtcacaaggttcatttatctttctgaatcagttatcaaagataaattggcaagtcagtacttaagaaaaaagatttgattatcatcacagcagaaaaaagtcattgcatatctgatcaataacttcagattctaagagtggattttttttttttacatgggctcctattttttcccctactgtcttgcattataaaattagaagtgtattttcagtggaagaaacatttttcaataaataaagtaaggcattgtcatcaatgaagtaattaaaactgggacctgatctatgatacgcttttttctttcattacaccctagctgaaggacatccagttccccagctgtagttatgtatctgccttcaagtctctgacaaatgtgctgtgttagtagagtttgatttgtatcatatgataatcttgcacttgactgagttgggacaaggcttcacataaaaaattatttcttcacttttaacacaagttagaaattatatcccatttagttaaatgcgtgatttatattcagaacaacctactatgtagcgtttattttactgaatgtggagatttaaacactgaggtttctgttcaaactgtgagttctgttctttgtgagaaattttacatatattggaagtgaaaatatgttctgagtaaacaaatattgctatgggagttatctttttagatttagaataactgttccaatgataattattacttttatatttcaaagtacactaagatcgttgaagagcaatagaacctttaagacagtattaaaggtgtgaaacaatggcattcaaagtgttgggaatacaggcatgagccaccgcgcccaggcggtctcaatcttttaatactgccttataatgcaaatataaaggtcacctgaattgctacttggcttgaattagcacattccaattgaagttttaagtttttaaaaactaatttaaatgtttactaattgtatagaagtgtactaaaaataattctgttgttgcaaaactttgtacttggaaatccaagtacatgaggggattttttttctttcaactataatttatgtgatccctttcttagaattataacaataatggtgatggcaaatgaaagtttcacatgatacgggctctttagcttgcattaatattccctgatcatcttttaatgct

SEQ ID NO: 417360 - DNA, 2353 bp, Homo sapiens
gaggtgaggttgaagctgcctccgccatcttggagatgggagacgggcgatggctgtggtccttctgctaatgcaaacaacaaaacgggcacactagtcacccccgagggaggccaccatcactgtaactgttggccaaagctacaaaagaagcgagggaatccaaccgagcgcagcgacactgagaacagcttcccctgccttctgcggcggcagaagtgaagtgcctgaggaccggaaggatggtgcagtcctgctccgcctacggctgcaagaaccgctacgacaaggacaagcccgtttctttccacaaaaagaagatcttctggagccacaggaacagcttcccccacctcctttaccgcctcctgtttcccaggttgatgctgctattggattactaatgccgcctcttcagacccctgttaatctctcagttttctgtgaccacaactatactgtggaggatacaatgcaccagcggaaaaggattcatcagctagaacagcaagttgaaaaactcagaaagaagctcaagaccgcacagcagcgatgcagaaggcaagaacggcagcttgaaaaattaaaggaggttgttcacttccagaaagagaaagacgacgtatcagaaagaggttatgtgattctaccaaatgactactttgaaatagttgaagtaccagcataaaaaaatgaaatgtgtattgatttctaatggggcaataccacatatcctcctctagcctgtaaaggagtttcatttaaaaaaataacatttgattacttatataaaaacagttcagaatatttttttaaaaaaaattctatatatactgtaaaattataaatttttttgtttgtaatttcaggttttttacattttaacaaaatattttaaaagttataaactaacctcagacctctaatgtaagttggtttcaagattggggattttggggtttttttttagtatttatagaaataatgtaaaaataaaaagtaaagagaatgagaacagtgtggtaaaagggtgatttcagtttaaaacttaaaattagtactgttttattgagagaatttagttatattttaaatcagaagtatgggtcagatcatgggacataacttcttagaatatatatatacatatgtacatattctcatatgtaaagtcacaaggttcatttatctttctgaatcagttatcaaagataaattggcaagtcagtacttaagaaaaaagatttgattatcatcacagcagaaaaaagtcattgcatatctgatcaataacttcagattctaagagtggattttttttttttacatgggctcctattttttcccctactgtcttgcattataaaattagaagtgtattttcagtggaagaaacatttttcaataaataaagtaaggcattgtcatcaatgaagtaattaaaactgggacctgatctatgatacgcttttttctttcattacaccctagctgaaggacatccagttccccagctgtagttatgtatctgccttcaagtctctgacaaatgtgctgtgttagtagagtttgatttgtatcatatgataatcttgcacttgactgagttgggacaaggcttcacataaaaaattatttcttcacttttaacacaagttagaaattatatcccatttagttaaatgcgtgatttatattcagaacaacctactatgtagcgtttattttactgaatgtggagatttaaacactgaggtttctgttcaaactgtgagttctgttctttgtgagaaattttacatatattggaagtgaaaatatgttctgagtaaacaaatattgctatgggagttatctttttagatttagaataactgttccaatgataattattacttttatatttcaaagtacactaagatcgttgaagagcaatagaacctttaagacagtattaaaggtgtgaaacaatggcattcaaagtgttgggaatacaggcatgagccaccgcgcccaggcggtctcaatcttttaatactgccttataatgcaaatataaaggtcacctgaattgctacttggcttgaattagcacattccaattgaagttttaagtttttaaaaactaatttaaatgtttactaattgtatagaagtgtactaaaaataattctgttgttgcaaaactttgtacttggaaatccaagtacatgaggggattttttttctttcaactataatttatgtgatccctttcttagaattataacaataatggtgatggcaaatgaaagtttcacatgatacgggctctttagcttgcattaatattccctgatcatcttttaatgct

SEQ ID NO: 417361 - DNA, 436 bp, Homo sapiens
ggctgacggtgggtcatgtgaccaggctctgcattaggcctgccgagaggagtgttttcttgcatccagaaaagacctgagaggcggacgacacctgtgctccgcagagcagaacgtgggaggaacggcgggatgttaaggagctcaagaagcagagagtctacctgcccgacgcgttcgtggagaggagcagcggttgctgttggaggagattgatactggaaaagcagtttctattgagcccccaaatgaagagtgagtgcagatgaagaggaggcaggactcacaagcccttgaactttattccagatctgttagcacctacaggaccctgcaccaggatttcatctgtactatcagcttcttcaaagagagagaggttgttgagtgagtacccacaagggcacagtactaacatgtttacagtgtttgtcct

SEQ ID NO: 417362 - DNA, 797 bp, Homo sapiens
ggagaaccgccttcaggcgtttggactcagtggaggttgtgagtgcccagcagtgtggcctgaatctccgtggggtttagggagacgaaaggaccccagatcgacgtcccctcgttcccactttggggatcggcgctctggctgtttcgtgaaggagagagaggttgattccataccctggctattgtgaataatgctgcagtgaacatgggagtacatacatctgtttgaggaactcagagtggttttccagatgggaatcacattgctctctgtccctgagatcttgctggagacagggctactcagtccctctttgccagattgatactggaaaagcagtttctattgagcccccaaatgaagagtgagtgcagatgaagaggaggcaggactcacaagcccttgaactttattccagatctgttagcacctacaggaccctgcaccaggatttcatctgtactatcagcttcttcaaagagagagaggttgttgaattgatattggaaaagcagtttcccattgagtctcaaatgaagagagtgcagatgaagaggagaagactctgtattgaaccaaggtgctctacacagtagcccctactaagctcccagcagatgccagcatcagtcatccatctcttcatgtggatgtctgagctcatatcaggtgtctgaaagaggcagattctgaggatttgggtcatgatggctgccaaagcttctactcctgacttaaagggcaacaatcctaggagaccaccagcacttacatccctggtaggacatgacacc

SEQ ID NO: 417363 - DNA, 718 bp, Homo sapiens
ggagaaccgccttcaggcgtttggactcagtggaggttgtgagtgcccagcagtgtggcctgaatctccgtggggtttagggagacgaaaggaccccagatcgacgtcccctcgttcccactttggggatcggcgctctggctgtttcgtgaaggagagagaggttgattccataccctggctattgtgaataatgctgcagtgaacatgggagtacatacatctgtttgaggaactcagagtggttttccagatgggaatcacattgctctctgtccctgagatcttgctggagacagggctactcagtccctctttgccagattgatactggaaaagcagtttctattgagcccccaaatgaagagtgagtgcagatgaagaggaggcaggactcacaagcccttgaactttattccagatctgttagcacctacaggaccctgcaccaggatttcatctgtactatcagcttcttcaaagagagagaggttgttgaattgatattggaaaagcagtttcccattgagtctcaaatgaagagagtgcagatgaagaggagctcttcatgtggatgtctgagctcatatcaggtgtctgaaagaggcagattctgaggatttgggtcatgatggctgccaaagcttctactcctgacttaaagggcaacaatcctaggagaccaccagcacttacatccctggtaggacatgacacc

SEQ ID NO: 417364 - DNA, 5138 bp, Homo sapiens
ggctgacggtgggtcatgtgaccaggctctgcattaggcctgccgagaggagtgttttcttgcatccagaaaagacctgagaggcggacgacacctgtgctccgcagagcagaacgtgggaggaacggcgggatgttaaggagctcaagaagcagagagtctacctgcccgacgcgttcgtggagaggagcagcggttgctgttggaggagctttctaggttcctgtagagatctgtatgtagctgttcacttggaagttaattaagaaagaacaaaaactattcatttggattcaaggtccatctccactggtggctgtggtggctttggattgttggaagaccatcaccttcagcaggtctgcacttgggaacaatcattctcccccagcccgagcgtgcctctgccctctgtatcattgacagaggctgtatgtttggaaagagaactttgtgactgcagaactgacagttgactctaattcttgctaccaagtttttccccgacccagtgaaagagtgttaagacttcgacctaggacacattgagaaccaaggccaagactggacagggccatataactgggcttcaaccatggctgggactaagaataagacaagagcccaggccaaaactgaaaaaaaggctgctatacaagctaaagctggagcagagagggaggctactggtgttgttaggcctgtagccaagaccagggccaaagcaaaagccaagacagggtctaagacagatgcagtagcagagatgaaggcagtgtctaagaacaaggttgttgctgagacgaaggaaggagctctgtcagagcctaagactctgggcaaagccatgggagatttcactcccaaggctgggaatgagtccaccagctccacatgtaaaaatgaggctggtactgatgcctggttctgggctggggaagaggccactatcaattcctggttctggaatggagaagaggctggtaatagtttcagcactaagaatgataaacctgaaattggtgcccaggtctgtgctgaggagttggaacctgcggctggggccgattgcaaacctaggtcaggggctgaggaggaggaggaagagaatgttattgggaactggttttgggaaggagatgatactagttttgaccctaatcctaaacctgtgagcaggatagttaagcctcagcctgtgtatgaaattaatgaaaaaaataggcccaaggactggtctgaggtaactatctggcccaatgcccctgctgtaactccagctgtgttaggatttagatcccaggcaccatctgaggcaagccctccttcatatattgttctggcctccgctgaagaaaatgcctgttctttgcctgtggcaacagcttgccgcccttctaggaacactcgctcatgctcacagcctatccctgagtgtcgttttgattctgacccctgcatccagaccatagatgagattagacgtcaaatcaggatcagggaggtaaatgggattaagccatttgcttgtccttgcaaaatggaatgctatatggattctgaggaatttgaaaaacttgttagcttacttaagtcaactactgatcctcttattcataaaatagcacggattgcaatgggtgtccataatgttcacccatttgcccaagagtttattaacgaagtaggtgtagtgacacttattgaaagcttgctcagttttccttcccctgaaatgagaaaaaagactgtaattactctgaatcctccttctggggatgaaagacaacgcaaaattgaattacatgttaagcatatgtgtaaagaaaccatgtcatttcctttgaactcaccgggacagcaatctggattaaagatactaggacaactgactactgattttgtccatcactacattgttgccaattacttttcagagcttttccatttgctgtcctcaggaaattgcaaaaccagaaatcttgttttgaaactacttttaaatatgtctgaaaatccaactgcagccagagacatgatcaatatgaaggcattggcagcattaaaactcatctttaaccagaaagaggcaaaagccaatcttgttagtggtgtggccatatttattaacataaaggagcatatcagaaaaggctcaattgtagttgttgatcacttgagttataatacactcatggccattttcagggaagttaaagagattattgaaacaatgtaaaatgagccagagatagaacattttaagccatcttcaaactctagcaggctgtacattacagtgtacacattatacactgcatctttaacacagagtcacctgtgacaggctctaggtttgagctagactattttgggggtatcaaatgaatattataccttgggctgaaaatgtttgatttttatcttgtctagattggcatatttttaacattttacttaagatagcaaaccagttcgttttaagtaagctaacttgttcattagtatctgtggcttaaaatggcaaaaaagaaaatatccttgagtttgtaatctagttacagaagtaaggcatacacacacacaaagataacagtacctagagagagagtgtgtgtgagtgtgcgtgtctctgtgtgtgcacgtgcacgctcatggccaaatgtgcgcactctacataaaggaggcaggagttcctataggctatttaatgtaagagaaactatttttctcctgttccagctgtatcagatactcgttccgcaacacagaaatgactcagaatctcagacaaaatgtattatttgttcaattttaattttgctactacattcataactcttaaattgttaggctgtttcatttacatcaaagttatctcacaaaagagaaggcaggaaacgttttgtgagtgcctattctatgtcaaacactgtgttggcaccatattttacaagtttttttcctcttctcacagtgatcttgtgagttagttacttatatttttattagaactcattattctgggtaccctccaatgagaattagagaggttaaataccttttcctagattcccacagcaggaaggtggcatagctgttttgtctgacaccagaacccatctcaccacactgctttacagtcttcctgaaggacattttgaggtgggggggccttcaaagctcagagactggtttgaatggtttaattttgcaatggatcatgtccatgccaggtgttacaattcttaacttcctccaaattcgtgtgtccattagacatttggctacatctggctggaggtcaggagaaaattctgaggtaaatagatggattttatctggcagtgtcgaaaatagtaggagcctaaaactttgttcaatgagtaagatgtagatttggagtcatcagcaggggaaacttgttagatgtcctttgtatctttttctatccatttgtattttttctttcccaaagagctgaaatcattttataccctgaatttaaaaggtaattgcttttttcctccttgcgaaatcataccttaattttttttttttttttttttaccatttatgatttattctcctatgtgtcatatgaaaggccaaggggctttatcttttactagtaggcaagcctgggcatttctgcatttgtgccagctaacactacaaaatagacttaattagagaaatttagacccagaattgcagcttcaacaacacaaaacaggaaagctagaagaggttgctgtgtcaacctacaagatagtgattcttggaagttggtatggaccagaaagcattcccaggacatttaggctatggctgagttctctaagactcagggtgggaattataatccctggtctaagctgatatgaaagtttctatgtgtgaaaatatggagttatatgctttgagattttctgccagttaaactaaaacaagatcatactgtaaatgtttgtaacttgcttccccccactgtatactgtaaacatctttgcatgtcaataaatatgcctctacaacatatttttgaatcacttaatatttttcccatgttaacagttggtatatagtgttgtaaacctttattgcatattctcataacatacaatatacacattcttttgcaaaaatgggaacacagtattgagacttgccttttcctcttaacacttatcttttcaatttagtattatatagatctgtcacatgctttttatctaataactttatagaaatataattgccatacattaagctgcatgttgaaagtatacagtgtgatcagttttggaatgtatatacacacaaaaccataaccacaatcaaaattgtaaatacattcatcacccaccaaagctactttttttttgagacagagtcttgctctgtcacccaggctggagtacagtggcgcaatctcggcccactgcaacctctgcttcccaggttcaagtgattctcgtgccttagcctcctgagcagctgggactacaggtgcatgccaccacatccgactaattttttttttattttttgtatttttagtagagacagggtttcaccatgttggccaggctggtcttgaactcctggtctcaagtgatctacccatcttggtctccctgagtgccaggattacaggcgtgagccaccatgcccagcctcccccaaagcttcttaatgcccttttgtaatccctccctcccctctctccctgtgcccctaacccaggcaaccatgggacattttctgacaaaatagaattgttttcatttcctgtaattgtgtataaatggactcatatagcatgtactctttggtcgggaggggatctggcttatttcacttagtgtaattatttgagattcatccatatcatgtgtctcactatttcattgctttttattgccaagtagtattccaccatatggctttaccacagtttatttatccattcacttattgatggacatttgggctgttcagagtttggccattataagtaaagcagctatgagcatttgtgtacaagtgtttttatggacataggctttcatatctttggaatgacatctaacaatattgaatcttcgacccatgaataaaatctctctccactt

SEQ ID NO: 417365 - DNA, 5202 bp, Homo sapiens
ggctgacggtgggtcatgtgaccaggctctgcattaggcctgccgagaggagtgttttcttgcatccagaaaagacctgagaggcggacgacacctgtgctccgcagagcagaacgtgggaggaacggcgggatgttaaggagctcaagaagcagagagtctacctgcccgacgcgttcgtggagaggagcagcggttgctgttggaggaggtgggtgcaaggacggcagatggcatccctgagaggtggtgactgagactagatgcgggtgcagctttctaggttcctgtagagatctgtatgtagctgttcacttggaagttaattaagaaagaacaaaaactattcatttggattcaaggtccatctccactggtggctgtggtggctttggattgttggaagaccatcaccttcagcaggtctgcacttgggaacaatcattctcccccagcccgagcgtgcctctgccctctgtatcattgacagaggctgtatgtttggaaagagaactttgtgactgcagaactgacagttgactctaattcttgctaccaagtttttccccgacccagtgaaagagtgttaagacttcgacctaggacacattgagaaccaaggccaagactggacagggccatataactgggcttcaaccatggctgggactaagaataagacaagagcccaggccaaaactgaaaaaaaggctgctatacaagctaaagctggagcagagagggaggctactggtgttgttaggcctgtagccaagaccagggccaaagcaaaagccaagacagggtctaagacagatgcagtagcagagatgaaggcagtgtctaagaacaaggttgttgctgagacgaaggaaggagctctgtcagagcctaagactctgggcaaagccatgggagatttcactcccaaggctgggaatgagtccaccagctccacatgtaaaaatgaggctggtactgatgcctggttctgggctggggaagaggccactatcaattcctggttctggaatggagaagaggctggtaatagtttcagcactaagaatgataaacctgaaattggtgcccaggtctgtgctgaggagttggaacctgcggctggggccgattgcaaacctaggtcaggggctgaggaggaggaggaagagaatgttattgggaactggttttgggaaggagatgatactagttttgaccctaatcctaaacctgtgagcaggatagttaagcctcagcctgtgtatgaaattaatgaaaaaaataggcccaaggactggtctgaggtaactatctggcccaatgcccctgctgtaactccagctgtgttaggatttagatcccaggcaccatctgaggcaagccctccttcatatattgttctggcctccgctgaagaaaatgcctgttctttgcctgtggcaacagcttgccgcccttctaggaacactcgctcatgctcacagcctatccctgagtgtcgttttgattctgacccctgcatccagaccatagatgagattagacgtcaaatcaggatcagggaggtaaatgggattaagccatttgcttgtccttgcaaaatggaatgctatatggattctgaggaatttgaaaaacttgttagcttacttaagtcaactactgatcctcttattcataaaatagcacggattgcaatgggtgtccataatgttcacccatttgcccaagagtttattaacgaagtaggtgtagtgacacttattgaaagcttgctcagttttccttcccctgaaatgagaaaaaagactgtaattactctgaatcctccttctggggatgaaagacaacgcaaaattgaattacatgttaagcatatgtgtaaagaaaccatgtcatttcctttgaactcaccgggacagcaatctggattaaagatactaggacaactgactactgattttgtccatcactacattgttgccaattacttttcagagcttttccatttgctgtcctcaggaaattgcaaaaccagaaatcttgttttgaaactacttttaaatatgtctgaaaatccaactgcagccagagacatgatcaatatgaaggcattggcagcattaaaactcatctttaaccagaaagaggcaaaagccaatcttgttagtggtgtggccatatttattaacataaaggagcatatcagaaaaggctcaattgtagttgttgatcacttgagttataatacactcatggccattttcagggaagttaaagagattattgaaacaatgtaaaatgagccagagatagaacattttaagccatcttcaaactctagcaggctgtacattacagtgtacacattatacactgcatctttaacacagagtcacctgtgacaggctctaggtttgagctagactattttgggggtatcaaatgaatattataccttgggctgaaaatgtttgatttttatcttgtctagattggcatatttttaacattttacttaagatagcaaaccagttcgttttaagtaagctaacttgttcattagtatctgtggcttaaaatggcaaaaaagaaaatatccttgagtttgtaatctagttacagaagtaaggcatacacacacacaaagataacagtacctagagagagagtgtgtgtgagtgtgcgtgtctctgtgtgtgcacgtgcacgctcatggccaaatgtgcgcactctacataaaggaggcaggagttcctataggctatttaatgtaagagaaactatttttctcctgttccagctgtatcagatactcgttccgcaacacagaaatgactcagaatctcagacaaaatgtattatttgttcaattttaattttgctactacattcataactcttaaattgttaggctgtttcatttacatcaaagttatctcacaaaagagaaggcaggaaacgttttgtgagtgcctattctatgtcaaacactgtgttggcaccatattttacaagtttttttcctcttctcacagtgatcttgtgagttagttacttatatttttattagaactcattattctgggtaccctccaatgagaattagagaggttaaataccttttcctagattcccacagcaggaaggtggcatagctgttttgtctgacaccagaacccatctcaccacactgctttacagtcttcctgaaggacattttgaggtgggggggccttcaaagctcagagactggtttgaatggtttaattttgcaatggatcatgtccatgccaggtgttacaattcttaacttcctccaaattcgtgtgtccattagacatttggctacatctggctggaggtcaggagaaaattctgaggtaaatagatggattttatctggcagtgtcgaaaatagtaggagcctaaaactttgttcaatgagtaagatgtagatttggagtcatcagcaggggaaacttgttagatgtcctttgtatctttttctatccatttgtattttttctttcccaaagagctgaaatcattttataccctgaatttaaaaggtaattgcttttttcctccttgcgaaatcataccttaattttttttttttttttttttaccatttatgatttattctcctatgtgtcatatgaaaggccaaggggctttatcttttactagtaggcaagcctgggcatttctgcatttgtgccagctaacactacaaaatagacttaattagagaaatttagacccagaattgcagcttcaacaacacaaaacaggaaagctagaagaggttgctgtgtcaacctacaagatagtgattcttggaagttggtatggaccagaaagcattcccaggacatttaggctatggctgagttctctaagactcagggtgggaattataatccctggtctaagctgatatgaaagtttctatgtgtgaaaatatggagttatatgctttgagattttctgccagttaaactaaaacaagatcatactgtaaatgtttgtaacttgcttccccccactgtatactgtaaacatctttgcatgtcaataaatatgcctctacaacatatttttgaatcacttaatatttttcccatgttaacagttggtatatagtgttgtaaacctttattgcatattctcataacatacaatatacacattcttttgcaaaaatgggaacacagtattgagacttgccttttcctcttaacacttatcttttcaatttagtattatatagatctgtcacatgctttttatctaataactttatagaaatataattgccatacattaagctgcatgttgaaagtatacagtgtgatcagttttggaatgtatatacacacaaaaccataaccacaatcaaaattgtaaatacattcatcacccaccaaagctactttttttttgagacagagtcttgctctgtcacccaggctggagtacagtggcgcaatctcggcccactgcaacctctgcttcccaggttcaagtgattctcgtgccttagcctcctgagcagctgggactacaggtgcatgccaccacatccgactaattttttttttattttttgtatttttagtagagacagggtttcaccatgttggccaggctggtcttgaactcctggtctcaagtgatctacccatcttggtctccctgagtgccaggattacaggcgtgagccaccatgcccagcctcccccaaagcttcttaatgcccttttgtaatccctccctcccctctctccctgtgcccctaacccaggcaaccatgggacattttctgacaaaatagaattgttttcatttcctgtaattgtgtataaatggactcatatagcatgtactctttggtcgggaggggatctggcttatttcacttagtgtaattatttgagattcatccatatcatgtgtctcactatttcattgctttttattgccaagtagtattccaccatatggctttaccacagtttatttatccattcacttattgatggacatttgggctgttcagagtttggccattataagtaaagcagctatgagcatttgtgtacaagtgtttttatggacataggctttcatatctttggaatgacatctaacaatattgaatcttcgacccatgaataaaatctctctccactt

SEQ ID NO: 417366 - DNA, 5115 bp, Homo sapiens
ggctgacggtgggtcatgtgaccaggctctgcattaggcctgccgagaggagtgttttcttgcatccagaaaagacctgagaggcggacgacacctgtgctccgcagagcagaacgtgggaggaacggcgggatgttaaggagctcaagaagcagagagtctacctgcccgacgcgttcgtggagaggagcagcggttgctgttggaggaggtgggtgcaaggacggcagatggcatccctgagaggtggtgactgagactagatgcgggtgcaggtccatctccactggtggctgtggtggctttggattgttggaagaccatcaccttcagcaggtctgcacttgggaacaatcattctcccccagcccgagcgtgcctctgccctctgtatcattgacagaggctgtatgtttggaaagagaactttgtgactgcagaactgacagttgactctaattcttgctaccaagtttttccccgacccagtgaaagagtgttaagacttcgacctaggacacattgagaaccaaggccaagactggacagggccatataactgggcttcaaccatggctgggactaagaataagacaagagcccaggccaaaactgaaaaaaaggctgctatacaagctaaagctggagcagagagggaggctactggtgttgttaggcctgtagccaagaccagggccaaagcaaaagccaagacagggtctaagacagatgcagtagcagagatgaaggcagtgtctaagaacaaggttgttgctgagacgaaggaaggagctctgtcagagcctaagactctgggcaaagccatgggagatttcactcccaaggctgggaatgagtccaccagctccacatgtaaaaatgaggctggtactgatgcctggttctgggctggggaagaggccactatcaattcctggttctggaatggagaagaggctggtaatagtttcagcactaagaatgataaacctgaaattggtgcccaggtctgtgctgaggagttggaacctgcggctggggccgattgcaaacctaggtcaggggctgaggaggaggaggaagagaatgttattgggaactggttttgggaaggagatgatactagttttgaccctaatcctaaacctgtgagcaggatagttaagcctcagcctgtgtatgaaattaatgaaaaaaataggcccaaggactggtctgaggtaactatctggcccaatgcccctgctgtaactccagctgtgttaggatttagatcccaggcaccatctgaggcaagccctccttcatatattgttctggcctccgctgaagaaaatgcctgttctttgcctgtggcaacagcttgccgcccttctaggaacactcgctcatgctcacagcctatccctgagtgtcgttttgattctgacccctgcatccagaccatagatgagattagacgtcaaatcaggatcagggaggtaaatgggattaagccatttgcttgtccttgcaaaatggaatgctatatggattctgaggaatttgaaaaacttgttagcttacttaagtcaactactgatcctcttattcataaaatagcacggattgcaatgggtgtccataatgttcacccatttgcccaagagtttattaacgaagtaggtgtagtgacacttattgaaagcttgctcagttttccttcccctgaaatgagaaaaaagactgtaattactctgaatcctccttctggggatgaaagacaacgcaaaattgaattacatgttaagcatatgtgtaaagaaaccatgtcatttcctttgaactcaccgggacagcaatctggattaaagatactaggacaactgactactgattttgtccatcactacattgttgccaattacttttcagagcttttccatttgctgtcctcaggaaattgcaaaaccagaaatcttgttttgaaactacttttaaatatgtctgaaaatccaactgcagccagagacatgatcaatatgaaggcattggcagcattaaaactcatctttaaccagaaagaggcaaaagccaatcttgttagtggtgtggccatatttattaacataaaggagcatatcagaaaaggctcaattgtagttgttgatcacttgagttataatacactcatggccattttcagggaagttaaagagattattgaaacaatgtaaaatgagccagagatagaacattttaagccatcttcaaactctagcaggctgtacattacagtgtacacattatacactgcatctttaacacagagtcacctgtgacaggctctaggtttgagctagactattttgggggtatcaaatgaatattataccttgggctgaaaatgtttgatttttatcttgtctagattggcatatttttaacattttacttaagatagcaaaccagttcgttttaagtaagctaacttgttcattagtatctgtggcttaaaatggcaaaaaagaaaatatccttgagtttgtaatctagttacagaagtaaggcatacacacacacaaagataacagtacctagagagagagtgtgtgtgagtgtgcgtgtctctgtgtgtgcacgtgcacgctcatggccaaatgtgcgcactctacataaaggaggcaggagttcctataggctatttaatgtaagagaaactatttttctcctgttccagctgtatcagatactcgttccgcaacacagaaatgactcagaatctcagacaaaatgtattatttgttcaattttaattttgctactacattcataactcttaaattgttaggctgtttcatttacatcaaagttatctcacaaaagagaaggcaggaaacgttttgtgagtgcctattctatgtcaaacactgtgttggcaccatattttacaagtttttttcctcttctcacagtgatcttgtgagttagttacttatatttttattagaactcattattctgggtaccctccaatgagaattagagaggttaaataccttttcctagattcccacagcaggaaggtggcatagctgttttgtctgacaccagaacccatctcaccacactgctttacagtcttcctgaaggacattttgaggtgggggggccttcaaagctcagagactggtttgaatggtttaattttgcaatggatcatgtccatgccaggtgttacaattcttaacttcctccaaattcgtgtgtccattagacatttggctacatctggctggaggtcaggagaaaattctgaggtaaatagatggattttatctggcagtgtcgaaaatagtaggagcctaaaactttgttcaatgagtaagatgtagatttggagtcatcagcaggggaaacttgttagatgtcctttgtatctttttctatccatttgtattttttctttcccaaagagctgaaatcattttataccctgaatttaaaaggtaattgcttttttcctccttgcgaaatcataccttaattttttttttttttttttttaccatttatgatttattctcctatgtgtcatatgaaaggccaaggggctttatcttttactagtaggcaagcctgggcatttctgcatttgtgccagctaacactacaaaatagacttaattagagaaatttagacccagaattgcagcttcaacaacacaaaacaggaaagctagaagaggttgctgtgtcaacctacaagatagtgattcttggaagttggtatggaccagaaagcattcccaggacatttaggctatggctgagttctctaagactcagggtgggaattataatccctggtctaagctgatatgaaagtttctatgtgtgaaaatatggagttatatgctttgagattttctgccagttaaactaaaacaagatcatactgtaaatgtttgtaacttgcttccccccactgtatactgtaaacatctttgcatgtcaataaatatgcctctacaacatatttttgaatcacttaatatttttcccatgttaacagttggtatatagtgttgtaaacctttattgcatattctcataacatacaatatacacattcttttgcaaaaatgggaacacagtattgagacttgccttttcctcttaacacttatcttttcaatttagtattatatagatctgtcacatgctttttatctaataactttatagaaatataattgccatacattaagctgcatgttgaaagtatacagtgtgatcagttttggaatgtatatacacacaaaaccataaccacaatcaaaattgtaaatacattcatcacccaccaaagctactttttttttgagacagagtcttgctctgtcacccaggctggagtacagtggcgcaatctcggcccactgcaacctctgcttcccaggttcaagtgattctcgtgccttagcctcctgagcagctgggactacaggtgcatgccaccacatccgactaattttttttttattttttgtatttttagtagagacagggtttcaccatgttggccaggctggtcttgaactcctggtctcaagtgatctacccatcttggtctccctgagtgccaggattacaggcgtgagccaccatgcccagcctcccccaaagcttcttaatgcccttttgtaatccctccctcccctctctccctgtgcccctaacccaggcaaccatgggacattttctgacaaaatagaattgttttcatttcctgtaattgtgtataaatggactcatatagcatgtactctttggtcgggaggggatctggcttatttcacttagtgtaattatttgagattcatccatatcatgtgtctcactatttcattgctttttattgccaagtagtattccaccatatggctttaccacagtttatttatccattcacttattgatggacatttgggctgttcagagtttggccattataagtaaagcagctatgagcatttgtgtacaagtgtttttatggacataggctttcatatctttggaatgacatctaacaatattgaatcttcgacccatgaataaaatctctctccactt

SEQ ID NO: 417367 - DNA, 271 bp, Homo sapiens
cagcctcccaatgtgctgggattacaggtgtgagccaccacgcccggccaaactttctcagtttcgtgggaaagtaataaaaacaggaaatctaatggaggcatccttaatgaggctgggcgcacgtctgcatttgaagtgcctttatcggcatcactgcccaggcagcagctcactgacccagctccaccattggtcatttgtggctttctgtggacctcaagcctcctacctacccttcaagaaaatattccccgcctaaaacacacat

SEQ ID NO: 417368 - DNA, 509 bp, Homo sapiens
cagtgcatgtccaccataccacctgagagtctgtggaatctaattttctgttatacttctttccttacactcattttcctgtctttattatgatagtctaactttttctcctcaaaggtatagctgccttgctttcatgaaaacacactttcctattgtgatttatcagaggcctttccatatctcagccactatgctatgacagattttataattaataagtgcatttcaaagtgaaaacgttacaaacatgcttaacagatgtttttataacatgaaatattctactgcgttaagatcaaaatgctgactatacttgttccgtataccttcagaccactgttaatgtaatattttggcaaggtgaatggtcttttttggatataaaaatctcagcataagccaggcatggtggtacacagctgtattctcagctatttaagaggattgcttgagtccaggaaatcaagaccagcctgggtaacatagtgacacccagtctccattaa

SEQ ID NO: 417369 - DNA, 292 bp, Homo sapiens
gtgatcctcccacctcagcctcctgggactgcaagtgtatgccaccacactctgctaatttttttaattctttctttttgtagagatgaggtcacactgtattgcccaggctggtccccccaacacttctaattttccagctcaatgactaatttgcactgctgttgtctggtcctaacaggtaaggaccattctcagactgccacttgctcatccttcaggactcgtccaaatgtccctttttctctgcaccctcaggttcttgaccatctcaggcccccatcgttagctt

SEQ ID NO: 417370 - DNA, 708 bp, Homo sapiens
ctcaataaacactatctccatccctttggtgagagctcccttgatgagagatcactattactctactgttgcaatgcagtattctcttctacatcatcttaactgcttttcataatgcaactcttgtctagctttatagttttggcttttcattcatacttttccttttcaagcttatttttaaaaaaactttaatagctacatcgatgatacagttgatagcttaatttctcagatctttgacatcttcaattttaatgactctttccgcaatgacttgcagattgccaccttattactgtgtcttcacatggcagaaggggagagagatagagcaaacgttctggtctttgttcctctttttataagaacactaatcccatcatgggggcccaaccttcatgacctcatctaaatttaattacttcccaaaggccccgcctccaaatatcatcacattgtggattagggcttcaccatatgaatatttggtgggaacacaaacattcagtctataacactgtcttatctcttttttctccttgacggtttagtcttttctccttatgttcacattcttctgtccttttggcttctggtttgataggttacaattctagctaccttccgaataactagcgatttcagttttaattccaggttctttggcgaaacccactttgagacaactatctgtgtagaaaaatt

SEQ ID NO: 417371 - DNA, 640 bp, Homo sapiens
aagctcaacaacctgctcatgtacaggatacatacactgtgaaggtttgagagattatgactaattatatggaagtgaggatgttgagtaactttttgtacagtatccaaattactgaaacagagtgattttattttccaagtgttaagccatacccacaggaaacaaccagggctattctaccctagcaaagtgccttagctagtcatgcattctgcaacaagtctccatggcaaatttcctaacacacacttctaaacacaaagaactcctccaagtaataaagagggtggtgtgagctcaactaaaaggatattctgctactcctgggatatttttatgagaggatcataaccttattgtcaccttgccatcctaaaatggtgtaaaaaatataaaatcatagaacttctggaagtaagcagcagccttagaggtgatcaagtgaatccagttgcttcacttttcagatgaggaaattgtcacgagaaaaaaaaaaaaaagtgaatgacttgcccaaggccattcaattactcagtggcatagtaaagctatgatcaaggactcaggtccaccactttcttcacgaagtcacagaaatagccttgctaatcttaaaactatgtgccaaacataacct

SEQ ID NO: 417372 - DNA, 382 bp, Homo sapiens
aattctttaagcatgtacagaaaagtgacctgaaatgtttttgggtgatgaacttacagagctggtcttgaactcctgggctcaagtgatcctcccacctaggcctcctaaagtgctgggattacaggtgtcagctatcgtgtccagcctgagatatttcttatgagtaatgtggatggtacgtgagtccatagagtaaggcatttattgtaaacctccagggagtttctgaaaatagtatcttctcttcaaacctaggatgaagctggaggcagattcgtcgctttctctggagaaggacagtcattgcgtaaaaagggaagaaagccctaagtgaggactgttggctgattggaaaataataaaagaatcatttgcaaca

SEQ ID NO: 417373 - DNA, 1095 bp, Homo sapiens
tgagcctctggggcgtaccggcttggcgcggcggcagcggcagcggcggctgggagagcggtcggcggggtttcttcgttgcattgcctgagaggagcggagtctgccaggtggtgtccatcatgttctctttcaacatgttcgaccaccctattcccagggtcttccaaaaccgcttctccacacagtaccgctgcttctctgtgtccatgctagcagggcctaatgacaggtcagatgtggagaaaggagggaagataattatgccaccctcggccctggaccaactcagccgacttaacattacctatcccatgctgttcaaactgaccaataagaattcggaccgcatgacgcattgtggcgtgctggagtttgtggctgatgagggcatctgctacctcccacactggatgatgcagaacttactcttggaagaaggcggcctggtccaggtggagagcgtcaaccttcaagtggccacctactccaaattccaacctcagagccctgacttcctggacatcaccaaccccaaagccgtattagaaaacgcacttaggaactttgcctgtctgaccaccggggatgtgattgccatcaactataatgaaaagatctacgaactgcgtgtgatggagaccaaacccgacaaggcagtgtccatcattgagtgtgacatgaacgtggactttgatgctcccctgggctacaaagaacccgaaagacaagtccagcatgaggagtcgacagaaggtgaagccgaccacagtggctatgctggagagctgggcttccgcgctttctctggatctggcaatagactggatggaaagaagaaaggggtagagcccagcccctccccaatcaagcctggagatattaaaagaggaattcccaattatgaatttaaacttggtaagataactttcatcagaaattcacgtccccttgtcaaaaaggttgaagaggatgaagctggaggcagattcgtcgctttctctggagaaggacagtcattgcgtaaaaagggaagaaagccctaagtgaggactgttggctgattggaaaataataaaagaatcatttgcaaca

SEQ ID NO: 417374 - DNA, 1199 bp, Homo sapiens
tgagcctctggggcgtaccggcttggcgcggcggcagcggcagcggcggctgggagagcggtcggcggggtttcttcgttgcattgcctgagaggagcggagtctgccaggtggtgtccatcatgttctctttcaacatgttcgaccaccctattcccagggtcttccaaaaccgcttctccacacagtaccgctgcttctctgtgtccatgctagcagggcctaatgacaggtcagatgtggagaaaggagggaagataattatgccaccctcggccctggaccaactcagccgacttaacattacctatcccatgctgttcaaactgaccaataagaattcggaccgcatgacgcattgtggcgtgctggagtttgtggctgatgagggcatctgctacctcccacactggtgcagaacttactcttggaagaaggcggcctggtccaggtggagagcgtcaaccttcaagtggccacctactccaagagtaagttctgctacctcccacactggatgatgcagaacttactcttggaagaaggcggcctggtccaggtggagagcgtcaaccttcaagtggccacctactccaaattccaacctcagagccctgacttcctggacatcaccaaccccaaagccgtattagaaaacgcacttaggaactttgcctgtctgaccaccggggatgtgattgccatcaactataatgaaaagatctacgaactgcgtgtgatggagaccaaacccgacaaggcagtgtccatcattgagtgtgacatgaacgtggactttgatgctcccctgggctacaaagaacccgaaagacaagtccagcatgaggagtcgacagaaggtgaagccgaccacagtggctatgctggagagctgggcttccgcgctttctctggatctggcaatagactggatggaaagaagaaaggggtagagcccagcccctccccaatcaagcctggagatattaaaagaggaattcccaattatgaatttaaacttggtaagataactttcatcagaaattcacgtccccttgtcaaaaaggttgaagaggatgaagctggaggcagattcgtcgctttctctggagaaggacagtcattgcgtaaaaagggaagaaagccctaagtgaggactgttggctgattggaaaataataaaagaatcatttgcaaca

SEQ ID NO: 417375 - DNA, 1915 bp, Homo sapiens
tgagcctctggggcgtaccggcttggcgcggcggcagcggcagcggcggctgggagagcggtcggcggggtttcttcgttgcattgcctgagaggagcggagtctgccaggtggtgtccatcatgttctctttcaacatgttcgaccaccctattcccagggtcttccaaaaccgcttctccacacagtaccgctgcttctctgtgtccatgctagcagggcctaatgacaggtcagatgtggagaaaggagggaagataattatgccaccctcggccctggaccaactcagccgacttaacattacctatcccatgctgttcaaactgaccaataagaattcggaccgcatgacgcattgtggcgtgctggagtttgtggctgatgagggcatctgctacctcccacactggatgatgcagaacttactcttggaagaaggcggcctggtccaggtggagagcgtcaaccttcaagtggccacctactccaaattccaacctcagagccctgacttcctggacatcaccaaccccaaagccgtattagaaaacgcacttaggaactttgcctgtctgaccaccggggatgtgattgccatcaactataatgaaaagatctacgaactgcgtgtgatggagaccaaacccgacaaggcagtgtccatcattgagtgtgacatgaacgtggactttgatgctcccctgggctacaaagaacccgaaagacaagtccagcatgaggagtcgacagaaggtgaagccgaccacagtggctatgctggagagctgggcttccgcgctttctctggatctggcaatagactggatggaaagaagaaaggggtagagcccagcccctccccaatcaagcctggagatattaaaagaggaattcccaattatgaatttaaacttggatgaagctggaggcagattcgtcgctttctctggagaaggacagtcattgcgtaaaaagggaagaaagccctaagtgaggactgttggctgattggaaaataataaaagaatcatttgcaacatcttggcttttagttactggcactgacagggacgagcctcatcagagaatactctgttacttaagatttatttagagttacctaagaattattaagtttgacttggaagtggagcagcaggactttgtagttgtatgcttgatttggggaaagacaaagagctgtccctgagggcctgtagatagctgcctcctcacctcttcacgctttcagcttgaggggagctcccactgcctcagcaggagcaattctgcatccctaattctgtcaaaacctatgaaggtgactaaattgtctaacatgaagtgttctttctttttcttcatttatcctttcttttcctacatcaattgcataggtgtcagtctttggcctaaaaaaaggctttaaatagacatgtgttctataagtagtggctgtcccactactgtggctgcaatttaagtatttgacaaagaatgtttctatttttattttacatatttttttcaaaaacaccactcagaagaacctgatctgaatgagtttgcacttttattctcatttcatatggacataactggctccttagtgaacctgttcatagtgaaacaactccatggagaagcaaacatgtgaatgttagaatgaacaaatgctaaagagatgttcctctccttcttccctactccccaactcccaattttaatttattaaatcatccaagcttctgctggcctgtattttttatcagtatttatttggtcttagatcttcactttctataacgtgagatcttttgacatgctaatctgattattttaaatttgttcccatgagccactgtgcctggccccattggggtcgacgctaagccaagaatttcaagtaaaa

SEQ ID NO: 417376 - DNA, 1042 bp, Homo sapiens
tgagcctctggggcgtaccggcttggcgcggcggcagcggcagcggcggctgggagagcggtcggcggggtttcttcgttgcattgcctgagaggagcggagtctgccaggtggtgtccatcatgttctctttcaacatgttcgaccaccctattcccagggtcttccaaaaccgcttctccacacagtaccgctgcttctctgtgtccatgctagcagggcctaatgacaggtcagatgtggagaaaggagggaagataattatgccaccctcggccctggaccaactcagccgacttaacattacctatcccatgctgttcaaactgaccaataagaattcggaccgcatgacgcattgtggcgtgctggagtttgtggctgatgagggcatctgctacctcccacactggatgatgcagaacttactcttggaagaaggcggcctggtccaggtggagagcgtcaaccttcaagtggccacctactccaaattccaacctcagagccctgacttcctggacatcaccaaccccaaagccgtattagaaaacgcacttaggaactttgcctgtctgaccaccggggatgtgattgccatcaactataatgaaaagatctacgaactgcgtgtgatggagaccaaacccgacaaggcagtgtccatcattgagtgtgacatgaacgtggactttgatgctcccctgggctacaaagaacccgaaagacaagtccagcatgaggagtcgacagaaggtgaagccgaccacagtggctatgctggagagctgggcttccgcgctttctctggatctggcaatagactggatggaaagaagaaaggggtagagcccagcccctccccaatcaagcctggagatattaaaagaggaattcccaattatgaatttaaacttggatgaagctggaggcagattcgtcgctttctctggagaaggacagtcattgcgtaaaaagggaagaaagccctaagtgaggactgttggctgattggaaaataataaaagaatcatttgcaaca

SEQ ID NO: 417377 - DNA, 2360 bp, Homo sapiens
tgagcctctggggcgtaccggcttggcgcggcggcagcggcagcggcggctgggagagcggtcggcggggtttcttcgttgcattgcctgagaggagcggagtctgccaggtggtgtccatcatgttctctttcaacatgttcgaccaccctattcccagggtcttccaaaaccgcttctccacacagtaccgctgcttctctgtgtccatgctagcagggcctaatgacaggtcagatgtggagaaaggagggaagataattatgccaccctcggccctggaccaactcagccgacttaacattacctatcccatgctgttcaaactgaccaataagaattcggaccgcatgacgcattgtggcgtgctggagtttgtggctgatgagggcatctgctacctcccacactggatgatgcagaacttactcttggaagaaggcggcctggtccaggtggagagcgtcaaccttcaagtggccacctactccaaattccaacctcagagccctgacttcctggacatcaccaaccccaaagccgtattagaaaacgcacttaggaactttgcctgtctgaccaccggggatgtgattgccatcaactataatgaaaagatctacgaactgcgtgtgatggagaccaaacccgacaaggcagtgtccatcattgagtgtgacatgaacgtggactttgatgctcccctgggctacaaagaacccgaaagacaagtccagcatgaggagtcgacagaaggtgaagccgaccacagtggctatgctggagagctgggcttccgcgctttctctggatctggcaatagactggatggaaagaagaaaggggtagagcccagcccctccccaatcaagcctggagatattaaaagaggaattcccaattatgaatttaaacttggtaagataactttcatcagaaattcacgtccccttgtcaaaaaggttgaagaggtgagtgtatttccttgtatttccttggttggtaatgaggagatttatttgctagtgatgactgaagttcttggcattctgagtaggggtgtgcattagtctgtttccaagctgctggtaaagatgtacccgagactgggcaatttacaaaagaaagaggtttaatggacttacagttcacatggctggggaggcctcacaatcatggcagggggcaagtcacatcttacatggatggtagcaggcagagaaaaagctggtgcagggaaacacctacttataaaaccatcagatctcatgagacttattcactatcatgataacagcacggaaaagacccgccctcatgactcagttacctcccaccgactcagttacctcccacctggtccctcccacaacacgtggtaattcaagatgagatttgggtggggacgcagccaaaccacatgagggtgtctgtcatgttttccctttcctagggtccctctgctccctggtgtcctgtttttttctgtagagctggtgtagggtgtatgaaacagaagacttgcagcatgggggtcaggagctctgtcttgctctagagccgactccaggctctgttatcacagaactgtgtgccctgggtgggcttcgtcttccaacagagaccttgaacttcaaatataggcagcaccttctagctgagcagggtggtggcgggacagaggaaggcaagggctgagcatcctgtagacatgggcactttgtgggaatatggccaggcctggcagcaactggaacgcagtcacctctttgtgatgaggatttctacaacaccagcgcttcagacccatcgctctcctggttccttttctcaaaggattggacccttgaggatccaggatcagggcagagggcagatgtactgagccacccattcaggaccagctgctacatgggagccatcccaattactgaactcttttctctagcacttggggtggttggggacagagaccactgtgaagtttgcacacctggtcctactcacaaccacttctgggctcaatgttcaagttgaaacagcattgggcattgggacctttcaggctcagaggagcaaacatagtggccagtcagacctcaccctccagctcctccttcaggcaccatccaggcttcaccagctacaggctgcctttctcactaaaagccagtgcctgactccgacctaagaccttagcatgggacgtcccccaggctgactgtgacctgactgttgcaaatttacagaaggcaggggaggccagtgggcacagcaggcctgtttgaccataaatatgtatttaagaagtatatgtttaaagatgggattgaagacatatttagctctattccatcctg

SEQ ID NO: 417378 - DNA, 1140 bp, Homo sapiens
caagcaggacccttgaccactaaccgcctgtggtcgcgtccgccggtcctgaacgtggctcgcattctgtctcagccggacttgccctccttgacgaaagaaaggaaggtttgtgtccattcacgggtttcccaagtgctggacgcgcaacaggtttccataaacccaaattctctttcaacatgttcgaccaccctattcccagggtcttccaaaaccgcttctccacacagtaccgctgcttctctgtgtccatgctagcagggcctaatgacaggtcagatgtggagaaaggagggaagataattatgccaccctcggccctggaccaactcagccgacttaacattacctatcccatgctgttcaaactgaccaataagaattcggaccgcatgacgcattgtggcgtgctggagtttgtggctgatgagggcatctgctacctcccacactggatgatgcagaacttactcttggaagaaggcggcctggtccaggtggagagcgtcaaccttcaagtggccacctactccaaattccaacctcagagccctgacttcctggacatcaccaaccccaaagccgtattagaaaacgcacttaggaactttgcctgtctgaccaccggggatgtgattgccatcaactataatgaaaagatctacgaactgcgtgtgatggagaccaaacccgacaaggcagtgtccatcattgagtgtgacatgaacgtggactttgatgctcccctgggctacaaagaacccgaaagacaagtccagcatgaggagtcgacagaaggtgaagccgaccacagtggctatgctggagagctgggcttccgcgctttctctggatctggcaatagactggatggaaagaagaaaggggtagagcccagcccctccccaatcaagcctggagatattaaaagaggaattcccaattatgaatttaaacttggtaagataactttcatcagaaattcacgtccccttgtcaaaaaggttgaagaggatgaagctggaggcagattcgtcgctttctctggagaaggacagtcattgcgtaaaaagggaagaaagccctaagtgaggactgttggctgattggaaaataataaaagaatcatttgcaaca

SEQ ID NO: 417379 - DNA, 962 bp, Homo sapiens
tgagcctctggggcgtaccggcttggcgcggcggcagcggcagcggcggctgggagagcggtcggcggggtttcttcgttgcattgcctgagaggagcggagtctgccaggtggtgtccatcatgtaattatgccaccctcggccctggaccaactcagccgacttaacattacctatcccatgctgttcaaactgaccaataagaattcggaccgcatgacgcattgtggcgtgctggagtttgtggctgatgagggcatctgctacctcccacactggatgatgcagaacttactcttggaagaaggcggcctggtccaggtggagagcgtcaaccttcaagtggccacctactccaaattccaacctcagagccctgacttcctggacatcaccaaccccaaagccgtattagaaaacgcacttaggaactttgcctgtctgaccaccggggatgtgattgccatcaactataatgaaaagatctacgaactgcgtgtgatggagaccaaacccgacaaggcagtgtccatcattgagtgtgacatgaacgtggactttgatgctcccctgggctacaaagaacccgaaagacaagtccagcatgaggagtcgacagaaggtgaagccgaccacagtggctatgctggagagctgggcttccgcgctttctctggatctggcaatagactggatggaaagaagaaaggggtagagcccagcccctccccaatcaagcctggagatattaaaagaggaattcccaattatgaatttaaacttggtaagataactttcatcagaaattcacgtccccttgtcaaaaaggttgaagaggatgaagctggaggcagattcgtcgctttctctggagaaggacagtcattgcgtaaaaagggaagaaagccctaagtgaggactgttggctgattggaaaataataaaagaatcatttgcaaca

SEQ ID NO: 417380 - DNA, 1069 bp, Homo sapiens
tgagcctctggggcgtaccggcttggcgcggcggcagcggcagcggcggctgggagagcggtcggcggggtttcttcgttgcattgcctgagaggagcggagtctgccaggtggtgtccatcatgttctctttcaacatgttcgaccaccctattcccagggtcttccaaaaccgcttctccacacagtaccgctgcttctctgtgtccatgctagcagggcctaatgacagtaattatgccaccctcggccctggaccaactcagccgacttaacattacctatcccatgctgttcaaactgaccaataagaattcggaccgcatgacgcattgtggcgtgctggagtttgtggctgatgagggcatctgctacctcccacactggatgatgcagaacttactcttggaagaaggcggcctggtccaggtggagagcgtcaaccttcaagtggccacctactccaaattccaacctcagagccctgacttcctggacatcaccaaccccaaagccgtattagaaaacgcacttaggaactttgcctgtctgaccaccggggatgtgattgccatcaactataatgaaaagatctacgaactgcgtgtgatggagaccaaacccgacaaggcagtgtccatcattgagtgtgacatgaacgtggactttgatgctcccctgggctacaaagaacccgaaagacaagtccagcatgaggagtcgacagaaggtgaagccgaccacagtggctatgctggagagctgggcttccgcgctttctctggatctggcaatagactggatggaaagaagaaaggggtagagcccagcccctccccaatcaagcctggagatattaaaagaggaattcccaattatgaatttaaacttggtaagataactttcatcagaaattcacgtccccttgtcaaaaaggttgaagaggatgaagctggaggcagattcgtcgctttctctggagaaggacagtcattgcgtaaaaagggaagaaagccctaagtgaggactgttggctgattggaaaataataaaagaatcatttgcaaca

SEQ ID NO: 417381 - DNA, 929 bp, Homo sapiens
tgagcctctggggcgtaccggcttggcgcggcggcagcggcagcggcggctgggagagcggtcggcggggtttcttcgttgcattgcctgagaggagcggagtctgccaggtggtgtccatcatggccgacttaacattacctatcccatgctgttcaaactgaccaataagaattcggaccgcatgacgcattgtggcgtgctggagtttgtggctgatgagggcatctgctacctcccacactggatgatgcagaacttactcttggaagaaggcggcctggtccaggtggagagcgtcaaccttcaagtggccacctactccaaattccaacctcagagccctgacttcctggacatcaccaaccccaaagccgtattagaaaacgcacttaggaactttgcctgtctgaccaccggggatgtgattgccatcaactataatgaaaagatctacgaactgcgtgtgatggagaccaaacccgacaaggcagtgtccatcattgagtgtgacatgaacgtggactttgatgctcccctgggctacaaagaacccgaaagacaagtccagcatgaggagtcgacagaaggtgaagccgaccacagtggctatgctggagagctgggcttccgcgctttctctggatctggcaatagactggatggaaagaagaaaggggtagagcccagcccctccccaatcaagcctggagatattaaaagaggaattcccaattatgaatttaaacttggtaagataactttcatcagaaattcacgtccccttgtcaaaaaggttgaagaggatgaagctggaggcagattcgtcgctttctctggagaaggacagtcattgcgtaaaaagggaagaaagccctaagtgaggactgttggctgattggaaaataataaaagaatcatttgcaaca

SEQ ID NO: 417382 - DNA, 649 bp, Homo sapiens
gcagagagggcagaatgatgggaagctgagctatggggcagtcacaacagtagccttagcccacccatagagcttgaactgggtggccctgcagaggcagggatcaggtcttttaacccaacactgactgctggctgcccttggccaagtggctgtcttcagctcatggccaccccctgaggaactgggcagagttcttagctgccagcaccccagcagttgaggagtcagggcttcagtcctgaaggggtctgcacagcacccccagctcacatccctgcagtgatctccaagcaaaggacatatcgtcctcacacttgggcttattatatgactcacctacttcctgtctaggctttctctggatctggcaatagactggatggaaagaagaaaggggtagagcccagcccctccccaatcaagcctggagatattaaaagaggaattcccaattatgaatttaaacttggtaagataactttcatcagaaattcacgtccccttgtcaaaaaggttgaagaggatgaagctggaggcagattcgtcgctttctctggagaaggacagtcattgcgtaaaaagggaagaaagccctaagtgaggactgttggctgattggaaaataataaaagaatcatttgcaaca

SEQ ID NO: 417383 - DNA, 1690 bp, Homo sapiens
cagagatgtgggtcttgtaaaggagatcaggaggtcactgtgcaaggtactctccgcgatggacactcatcatggtagaaaaggcagaaacgactccttgggtattgcttaatcgaccattttcagcaagcaaattgatcaggttgtgagtgaggggagagtacctctcttttgctgtgatgtcatgtaggcttttcactgtaatggaacgcttcacataggaattcccaattatgaatttaaacttggtaagataactttcatcagaaattcacgtccccttgtcaaaaaggttgaagaggtgagtgtatttccttgtatttccttggttggtaatgaggagatttatttgctagtgatgactgaagttcttggcattctgagtaggggtgtgcattagtctgtttccaagctgctggtaaagatgtacccgagactgggcaatttacaaaagaaagaggtttaatggacttacagttcacatggctggggaggcctcacaatcatggcagggggcaagtcacatcttacatggatggtagcaggcagagaaaaagctggtgcagggaaacacctacttataaaaccatcagatctcatgagacttattcactatcatgataacagcacggaaaagacccgccctcatgactcagttacctcccaccgactcagttacctcccacctggtccctcccacaacacgtggtaattcaagatgagatttgggtggggacgcagccaaaccacatgagggtgtctgtcatgttttccctttcctagggtccctctgctccctggtgtcctgtttttttctgtagagctggtgtagggtgtatgaaacagaagacttgcagcatgggggtcaggagctctgtcttgctctagagccgactccaggctctgttatcacagaactgtgtgccctgggtgggcttcgtcttccaacagagaccttgaacttcaaatataggcagcaccttctagctgagcagggtggtggcgggacagaggaaggcaagggctgagcatcctgtagacatgggcactttgtgggaatatggccaggcctggcagcaactggaacgcagtcacctctttgtgatgaggatttctacaacaccagcgcttcagacccatcgctctcctggttccttttctcaaaggattggacccttgaggatccaggatcagggcagagggcagatgtactgagccacccattcaggaccagctgctacatgggagccatcccaattactgaactcttttctctagcacttggggtggttggggacagagaccactgtgaagtttgcacacctggtcctactcacaaccacttctgggctcaatgttcaagttgaaacagcattgggcattgggacctttcaggctcagaggagcaaacatagtggccagtcagacctcaccctccagctcctccttcaggcaccatccaggcttcaccagctacaggctgcctttctcactaaaagccagtgcctgactccgacctaagaccttagcatgggacgtcccccaggctgactgtgacctgactgttgcaaatttacagaaggcaggggaggccagtgggcacagcaggcctgtttgaccataaatatgtatttaagaagtatatgtttaaagatgggattgaagacatatttagctctattccatcctg

SEQ ID NO: 417384 - DNA, 644 bp, Homo sapiens
tgagcctctggggcgtaccggcttggcgcggcggcagcggcagcggcggctgggagagcggtcggcggggtttcttcgttgcattgcctgagaggagcggagtctgccaggtggtgtccatcatgttctctttcaacatgttcgaccaccctattcccagggtcttccaaaaccgcttctccacacagtaccgctgcttctctgtgtccatgctagcagggcctaatgacaggtcagatgtggagaaaggagggaagatcacttatgccacgcctcggccctggaaccgaacatcgagccgacttaacattacctatcccatgctgttcaaactgaccaataagaattcggaccgcatgacgcattgtggcgtgctggagtttgtggctgatgagggcatctgctacctcccacactggtgcagaacttactcttggaagaaggcggcctggtccaggtggagagcgtcgaatcgcattgcacacgtcggtcgctatccgttacattcgcagatagttgcacaaccactgcaagaggccccttgaaccattcccgtgggtaccaatgcaatccaatacacgccaaataggccctgctcatgtcaaggcaaaaaccaggcatcgtttagggaacaacctctttgg

SEQ ID NO: 417385 - DNA, 402 bp, Homo sapiens
cagcctcccaagtagctgggatcataggcacataccacactgagctatttttggtagagatgggatctcactatgttgcccaggctggtcttgaactcctgggctcaagtgatcctcccacctaggcctcctaaagtgctgggattacaggtgtcagctatcgtgtccagcctgagatatttcttatgagtaatgtggatggtacgtgagtccatagagtaaggcatttattgtaaacctccagggagtttctgaaaatagtatcttctcttcaaacctaggatgaagctggaggcagattcgtcgctttctctggagaaggacagtcattgcgtaaaaagggaagaaagccctaagtgaggactgttggctgattggaaaataataaaagaatcatttgca

SEQ ID NO: 417386 - DNA, 463 bp, Homo sapiens
gggtggtcatgtctcaatattttacttttaaaatcctggaaacacaggtggactttgatgctcccctgggctacaaagaacccgaaagacaagtccagcatgaggagtcgacagtaagtgttatcctcagtgtcctttgctgtcctgctgcatgctgcttttgagttcctggcagtggctcgtgggtggcctctgctagtgttggtgtagtcatatcctctgcgtcccttccagccatgcttccgggggacatcctagccgggggtgggggtgagagggaagctgggtgtccccgctgaggagctcacctgtttttctttttccctgtcaggaaggtgaagccgaccacagtggctatgctggagagctgggcttccgcgtgagtaccagaccacttgacttatattgctgtgccctctgctccttgaaattagagcactcactcaaggtgttctccatgatg

SEQ ID NO: 417387 - DNA, 1531 bp, Homo sapiens
tgagcctctggggcgtaccggcttggcgcggcggcagcggcagcggcggctgggagagcggtcggcggggtttcttcgttgcattgcctgagaggagcggagtctgccaggtggtgtccatcatgttctctttcaacatgttcgaccaccctattcccagggtcttccaaaaccgcttctccacacagtaccgctgcttctctgtgtccatgctagcagggcctaatgacaggtcagatgtggagaaaggagggaagataattatgccaccctcggccctggaccaactcagccgacttaacattacctatcccatgctgttcaaactgaccaataagaattcggaccgcatgacgcattgtggcgtgctggagtttgtggctgatgagggcatctgctacctcccacactggatgatgcagaacttactcttggaagaaggcggcctggtccaggtggagagcgtcaaccttcaagtggccacctactccaaattccaacctcagagccctgacttcctggacatcaccaaccccaaagccgtattagaaaacgcacttaggaactttgcctgtctgaccaccggggatgtgattgccatcaactataatgaaaagatctacgaactgcgtgtgatggagaccaaacccgacaaggcagtgtccatcattgagtgtgacatgaacgtggactttgatgctcccctgggctacaaagaacccgaaagacaagtccagcatgaggagtcgacagaaggtgaagccgaccacagtggctatgctggagagctgggcttccgcgctttctctggatctggcaatagactggatggaaagaagaaaggggtagagcccagcccctccccaatcaagcctggagatattaaaagaggaattcccaattatgaatttaaacttggtaagataactttcatcagaaattcacgtccccttgtcaaaaaggttgaagaggatgaagctggaggcagattcgtcgctttctctggagaaggacagtcattgcgtaaaaagggaagaaagccctaagtgaggactgttggctgattggaaaataataaaagaatcatttgcaacaaaaaaaaagaaaagaacaaaaaaaacaaaatttgtggggggttgggccttgaaaaggtttttttaaaccattttttggggggcggggcccattggtatgtggacatgggactaggggtccagaggaaaccgggccaggaacggcggggttcacccaataaaaggcgcgggggcacgggcgtctggacaaccccagtgggttcgcggcaactcggctctccaacgggccaagcaggctgatagtccacccgcgggggaggagacaacacaaggaccgacacagatcagcgagcacgacaaccgtagagagaccagaacaggcgagaccagccgaccagacaggacagagcgagagaacgaagaagcagaccaacgaacaacagaaacccaagcatggagcagcaaaagggcagccaggagacgacaaccacgacacg

SEQ ID NO: 417388 - DNA, 1968 bp, Homo sapiens
tgagcctctggggcgtaccggcttggcgcggcggcagcggcagcggcggctgggagagcggtcggcggggtttcttcgttgcattgcctgagaggagcggagtctgccaggtggtgtccatcatgttctctttcaacatgttcgaccaccctattcccagggtcttccaaaaccgcttctccacacagtaccgctgcttctctgtgtccatgctagcagggcctaatgacaggtcagatgtggagaaaggagggaagataattatgccaccctcggccctggaccaactcagccgacttaacattacctatcccatgctgttcaaactgaccaataagaattcggaccgcatgacgcattgtggcgtgctggagtttgtggctgatgagggcatctgctacctcccacactggatgatgcagaacttactcttggaagaaggcggcctggtccaggtggagagcgtcaaccttcaagtggccacctactccaaattccaacctcagagccctgacttcctggacatcaccaaccccaaagccgtattagaaaacgcacttaggaactttgcctgtctgaccaccggggatgtgattgccatcaactataatgaaaagatctacgaactgcgtgtgatggagaccaaacccgacaaggcagtgtccatcattgagtgtgacatgaacgtggactttgatgctcccctgggctacaaagaacccgaaagacaagtccagcatgaggagtcgacagaaggtgaagccgaccacagtggctatgctggagagctgggcttccgcgctttctctggatctggcaatagactggatggaaagaagaaaggggtagagcccagcccctccccaatcaagcctggagatattaaaagaggaattcccaattatgaatttaaacttggtaagataactttcatcagaaattcacgtccccttgtcaaaaaggttgaagaggatgaagctggaggcagattcgtcgctttctctggagaaggacagtcattgcgtaaaaagggaagaaagccctaagtgaggactgttggctgattggaaaataataaaagaatcatttgcaacatcttggcttttagttactggcactgacagggacgagcctcatcagagaatactctgttacttaagatttatttagagttacctaagaattattaagtttgacttggaagtggagcagcaggactttgtagttgtatgcttgatttggggaaagacaaagagctgtccctgagggcctgtagatagctgcctcctcacctcttcacgctttcagcttgaggggagctcccactgcctcagcaggagcaattctgcatccctaattctgtcaaaacctatgaaggtgactaaattgtctaacatgaagtgttctttctttttcttcatttatcctttcttttcctacatcaattgcataggtgtcagtctttggcctaaaaaaaggctttaaatagacatgtgttctataagtagtggctgtcccactactgtggctgcaatttaagtatttgacaaagaatgtttctatttttattttacatatttttttcaaaaacaccactcagaagaacctgatctgaatgagtttgcacttttattctcatttcatatggacataactggctccttagtgaacctgttcatagtgaaacaactccatggagaagcaaacatgtgaatgttagaatgaacaaatgctaaagagatgttcctctccttcttccctactccccaactcccaattttaatttattaaatcatccaagcttctgctggcctgtattttttatcagtatttatttggtcttagatcttcactttctataacgtgagatcttttgacatgctaatctgattattttaaatttgttcccatgagccactgtgcctggccccattggggtcgacgctaagccaagaatttcaagtaaaa

SEQ ID NO: 417389 - DNA, 1923 bp, Homo sapiens
  misc_feature (2)..(2): n is a, c, g, or t
  misc_feature (4)..(4): n is a, c, g, or t
  misc_feature (6)..(8): n is a, c, g, or t
gncncnnngccaagagctacgcggcggcggcggagcgcaggcctcgtgccgttacggccatcacggcggccgcagtggcgtcctggagccctcctcagtgctgaagctgctgaaagatggcagaagaagtggtggtagtagccaaatttgattatgtggcccaacaagaacaagagttggacatcaagaagaatgagagattatggcttctggatgattctaagtcctggtggcgagttcgaaattccatgaataaaacaggttttgtgccttctaactatgtggaaaggaaaaacagtgctcggaaagcatctattgtgaaaaacctaaaggataccttaggcattggaaaagtgaaaagaaaacctagtgtgccagattctgcatctcctgctgatgatagttttgttgacccaggggaacgtctctatgacctcaacatgcccgcttatgtgaaatttaactacatggctgagagagaggatgaattatcattgataaaggggacaaaggtgatcgtcatggagaaatgcagtgatgggtggtggcgtggtagctacaatggacaagttggatggttcccttcaaactatgtaactgaagaaggtgacagtcctttgggtgaccatgtgggttctctgtcagagaaattagcagcagtcgtcaataacctaaatactgggcaagtgttgcatgtggtacaggctctttacccattcagctcatctaatgatgaagaacttaatttcgagaaaggagatgtaatggatgttattgaaaaacctgaaaatgacccagagtggtggaaatgcaggaagatcaatggtatggttggtctagtaccaaaaaactatgttaccgttatgcagaataatccattaacttcaggtttggaaccatcacctccacagtgtgattacattaggccttcactcactggaaagtttgctggcaatccttggtattatggcaaagtcaccaggcatcaagcagaaatggcattaaatgaaagaggacatgaaggggatttcctcattcgtgatagtgaatcttcgccaaatgatttctcagtatcactaaaagcacaagggaaaaacaagcattttaaagtccaactaaaagagactgtctactgcattgggcagcgtaaattcagcaccatggaagaacttgtagaacattacaaaaaggcaccaatttttacaagtgaacaaggagaaaaattatatcttgtcaagcatttatcatgatactgctgaccagaagtgactgctgtgtagctgtaatttgtcatgtaattgaagactgagaaaatgttgggtccagtcgtgcttgattggaaattgttgtttctaaatctatatgagaattgacaataagtatttttattataactcagcccatacatatatactatgtatgcagtgcatctgcatagaacagttccttatccttggccttctgttttattgtttttttctttgctgttttccctttgcttctaatattacagttttgtattttgtaaacaaaaatcaaataatgcatatcagaatctttatatggaagaaatcctttattgcctttcctttgtttccttgtaaaggcaccctgttctgttatggtttttcattatataaaattattatatctatatatgacatatgctaaaatttcttggagagtgttaatcttttctgtgactaaatagcaataataagtggaaaattagaaattatttccaggtattatatttgtcacaggccattgtaaataccaagtatattgtgtctgccataatttttaaaaatacattcattgtcttcagtcatacagcaagacacatgagacatagattagaaaacatgttgtacaattttaatttacaactgttggaaataaaaatcacttaatttttttcca

SEQ ID NO: 417390 - DNA, 425 bp, Homo sapiens
cactataggcgaagggtaccgggccccccctcgtgccggcaataaaagataaattatattgcaatactagtaaacaataaaactataaaaccataaaagttgaaaaataatatggtttcatggtctcttttagatactgcttaggatattagaatttgatgacactcattttccttaaaaatggcctttctttttccttgatgaaagatatcactacttttccatttattaaatcatggttaatcttggctttgcgtgagtatatttgtacaaaagggaatgtgtaattgcacaaaattttgaaagaaaatgtgtggaagtggggtgtggtggggagagagattaattgaacttcctgatgtgaagttcaggaaaatggggcctgtgcctaatccctcagaaaagcagttggttggcagtaggga

SEQ ID NO: 417391 - DNA, 1908 bp, Homo sapiens
ggaattccggaattccgcggagcaggcctcgtgccgttacggccatcacggcggccgcagtggcgtcctggagccctcctcagtgctgaagctgctgaaagatggcagaagaagtggtggtagtagccaaatttgattatgtggcccaacaagaacaagagttggacatcaagaagaatgagagattatggcttctggatgattctaagtcctggtggcgagttcgaaattccatgaataaaacaggttttgtgccttctaactatgtggaaaggaaaaacagtgctcggaaagcatctattgtgaaaaacctaaaggataccttaggcattggaaaagtgaaaagaaaacctagtgtgccagattctgcatctcctgctgatgatagttttgttgacccaggggaacgtctctatgacctcaacatgcccgcttatgtgaaatttaactacatggctgagagagaggatgaattatcattgataaaggggacaaaggtgatcgtcatggagaaatgcagtgatgggtggtggcgtggtagctacaatggacaagttggatggttcccttcaaactatgtaactgaagaaggtgacagtcctttgggtgaccatgtgggttctctgtcagagaaattagcagcagtcgtcaataacctaaatactgggcaagtgttgcatgtggtacaggctctttacccattcagctcatctaatgatgaagaacttaatttcgagaaaggagatgtaatggatgttattgaaaaacctgaaaatgacccagagtggtggaaatgcaggaagatcaatggtatggttggtctagtaccaaaaaactatgttaccgttatgcagaataatccattaacttcaggtttggaaccatcacctccacagtgtgattacattaggccttcactcactggaaagtttgctggcaatccttggtattatggcaaagtcaccaggcatcaagcagaaatggcattaaatgaaagaggacatgaaggggatttcctcattcgtgatagtgaatcttcgccaaatgatttctcagtatcactaaaagcacaagggaaaaacaagcattttaaagtccaactaaaagagactgtctactgcattgggcagcgtaaattcagcaccatggaagaacttgtagaacattacaaaaaggcaccaatttttacaagtgaacaaggagaaaaattatatcttgtcaagcatttatcatgatactgctgaccagaagtgactgctgtgtagctgtaatttgtcatgtaattgaagactgagaaaatgttgggtccagtcgtgcttgattggaaattgttgtttctaaatctatatgagaattgacaataagtatttttattataactcagcccatacatatatactatgtatgcagtgcatctgcatagaacagttccttatccttggccttctgttttattgtttttttctttgctgttttccctttgcttctaatattacagttttgtattttgtaaacaaaaatcaaataatgcatatcagaatctttatatggaagaaatcctttattgcctttcctttgtttccttgtaaaggcaccctgttctgttatggtttttcattatataaaattattatatctatatatgacatatgctaaaatttcttggagagtgttaatcttttctgtgactaaatagcaataataagtggaaaattagaaattatttccaggtattatatttgtcacaggccattgtaaataccaagtatattgtgtctgccataatttttaaaaatacattcattgtcttcagtcatacagcaagacacatgagacatagattagaaaacatgttgtacaattttaatttacaactgttggaaataaaaatcacttaatttttttcca

SEQ ID NO: 417392 - DNA, 1957 bp, Homo sapiens
  misc_feature (2)..(2): n is a, c, g, or t
  misc_feature (4)..(4): n is a, c, g, or t
  misc_feature (6)..(8): n is a, c, g, or t
gncncnnngccaagagctacgcggcggcggcggagcgcaggcctcgtgccgttacggccatcacggcggccgcagtggcgtcctggagccctcctcaggtgagctggagctgcccggctcggcagcgggaagtgctgaagctgctgaaagatggcagaagaagtggtggtagtagccaaatttgattatgtggcccaacaagaacaagagttggacatcaagaagaatgagagattatggcttctggatgattctaagtcctggtggcgagttcgaaattccatgaataaaacaggttttgtgccttctaactatgtggaaaggaaaaacagtgctcggaaagcatctattgtgaaaaacctaaaggataccttaggcattggaaaagtgaaaagaaaacctagtgtgccagattctgcatctcctgctgatgatagttttgttgacccaggggaacgtctctatgacctcaacatgcccgcttatgtgaaatttaactacatggctgagagagaggatgaattatcattgataaaggggacaaaggtgatcgtcatggagaaatgcagtgatgggtggtggcgtggtagctacaatggacaagttggatggttcccttcaaactatgtaactgaagaaggtgacagtcctttgggtgaccatgtgggttctctgtcagagaaattagcagcagtcgtcaataacctaaatactgggcaagtgttgcatgtggtacaggctctttacccattcagctcatctaatgatgaagaacttaatttcgagaaaggagatgtaatggatgttattgaaaaacctgaaaatgacccagagtggtggaaatgcaggaagatcaatggtatggttggtctagtaccaaaaaactatgttaccgttatgcagaataatccattaacttcaggtttggaaccatcacctccacagtgtgattacattaggccttcactcactggaaagtttgctggcaatccttggtattatggcaaagtcaccaggcatcaagcagaaatggcattaaatgaaagaggacatgaaggggatttcctcattcgtgatagtgaatcttcgccaaatgatttctcagtatcactaaaagcacaagggaaaaacaagcattttaaagtccaactaaaagagactgtctactgcattgggcagcgtaaattcagcaccatggaagaacttgtagaacattacaaaaaggcaccaatttttacaagtgaacaaggagaaaaattatatcttgtcaagcatttatcatgatactgctgaccagaagtgactgctgtgtagctgtaatttgtcatgtaattgaagactgagaaaatgttgggtccagtcgtgcttgattggaaattgttgtttctaaatctatatgagaattgacaataagtatttttattataactcagcccatacatatatactatgtatgcagtgcatctgcatagaacagttccttatccttggccttctgttttattgtttttttctttgctgttttccctttgcttctaatattacagttttgtattttgtaaacaaaaatcaaataatgcatatcagaatctttatatggaagaaatcctttattgcctttcctttgtttccttgtaaaggcaccctgttctgttatggtttttcattatataaaattattatatctatatatgacatatgctaaaatttcttggagagtgttaatcttttctgtgactaaatagcaataataagtggaaaattagaaattatttccaggtattatatttgtcacaggccattgtaaataccaagtatattgtgtctgccataatttttaaaaatacattcattgtcttcagtcatacagcaagacacatgagacatagattagaaaacatgttgtacaattttaatttacaactgttggaaataaaaatcacttaatttttttcca

SEQ ID NO: 417393 - DNA, 1524 bp, Homo sapiens
  misc_feature (2)..(2): n is a, c, g, or t
  misc_feature (4)..(4): n is a, c, g, or t
  misc_feature (6)..(8): n is a, c, g, or t
gncncnnngccaagagctacgcggcggcggcggagcgcaggcctcgtgccgttacggccatcacggcggccgcagtggcgtcctggagccctcctcagtgctgaagctgctgaaagatggcagaagaagtggtggtagtagccaaatttgattatgtggcccaacaagaacaagagttggacatcaagaagaatgagagattatggcttctggatgattctaagtcctggtggcgagttcgaaattccatgaataaaacaggttttgtgccttctaactatgtggaaaggaaaaacagtgctcggaaagcatctattgtgaaaaacctaaaggataccttaggcattggaaaagtgaaaagaaaacctagtgtgccagattctgcatctcctgctgatgatagttttgttgacccaggggaacgtctctatgacctcaacatgcccgcttatgtgaaatttaactacatggctgagagagaggatgaattatcattgataaaggggacaaagtgtgattacattaggccttcactcactggaaagtttgctggcaatccttggtattatggcaaagtcaccaggcatcaagcagaaatggcattaaatgaaagaggacatgaaggggatttcctcattcgtgatagtgaatcttcgccaaatgatttctcagtatcactaaaagcacaagggaaaaacaagcattttaaagtccaactaaaagagactgtctactgcattgggcagcgtaaattcagcaccatggaagaacttgtagaacattacaaaaaggcaccaatttttacaagtgaacaaggagaaaaattatatcttgtcaagcatttatcatgatactgctgaccagaagtgactgctgtgtagctgtaatttgtcatgtaattgaagactgagaaaatgttgggtccagtcgtgcttgattggaaattgttgtttctaaatctatatgagaattgacaataagtatttttattataactcagcccatacatatatactatgtatgcagtgcatctgcatagaacagttccttatccttggccttctgttttattgtttttttctttgctgttttccctttgcttctaatattacagttttgtattttgtaaacaaaaatcaaataatgcatatcagaatctttatatggaagaaatcctttattgcctttcctttgtttccttgtaaaggcaccctgttctgttatggtttttcattatataaaattattatatctatatatgacatatgctaaaatttcttggagagtgttaatcttttctgtgactaaatagcaataataagtggaaaattagaaattatttccaggtattatatttgtcacaggccattgtaaataccaagtatattgtgtctgccataatttttaaaaatacattcattgtcttcagtcatacagcaagacacatgagacatagattagaaaacatgttgtacaattttaatttacaactgttggaaataaaaatcacttaatttttttcca

SEQ ID NO: 417394 - DNA, 1500 bp, Homo sapiens
ttcagactggttttgaattcctggcctcaaacgatcctcccaccttggcttctcaacgtgctgggattatagggtgctgaagctgctgaaagatggcagaagaagtggtggtagtagccaaatttgattatgtggcccaacaagaacaagagttggacatcaagaagaatgagagattatggcttctggatgattctaagtcctggtggcgagttcgaaattccatgaataaaacaggttttgtgccttctaactatgtggaaaggaaaaacagtgctcggaaagcatctattgtgaaaaacctaaaggataccttaggcattggaaaagtgaaaagaaaacctagtgtgccagattctgcatctcctgctgatgatagttttgttgacccaggggaacgtctctatgacctcaacatgcccgcttatgtgaaatttaactacatggctgagagagaggatgaattatcattgataaaggggacaaagtgtgattacattaggccttcactcactggaaagtttgctggcaatccttggtattatggcaaagtcaccaggcatcaagcagaaatggcattaaatgaaagaggacatgaaggggatttcctcattcgtgatagtgaatcttcgccaaatgatttctcagtatcactaaaagcacaagggaaaaacaagcattttaaagtccaactaaaagagactgtctactgcattgggcagcgtaaattcagcaccatggaagaacttgtagaacattacaaaaaggcaccaatttttacaagtgaacaaggagaaaaattatatcttgtcaagcatttatcatgatactgctgaccagaagtgactgctgtgtagctgtaatttgtcatgtaattgaagactgagaaaatgttgggtccagtcgtgcttgattggaaattgttgtttctaaatctatatgagaattgacaataagtatttttattataactcagcccatacatatatactatgtatgcagtgcatctgcatagaacagttccttatccttggccttctgttttattgtttttttctttgctgttttccctttgcttctaatattacagttttgtattttgtaaacaaaaatcaaataatgcatatcagaatctttatatggaagaaatcctttattgcctttcctttgtttccttgtaaaggcaccctgttctgttatggtttttcattatataaaattattatatctatatatgacatatgctaaaatttcttggagagtgttaatcttttctgtgactaaatagcaataataagtggaaaattagaaattatttccaggtattatatttgtcacaggccattgtaaataccaagtatattgtgtctgccataatttttaaaaatacattcattgtcttcagtcatacagcaagacacatgagacatagattagaaaacatgttgtacaattttaatttacaactgttggaaataaaaatcacttaatttttttcca

SEQ ID NO: 417395 - DNA, 1345 bp, Homo sapiens
  misc_feature (2)..(2): n is a, c, g, or t
  misc_feature (4)..(4): n is a, c, g, or t
  misc_feature (6)..(8): n is a, c, g, or t
gncncnnngccaagagctacgcggcggcggcggagcgcaggcctcgtgccgttacggccatcacggcggccgcagtggcgtcctggagccctcctcagtgctgaagctgctgaaagatggcagaagaagtggtggtagtagccaaatttgattatgtggcccaacaagaacaagagttggacatcaagaagaatgagagattatggcttctggatgattctaagtcctggtggcgagttcgaaattccatgaataaaacaggttttgtgccttctaactatgtggaaaggaaaaacagtgctcggaaagcatctattgtgaaaaacctaaaggataccttaggcattggaaaagtgaaaagaaaacctagtgtgccagattctgcatctcctgctgatgatagttttgttgacccaggggaacgtctctatgacctcaacatgcccgcttatgtgaaatttaactacatggctgagagagaggatgaattatcattgataaaggggacaaaggtgatcgtcatggagaaatgcagtgatgggtggtggcgtggtagctacaatggacaagttggatggttcccttcaaactatgtaactgaagaaggtgacagtcctttgggtgaccatgtgggttctctgtcagagaaattagcagcagtcgtcaataacctaaatactgggcaagtgttgcatgtggtacaggctctttacccattcagctcatctaatgatgaagaacttaatttcgagaaaggagatgtaatggatgttattgaaaaacctgaaaatgacccagagtggtggaaatgcaggaagatcaatggtatggttggtctagtaccaaaaaactatgttaccgttatgcagaataatccattaacttcaggtttggaaccatcacctccacagtgtgattacattaggccttcactcactggaaagtttgctggcaatccttggtattatggcaaagtcaccaggcatcaagcagaaatggcattaaatgaaagaggacatgaaggggatttcctcattcgtgatagtgaatcttcggtaagttgattttcggaggtaaatacaaatagagctctgggtattttaaaaaaaagagagagagaaatggagaggttaagtggcttccctaaagttaaccaggtaacaagctgggacgtaacataagcataaatgttccaaagctaaagtccgcattctttctagctatctattttgaataaaagagagctgtggcagtgttgctacacactgaattatttcgtcttgtctagttctgttgattttgcattcctgatatattttctgtttctgttgcattaaactaaatg

SEQ ID NO: 417396 - DNA, 2198 bp, Homo sapiens
  misc_feature (2)..(2): n is a, c, g, or t
  misc_feature (4)..(4): n is a, c, g, or t
  misc_feature (6)..(8): n is a, c, g, or t
gncncnnngccaagagctacgcggcggcggcggagcgcaggcctcgtgccgttacggccatcacggcggccgcagtggcgtcctggagccctcctcagtgctgaagctgctgaaagatggcagaagaagtggtggtagtagccaaatttgattatgtggcccaacaagaacaagagttggacatcaagaagaatgagagattatggcttctggatgattctaagtcctggtggcgagttcgaaattccatgaataaaacaggttttgtgccttctaactatgtggaaaggaaaaacagtgctcggaaagcatctattgtgaaaaacctaaaggataccttaggcattggaaaagtgaaaagaaaacctagtgtgccagattctgcatctcctgctgatgatagttttgttgacccaggggaacgtctctatgacctcaacatgcccgcttatgtgaaatttaactacatggctgagagagaggatgaattatcattgataaaggggacaaaggtgatcgtcatggagaaatgcagtgatgggtggtggcgtggtagctacaatggacaagttggatggttcccttcaaactatgtaactgaagaaggtgacagtcctttgggtgaccatgtgggttctctgtcagagaaattagcagcagtcgtcaataacctaaatactgggcaagtgttgcatgtggtacaggctctttacccattcagctcatctaatgatgaagaacttaatttcgagaaaggagatgtaatggatgttattgaaaaacctgaaaatgacccagagtggtggaaatgcaggaagatcaatggtatggttggtctagtaccaaaaaactatgttaccgttatgcagaataatccattaacttcaggtttggaaccatcacctccacagtgtgattacattaggccttcactcactggaaagtttgctggcaatccttggtattatggcaaagtcaccaggcatcaagcagaaatggcattaaatgaaagaggacatgaaggggatttcctcattcgtgatagtgaatcttcggccactccctgctgatgcaacatctgggtttgggcagaaaggagggtgcttcggagcccgccctttctgagcttcctgggccggctctagaacaattcaggcttcgctgcgactcagacctcagctccaacatatgcattctgaagaaagatggctgagatggacagaatgctttattttggaaagaaacaatgttctaggtcaaactgagtctaccaaatgcagactttcacaatggttctagaagaaatctggacaagtcttttcatgtggtttttctacgcattgattccatgtttgctcacagatgaagtggccattctgcctgcccctcagaacctctctgtactctcaaccaacatgaagcatctcttgatgtggagcccagtgatcgcgcctggagaaacagtgtactattctgtcgaataccagggggagtacgagagcctgtacacgagccacatctggatccccagcagctggtgctcactcactgaaggtcctgagtgtgatgtcactgatgacatcacggccactgtgccatacaaccttcgtgtcagggccacattgggctcacagacctcagcctggagcatcctgaagcatccctttaatagaaactcaaccatccttacccgacctgggatggagatcaccaaagatggcttccacctggttattgagctggaggacctggggccccagtttgagttccttgtggcctactggaggagggagcctggtgccgaggaacatgtcaaaatggtgaggagtgggggtattccagtgcacctagaaaccatggagccaggggctgcatactgtgtgaaggcccagacattcgtgaaggccattgggaggtacagcgccttcagccagacagaatgtgtggaggtgcaaggagaggccattcccctggtactggccctgtttgcctttgttggcttcatgctgatccttgtggtcgtgccactgttcgtctggaaaatgggccggctgctccagtactcctgttgccccgtggtggtcctcccagacaccttgaaaataaccaattcaccccagaagttaatcagctgcagaagggaggaggtggatgcctgtgccacggctgtgatgtcgttcagaggtaggaaaccgagc

SEQ ID NO: 417397 - DNA, 1346 bp, Homo sapiens
attctcatttgtgtattcttcatttttgggaattcagcatgttatctctaagacagctactgttagctacacattgaaaaggggttgggtgggtatcttagactttctcatgtgtttctctgactggagagaagatagctcttgttcttcaaatatttaactaaaggatttgctgtgggtgtctgctgttggagccgtgggtgttaagagacttttgattatgcaggtttgaatcctggctctgttgttaactagatggatgatattggccaagttattaatagcttctttgagactcagttttcacatgtgtaaaaagggtttgttttgaagagtaaaggagataatctatgtaaataatttaccatggtgcctaggacttagtaagtgcttagattttagcttttagtttaatataaaaatactgatagagggctttcaaaatgtttactatatgtatcttttttttctcttttagccaaatgatttctcagtatcactaaaagcacaagggaaaaacaagcattttaaagtccaactaaaagagactgtctactgcattgggcagcgtaaattcagcaccatggaagaacttgtagaacattacaaaaaggcaccaatttttacaagtgaacaaggagaaaaattatatcttgtcaagcatttatcatgatactgctgaccagaagtgactgctgtgtagctgtaatttgtcatgtaattgaagactgagaaaatgttgggtccagtcgtgcttgattggaaattgttgtttctaaatctatatgagaattgacaataagtatttttattataactcagcccatacatatatactatgtatgcagtgcatctgcatagaacagttccttatccttggccttctgttttattgtttttttctttgctgttttccctttgcttctaatattacagttttgtattttgtaaacaaaaatcaaataatgcatatcagaatctttatatggaagaaatcctttattgcctttcctttgtttccttgtaaaggcaccctgttctgttatggtttttcattatataaaattattatatctatatatgacatatgctaaaatttcttggagagtgttaatcttttctgtgactaaatagcaataataagtggaaaattagaaattatttccaggtattatatttgtcacaggccattgtaaataccaagtatattgtgtctgccataatttttaaaaatacattcattgtcttcagtcatacagcaagacacatgagacatagattagaaaacatgttgtacaattttaatttacaactgttggaaataaaaatcacttaatttttttcca

SEQ ID NO: 417398 - DNA, 1880 bp, Homo sapiens
  misc_feature (2)..(2): n is a, c, g, or t
  misc_feature (4)..(4): n is a, c, g, or t
  misc_feature (6)..(8): n is a, c, g, or t
gncncnnngccaagagctacgcggcggcggcggagcgcaggcctcgtgccgttacggccatcacggcggccgcagtggcgtcctggagccctcctcagtgctgaagctgctgaaagatggcagaagaagtggtggtagtagccaaatttgattatgtggcccaacaagaacaagagttggacatcaagaagaatgagagattatggcttctggatgattctaagtcctggtggcgagttcgaaattccatgaataaaacaggttttgtgccttctaactatgtggaaaggaaaaacagtgctcggaaagcatctattgtgaaaaacctaaaggataccttaggcattggaaaagtgaaaagaaaacctagtgtgccagattctgcatctcctgctgatgatagttttgttgacccaggggaacgtctctatgacctcaacatgcccgcttatgtgaaatttaactacatggctgagagagaggatgaattatcattgataaaggggacaaaggtgatcgtcatggagaaatgcagtgatgggtggtggcgtggtagctacaatggacaagttggatggttcccttcaaactatgtaactgaagaaggtgacagtcctttgggtgaccatgtgggttctctgtcagagaaattagcagcagtcgtcaataacctaaatactgggcaagtgttgcatgtggtacaggctctttacccattcagctcatctaatgatgaagaacttaatttcgagaaaggagatgtaatggatgttattgaaaaacctgaaaatgacccagagtggtggaaatgcaggaagatcaatggtatggttggtctagtaccaaaaaactatgttaccgttatgcagaataatccattaacttcaggtttggaaccatcacctccacagtgtgattacattaggccttcactcactggaaagtttgctggcaatccttggtattatggcaaagtcaccaggcatcaagcagaaatggcattaaatgaaagaggacatgaaggggatttcctcattcgtgatagtgaatcttcggccactccctgctgatgcaacatctgggtttgggcagaaaggagggtgcttcggagcccgccctttctgagcttcctgggccggctctagaacaattcaggcttcgctgcgactcagacctcagctccaacatatgcattctgaagaaagatggctgagatggacagaatgctttattttggaaagaaacaatgttctaggtcaaactgagtctaccaaatgcagactttcacaatggttctagaagaaatctggacaagtcttttcatgtggtttttctacgcattgattccatgtttgctcacagccatccttacccgacctgggatggagatcaccaaagatggcttccacctggttattgagctggaggacctggggccccagtttgagttccttgtggcctactggaggagggagcctggtgccgaggaacatgtcaaaatggtgaggagtgggggtattccagtgcacctagaaaccatggagccaggggctgcatactgtgtgaaggcccagacattcgtgaaggccattgggaggtacagcgccttcagccagacagaatgtgtggaggtgcaaggagaggccattcccctggtactggccctgtttgcctttgttggcttcatgctgatccttgtggtcgtgccactgttcgtctggaaaatgggccggctgctccagtactcctgttgccccgtggtggtcctcccagacaccttgaaaataaccaattcaccccagaagttaatcagctgcagaagggaggaggtggatgcctgtgccacggctgtgatgtcgttcagaggtaggaaaccgagc

SEQ ID NO: 417399 - DNA, 2106 bp, Homo sapiens
  misc_feature (2)..(2): n is a, c, g, or t
  misc_feature (4)..(4): n is a, c, g, or t
  misc_feature (6)..(8): n is a, c, g, or t
gncncnnngccaagagctacgcggcggcggcggagcgcaggcctcgtgccgttacggccatcacggcggccgcagtggcgtcctggagccctcctcagtgctgaagctgctgaaagatggcagaagaagtggtggtagtagccaaatttgattatgtggcccaacaagaacaagagttggacatcaagaagaatgagagattatggcttctggatgattctaagtcctggtggcgagttcgaaattccatgaataaaacaggttttgtgccttctaactatgtggaaaggaaaaacagtgctcggaaagcatctattgtgaaaaacctaaaggataccttaggcattggaaaagtgaaaagaaaacctagtgtgccagattctgcatctcctgctgatgatagttttgttgacccaggggaacgtctctatgacctcaacatgcccgcttatgtgaaatttaactacatggctgagagagaggatgaattatcattgataaaggggacaaaggtgatcgtcatggagaaatgcagtgatgggtggtggcgtggtagctacaatggacaagttggatggttcccttcaaactatgtaactgaagaaggtgacagtcctttgggtgaccatgtgggttctctgtcagagaaattagcagcagtcgtcaataacctaaatactgggcaagtgttgcatgtggtacaggctctttacccattcagctcatctaatgatgaagaacttaatttcgagaaaggagatgtaatggatgttattgaaaaacctgaaaatgacccagagtggtggaaatgcaggaagatcaatggtatggttggtctagtaccaaaaaactatgttaccgttatgcagaataatccattaacttcaggtttggaaccatcacctccacagtgtgattacattaggccttcactcactggaaagtttgctggcaatccttggtattatggcaaagtcaccaggcatcaagcagaaatggcattaaatgaaagaggacatgaaggggatttcctcattcgtgatagtgaatcttcggccactccctgctgatgcaacatctgggtttgggcagaaaggagggtgcttcggagcccgccctttctgagcttcctgggccggctctagaacaattcaggcttcgctgcgactcagacctcagctccaacatatgcattctgaagaaagatggctgagatggacagaatgctttattttggaaagaaacaatgttctaggtcaaactgagtctaccaaatgcagactttcacaatggttctagaagaaatctggacaagtcttttcatgtggtttttctacgcattgattccatgtttgctcacaggctggagtgcagtggtgcaatctcagcttactgcaacctccgccagtgaggcccttcattagacactaatttgaagctatggcattcccccactatgagcccacctgtcagccaggctatctgccttgatcctagatgaagtggccattctgcctgcccctcagaacctctctgtactctcaaccaacatgaagcatctcttgatgtggagcccagtgatcgcgcctggagaaacagtgtactattctgtcgaataccagggggagtacgagagcctgtacacgagccacatctggatccccagcagctggtgctcactcactgaaggtcctgagtgtgatgtcactgatgacatcacggccactgtgccatacaaccttcgtgtcagggccacattgggctcacagacctcagcctggagcatcctgaagcatccctttaatagaaactcaaccatccttacccgacctgggatggagatcaccaaagatggcttccacctggttattgagctggaggacctggggccccagtttgagttccttgtggcctactggaggagggagcctggtgccgaggagaggccattcccctggtactggccctgtttgcctttgttggcttcatgctgatccttgtggtcgtgccactgttcgtctggaaaatgggccggctgctccagtactcctgttgccccgtggtggtcctcccagacaccttgcttggtaatagagtagttcttta

SEQ ID NO: 417400 - DNA, 2213 bp, Homo sapiens
  misc_feature (2)..(2): n is a, c, g, or t
  misc_feature (4)..(4): n is a, c, g, or t
  misc_feature (6)..(8): n is a, c, g, or t
gncncnnngccaagagctacgcggcggcggcggagcgcaggcctcgtgccgttacggccatcacggcggccgcagtggcgtcctggagccctcctcagtgctgaagctgctgaaagatggcagaagaagtggtggtagtagccaaatttgattatgtggcccaacaagaacaagagttggacatcaagaagaatgagagattatggcttctggatgattctaagtcctggtggcgagttcgaaattccatgaataaaacaggttttgtgccttctaactatgtggaaaggaaaaacagtgctcggaaagcatctattgtgaaaaacctaaaggataccttaggcattggaaaagtgaaaagaaaacctagtgtgccagattctgcatctcctgctgatgatagttttgttgacccaggggaacgtctctatgacctcaacatgcccgcttatgtgaaatttaactacatggctgagagagaggatgaattatcattgataaaggggacaaaggtgatcgtcatggagaaatgcagtgatgggtggtggcgtggtagctacaatggacaagttggatggttcccttcaaactatgtaactgaagaaggtgacagtcctttgggtgaccatgtgggttctctgtcagagaaattagcagcagtcgtcaataacctaaatactgggcaagtgttgcatgtggtacaggctctttacccattcagctcatctaatgatgaagaacttaatttcgagaaaggagatgtaatggatgttattgaaaaacctgaaaatgacccagagtggtggaaatgcaggaagatcaatggtatggttggtctagtaccaaaaaactatgttaccgttatgcagaataatccattaacttcaggtttggaaccatcacctccacagtgtgattacattaggccttcactcactggaaagtttgctggcaatccttggtattatggcaaagtcaccaggcatcaagcagaaatggcattaaatgaaagaggacatgaaggggatttcctcattcgtgatagtgaatcttcggccactccctgctgatgcaacatctgggtttgggcagaaaggagggtgcttcggagcccgccctttctgagcttcctgggccggctctagaacaattcaggcttcgctgcgactcagacctcagctccaacatatgcattctgaagaaagatggctgagatggacagaatgctttattttggaaagaaacaatgttctaggtcaaactgagtctaccaaatgcagactttcacaatggttctagaagaaatctggacaagtcttttcatgtggtttttctacgcattgattccatgtttgctcacagatgaagtggccattctgcctgcccctcagaacctctctgtactctcaaccaacatgaagcatctcttgatgtggagcccagtgatcgcgcctggagaaacagtgtactattctgtcgaataccagggggagtacgagagcctgtacacgagccacatctggatccccagcagctggtgctcactcactgaaggtcctgagtgtgatgtcactgatgacatcacggccactgtgccatacaaccttcgtgtcagggccacattgggctcacagacctcagcctggagcatcctgaagcatccctttaatagaaactcaagaactgcctttcttctgagtgtccacttgtgtccggaattggtgggttcttgatctcactgacttcaagaatgaagccgcagaccctcgcgccatccttacccgacctgggatggagatcaccaaagatggcttccacctggttattgagctggaggacctggggccccagtttgagttccttgtggcctactggaggagggagcctggtgccgaggaacatgtcaaaatggtgaggagtgggggtattccagtgcacctagaaaccatggagccaggggctgcatactgtgtgaaggcccagacattcgtgaaggccattgggaggtacagcgccttcagccagacagaatgtgtggaggtgcaaggagaggccattcccctggtactggccctgtttgcctttgttggcttcatgctgatccttgtggtcgtgccactgttcgtctggaaaatgggccggctgctccagtactcctgttgccccgtggtggtcctcccagacaccttgcttggtaatagagtagttcttta

SEQ ID NO: 417401 - DNA, 1347 bp, Homo sapiens
  misc_feature (2)..(2): n is a, c, g, or t
  misc_feature (4)..(4): n is a, c, g, or t
  misc_feature (6)..(8): n is a, c, g, or t
gncncnnngccaagagctacgcggcggcggcggagcgcaggcctcgtgccgttacggccatcacggcggccgcagtggcgtcctggagccctcctcagtgctgaagctgctgaaagatggcagaagaagtggtggtagtagccaaatttgattatgtggcccaacaagaacaagagttggacatcaagaagaatgagagattatggcttctggatgattctaagtcctggtggcgagttcgaaattccatgaataaaacaggttttgtgccttctaactatgtggaaaggaaaaacagtgctcggaaagcatctattgtgaaaaacctaaaggataccttaggcattggaaaagtgaaaagaaaacctagtgtgccagattctgcatctcctgctgatgatagttttgttgacccaggggaacgtctctatgacctcaacatgcccgcttatgtgaaatttaactacatggctgagagagaggatgaattatcattgataaaggggacaaaggtgatcgtcatggagaaatgcagtgatgggtggtggcgtggtagctacaatggacaagttggatggttcccttcaaactatgtaactgaagaaggtgacagtcctttgggtgaccatgtgggttctctgtcagagaaattagcagcagtcgtcaataacctaaatactgggcaagtgttgcatgtggtacaggctctttacccattcagctcatctaatgatgaagaacttaatttcgagaaaggagatgtaatggatgttattgaaaaacctgaaaatgacccagagtggtggaaatgcaggaagatcaatggtatggttggtctagtaccaaaaaactatgttaccgttatgcagaataatccattaacttcaggtttggaaccatcacctccacagtgtgattacattaggccttcactcactggaaagtttgctggcaatccttggtattatggcaaagtcaccaggcatcaagcagaaatggcattaaatgaaagaggacatgaaggggatttcctcattcgtgatagtgaatcttcgatactgcttaggatattagaatttgatgacactcattttccttaaaaatggcctttctttttccttgatgaaagatatcactacttttccatttattaaatcatggttaatcttggctttgcgtgagtatatttgtacaaaagggaatgtgtaattgcacaaaattttgaaagaaaatgtgtggaagtggggtgtggtggggagagagattaattgaacttcctgatgtgaagttcaggaaaatggggcctgtgcctaatccctcagaaaagcagttggttggcagtaggga

SEQ ID NO: 417402 - DNA, 989 bp, Homo sapiens
  misc_feature (2)..(2): n is a, c, g, or t
  misc_feature (4)..(4): n is a, c, g, or t
  misc_feature (6)..(8): n is a, c, g, or t
gncncnnngccaagagctacgcggcggcggcggagcgcaggcctcgtgccgttacggccatcacggcggccgcagtggcgtcctggagccctcctcagtgctgaagctgctgaaagatggcagaagaagtggtggtagtagccaaatttgattatgtggcccaacaagaacaagagttggacatcaagaagaatgagagattatggcttctggatgattctaagtcctggtggcgagttcgaaattccatgaataaaacaggttttgtgccttctaactatgtggaaaggaaaaacagtgctcggaaagcatctattgtgaaaaacctaaaggataccttaggtaagatattttttaaaagaaaagcaactttgttttaaatgaaacctgcaacttagttctttgtacataattctggcagcagtgtgcataattgacttgaaaaggcaagggctaggtaagtttgagtcatagcaggtggtcaacccagaagaccagtgaaggtcataagtgttaacatgcagtttctgtaaatctaggcccatgctccaagtcaaggcagagtgataccaatgagtagaactaactctcaccttctagcaggggctttttgaaccatgaatcactgttggagtttagacttataggcagaattgcctctttggcaccaaggcaacttatgtacatggcacataatgaattttaacatctaatgaccttatgttttgaacttcacttaaaaccctccattttgtttttctatttgataagagaactgtggatcattactgtacattagcacctacagagctcttttctattttgtttctctttttccctttatttctccaaagtttttgttttttatttttactggccctccattagggcctgagacagtggagcccacttcacactggacttggcgtctgtccccgtggcgacgtaggcgtctgtccgacagacgccacgtggcgtcaatccgggac

SEQ ID NO: 417403 - DNA, 961 bp, Homo sapiens
aggggaggacattttcctgaagatgtatttgtggtgttggttgaatatggcactttggctttgattctagtgctgaagctgctgaaagatggcagaagaagtggtggtagtagccaaatttgattatgtggcccaacaagaacaagagttggacatcaagaagaatgagagattatggcttctggatgattctaagtcctggtggcgagttcgaaattccatgaataaaacaggttttgtgccttctaactatgtggaaaggaaaaacagtgctcggaaagcatctattgtgaaaaacctaaaggataccttaggtaagatattttttaaaagaaaagcaactttgttttaaatgaaacctgcaacttagttctttgtacataattctggcagcagtgtgcataattgacttgaaaaggcaagggctaggtaagtttgagtcatagcaggtggtcaacccagaagaccagtgaaggtcataagtgttaacatgcagtttctgtaaatctaggcccatgctccaagtcaaggcagagtgataccaatgagtagaactaactctcaccttctagcaggggctttttgaaccatgaatcactgttggagtttagacttataggcagaattgcctctttggcaccaaggcaacttatgtacatggcacataatgaattttaacatctaatgaccttatgttttgaacttcacttaaaaccctccattttgtttttctatttgataagagaactgtggatcattactgtacattagcacctacagagctcttttctattttgtttctctttttccctttatttctccaaagtttttgttttttatttttactggccctccattagggcctgagacagtggagcccacttcacactggacttggcgtctgtccccgtggcgacgtaggcgtctgtccgacagacgccacgtggcgtcaatccgggac

SEQ ID NO: 417404 - DNA, 442 bp, Homo sapiens
ctctgatgagggacgcgatggggaaaggctttgttctctgaaaactccctgtaggaactgcctttcttctgagtgtccacttgtgtccggaattggtgggttcttgatctcactgacttcaagaatgaagccgcagaccctcgcggtgagtgttacagctcttaaggtggcgcgtctggagtctgtcccttctgatgttcggatgtgttcagagtttcttccttctggtgggttcctagtctcgctggctcaggagtgaagctgcagatcttcacggtgagtgttacagctcttaaggcggcgcgtctggagttgttcgttcctcctggtgggctcgtggtctcgctggcttcaggagtgaagctgcagaccttcgcggtgagtgttacagctcataaaagcagtgtggacccaaagagtgagcagtagcaagatttattgc

SEQ ID NO: 417405 - DNA, 378 bp, Homo sapiens
agcaggggctttttgaaccatgaatcactgttggagtttagacttataggcagaattgcctctttggcaccaaggcaacttatgtacatggcacataatgaattttaacatctaatgaccttatgttttgaacttcacttaaaaccctccattttgtttttctatttgataagagaactgtggatcattactgtacattagcacctacagagctcttttctattttgtttctctttttccctttatttctccaaagtttttgttttttatttttactggccctccattagggcctgagacagtggagcccacttcacactggacttggctaagctgataggaaggaaatatgcatgggcaaggaatggcctcttcttt

SEQ ID NO: 417406 - DNA, 787 bp, Homo sapiens
cgcgccgcatatatagcagcggcggcggtggcggcggccacaccgggcggcggacacgtggagggacccggcccgcgccttctgcccctgctgccggccgcgccatgcggtgagcgccccaggccgccagagcccacccgacccggcccgacgcccggacctgccgcccagacccgccaccgcacccggaccccgacgctccgaacccgggcgcagccgcagctcaagatggcccgaggcagcgccctcctgctcgcctccctcctcctcgccgcggccctttctgcctctgcggggctctggtcgccggccaaggaaaaacgaggctggaccctgaacagcgcgggctacctgctgggcccacatgccgttggcaaccacaggtcattcagcgacaagaatggcctcaccagcaagcgggagctgcggcccgaagatgacatgaaaccaggaagctttgacaggtccatacctgaaaacaatatcatgcgcacaatcattgagtttctgtctttcttgcatctcaaagaggccggtgccctcgaccgcctcctggatctccccgccgcagcctcctcagaagacatcgagcggtcctgagagcctcctgggcacgtttgtctgtgtgctgtaacctgaagtcaaaccttaagataatggataatcttcggccaatttatgcagagtcagccattcctgttctctttgccttgatgttgtgttgttatcatttaagatttttttttttggtaattattttgagtggcaaaataaagaatagcaatta

SEQ ID NO: 417407 - DNA, 750 bp, Homo sapiens
  misc_feature (729)..(729): n is a, c, g, or t
  misc_feature (733)..(734): n is a, c, g, or t
accgccctgcgaaggtctggaaaaggtggtgttcattagaaatctcaaaaccgagtcaccaagttccctctgttggagcccagtggagcctctgggagaaaagctggggtgacttttcctacaaggggcagagggactctgctagatttttgtttttcatttgtttttaattttgtaacatggaaactctttccttaggatataccagctctcattactcagctaggaattatacctctttaaagcctgaatttaaaagtctgacagttttaaatgcttactaactgtgggagttaaatcattacgaagtgaggaatacagagtgttgtccctgattctgggtttaatctggtaagaatctttacagaggacgaccacacgccgcttcctgtagcatgtgtcgtggttgtaattctctcatgtgcatattaagaagttgctgctcagatgtggctcttccctttgcagaggccggtgccctcgaccgcctcctggatctccccgccgcagcctcctcagaagacatcgagcggtcctgagagcctcctgggcacgtttgtctgtgtgctgtaacctgaagtcaaaccttaagataatggataatcttcggccaatttatgcagagtcagccattcctgttctctttgccttgatgttgtgttgttatcatttaagatttttttttttggtaattattttgagtggcaaaataaagaatagcaattaaanagannaaaaaattatatatat

SEQ ID NO: 417408 - DNA, 811 bp, Homo sapiens
  misc_feature (790)..(790): n is a, c, g, or t
  misc_feature (794)..(795): n is a, c, g, or t
cgcgccgcatatatagcagcggcggcggtggcggcggccacaccgggcggcggacacgtggagggacccggcccgcgccttctgcccctgctgccggccgcgccatgcggtgagcgccccaggccgccagagcccacccgacccggcccgacgcccggacctgccgcccagacccgccaccgcacccggaccccgacgctccgaacccgggcgcagccgcagctcaagatggcccgaggcagcgccctcctgctcgcctccctcctcctcgccgcggccctttctgcctctgcggggctctggtcgccggccaaggaaaaacgaggctggaccctgaacagcgcgggctacctgctgggcccacatgccgttggcaaccacaggtcattcagcgacaagaatggcctcaccagcaagcgggagctgcggcccgaagatgacatgaaaccaggaagctttgacaggtccatacctgaaaacaatatcatgcgcacaatcattgagtttctgtctttcttgcatctcaaagaggccggtgccctcgaccgcctcctggatctccccgccgcagcctcctcagaagacatcgagcggtcctgagagcctcctgggcacgtttgtctgtgtgctgtaacctgaagtcaaaccttaagataatggataatcttcggccaatttatgcagagtcagccattcctgttctctttgccttgatgttgtgttgttatcatttaagatttttttttttggtaattattttgagtggcaaaataaagaatagcaattaaanagannaaaaaattatatatat

SEQ ID NO: 417409 - DNA, 309 bp, Homo sapiens
ggctataaataattcccctctaatttcgacactaatcgtcccgcccttttaaggccggtgccctcgaccgcctcctggatctccccgccgcagcctcctcagaagacatcgagcggtcctgagagcctcctgggcacgtttgtctgtgtgctgtaacctgaagtcaaaccttaagataatggataatcttcggccaatttatgcagagtcagccattcctgttctctttgccttgatgttgtgttgttatcatttaagatttttttttttggtaattattttgagtggcaaaataaagaatagcaatta

SEQ ID NO: 417410 - DNA, 597 bp, Homo sapiens
gtcccagctactgtgttgcctccttgtgcactgtgtagatggcccgaggcagcgccctcctgctcgcctccctcctcctcgccgcggccctttctgcctctgcggggctctggtcgccggccaaggaaaaacgaggctggaccctgaacagcgcgggctacctgctgggcccacatgccgttggcaaccacaggtcattcagcgacaagaatggcctcaccagcaagcgggagctgcggcccgaagatgacatgaaaccaggaagctttgacaggtccatacctgaaaacaatatcatgcgcacaatcattgagtttctgtctttcttgcatctcaaagaggccggtgccctcgaccgcctcctggatctccccgccgcagcctcctcagaagacatcgagcggtcctgagagcctcctgggcacgtttgtctgtgtgctgtaacctgaagtcaaaccttaagataatggataatcttcggccaatttatgcagagtcagccattcctgttctctttgccttgatgttgtgttgttatcatttaagatttttttttttggtaattattttgagtggcaaaataaagaatagcaatta

SEQ ID NO: 417411 - DNA, 726 bp, Homo sapiens
accgccctgcgaaggtctggaaaaggtggtgttcattagaaatctcaaaaccgagtcaccaagttccctctgttggagcccagtggagcctctgggagaaaagctggggtgacttttcctacaaggggcagagggactctgctagatttttgtttttcatttgtttttaattttgtaacatggaaactctttccttaggatataccagctctcattactcagctaggaattatacctctttaaagcctgaatttaaaagtctgacagttttaaatgcttactaactgtgggagttaaatcattacgaagtgaggaatacagagtgttgtccctgattctgggtttaatctggtaagaatctttacagaggacgaccacacgccgcttcctgtagcatgtgtcgtggttgtaattctctcatgtgcatattaagaagttgctgctcagatgtggctcttccctttgcagaggccggtgccctcgaccgcctcctggatctccccgccgcagcctcctcagaagacatcgagcggtcctgagagcctcctgggcacgtttgtctgtgtgctgtaacctgaagtcaaaccttaagataatggataatcttcggccaatttatgcagagtcagccattcctgttctctttgccttgatgttgtgttgttatcatttaagatttttttttttggtaattattttgagtggcaaaataaagaatagcaatta

SEQ ID NO: 417412 - DNA, 409 bp, Homo sapiens
agggtgactattattttttgaaaaactaacagtgacttttgactatgaagaaatttgcatttaacttttattcacttgaaagtgctgagaggaaaactcaagaaaaactacaaggctgtttattgataagtggatcctgaaatttaccagtttatggagcagccagagttaagtagtacccaggaaaggatcaggtgtgaataagacatacattatttgtcctgggacctttcaagtttaatctgagagatactgtgttaattttaatttttcatatgccccatcttcttactaatctttctttctatctaacacctatgatttatagagaattatttgaaaataactctccattcctgaggctattgtgtttcagtccactagaaccttccagcaaatcaactggaac

SEQ ID NO: 417413 - DNA, 4048 bp, Homo sapiens
ggcgggcgcccctcccccagcctcgctgccgacttgcagtttgatctcagactgctgtgctagcaatcagcgagattccgtgggcgtaggaccctccgagccaggtgtgggatatagtctcgtggtgcgccgttttttaagccggtctgaaaagcgcaatattcgggtgggagtgacccgattttccagttacagcagatgaatggaacagcaaccatacgatagaaatagagataaatcagactctggaaataccatgctttcaaaatagctcctcaaaaatttcatctgagttcacctatgcatggtcggtggaggataatggaactcaggaaacacttatctcccaaaatcacctcatcagcaattccacattacttaaagatagagtcaagcttggtacagactacagactccacctctctccagtccaaatcttcgatgatgggcggaagttctcttgccacattagagtcggtcctaacaaaatcttgaggagctccaccacagtcaaggtttttgctaaaccagaaatccctgtgattgtggaaaataactccacggatgtcttggtagagagaagatttacctgcttactaaagaatgtatttcccaaagcaaatatcacatggtttatagatggaagttttcttcatgatgaaaaagaaggaatatatattactaatgaagagagaaaaggcaaagatggatttttggaactgaagtctgttttaacaagggtacatagtaataaaccagcccaatcagacaacttgaccatttggtgtatggctctgtctccagtcccaggaaataaagtgtggaacatctcatcagaaaagatcacttttctcttaggttctgaaatttcctcaacagaccctccactgagtgttacagaatctacccttgacacccaaccttctccagccagcagtgtatctcctgcaagatatccagctacatcttcagtgacccttgtagatgtgagtgccttgaggccaaacaccactcctcaacccagcaattccagtatgactacccgaggcttcaactatccctggacctccagtgggacagataccaaaaaatcagtttcacggatacctagtgaaacatacagttcatccccctcaggtgcaggctcaacacttcatgacaatgtctttaccagcacagccagagcattttcagaagtccccacaactgccaatggatctacgaaaactaatcacgtccatatcactggtattgtggtcaataagcccaaagatggaatgtcctggccagtgattgtagcagctttactcttttgctgcatgatattgtttggtcttggagtgagaaaatggtgtcagtaccaaaaagaaataatggaaagacctccacctttcaagccaccaccacctcccatcaagtacacttgcattcaagagcccaacgaaagtgatctgccttatcatgagatggagaccctctagtctcgtgagactttgccccatggcagaactctgctggaatcctattgagaaggtagacattgtgctttattaatatagtcgctcttcagccatgcctttgctgcagctgaaatggaagtcagaagtgagtgacctgttttcccagcaactcaccctctttcatctccaaacgcctgaagcttaaccaagagtgagaggatatgtcatgttcacactcaatgcaattcgtagtggttttcttgcttattgtaagaagtacatattagtctgccatctttaaaaaaaatacagtattttcatttaaattctctgatggagggacaacaatggtttcaactgtatgcccatgcctgatcctcttatttgaacatctatcaacattgtaaactctttgccaaaatcctggggctttgctgcattccctaagataattataggaaaaagaaaatgtaaaagtgctaacaaggctgccaagtaatggagaagtatggttagccttcatattgaaattctgttgcttattttcatggaaggaaacagaatactttgcacaggaaccacattttcaatcctccttcactgtcttcctaccatgttcagcccagactcctgccacatggaccaggatgaagagggatcaaagagataattagccaaaaacccagtagcctagaagatacaaaactccactggcctctaaaattatattagccaagagtggtttcatttgagtgccttcgtgtgtatgtccatcaaactggaaccaaactgttttgtaagtaaacaggcagcctaagcccaaccctactttctaattccggttattctctttttcatctggggatttacctgttcatttaatctgcctgttttgatctgttttgaaaaagataaagagcctcaaatcagaccagcactgattaattaaccctgctcctaccaatcttttttaaagcagttgaagcagaatgtataggtgtcagagaagaaacctagtcagccagacgtgctctgtattcagcaatagtttgtgaatgaataaattactaatcctccttgtcgcttgaaaccttcccacactccctgctccaggagggaaaaacagatgttgttgacagatagagtgataggcaaattctgtgtggactttagtcccaaaaggaaactttagttcacttgcagtatgcttatccttgactgcacatgagaatgccttgtgcagagttatttggagattatgtctttttcttaaacaccatggctgtcacacttcagttcaattaaatcagaatgtctgaggagtgagacacaggcatcaacactctcaaatgattcacatgttcagccaaagttgagaaccatcgagcctgtggaagttctttctcatggctcagaatcttaggtaggtgcttaactcttgtggtggccagcctccaagatgagccccagtgttcttgcctcctactattcacatctttatgtggtcccctccaatgctgaatacagatgatttgtgtaacctgaggccaggattaaggtgaggcaatcaatgtacctagggaaaaaatttaaggaggtattcacactcagggtcatgcacttgcacaatgttgagaatgagtaccactctcaccattggtatagccaaaaaaagcttggaagtgaccaaggctaggtcacaaaatacactgtggcttcttctttgatctctctttgaccatactgacactgggaaaagcccattcccatgccatgaagacaccaaggcagccctattgagaaatctacctgtcgtggccgggcgcagtggctcacgcctgtaatcccagcactttgggaggccgaggtgggtggatcacgaggtcaggagatcgagaccatcctggctaacacagtgaaaccccgtctctactaaaaatacaaaaattagccgggtgtggtgtcgggcacctgtagtcccagctactcaggaggctgaggcaggagaagggtgggaacccgggaggcagagcttgcagtgagccgagattgtgccactgcacactccaatctgggtgaaagaccgagactccgcctcaaaaaaaaaaaaaaaagaaagaaagaaagaaagaaagaaagaaatctacctgtcaaggaactaaggtattttgctaacaagcaccaacttgccagccatgtaagggagccatcttggaagcagatcctccagcctccagtcaagtcttcagataattgcaacttcagttgatcttttgaccaagacctcaagagagccagaactacccagctaagccttttactaaatttctgaacttctaacactattagataataagtgcttattgtttaacaccattaattttgagtataatttgttacatagcgacagataactatacagctcaacaactagaaaaataaactgtttacctgccttaattatttatctttagttccttattagttctcaagaaacaaatgctagcttcatatgtatggctgttgctttgcttcatgtgtatggctatttgtatttaacaagacttaatcatcagtaatttgtatac

SEQ ID NO: 417414 - DNA, 816 bp, Homo sapiens
cacgaagtgggtggctggagtttgcttgaaaacatcaattgactttgtgatcattacagaaatgctggtgtaaggtgttcagaagacaatggagaaaaaatggaaatactgtgctgtctattacatcatccagatacattttgtcaagggtaagacttccagttgtcccttcttgtcggatgggccgctttaggggcggatggggcctctgttcatttaaaatgccttgtgactgctgctgaaattgatcaccaaaggacaaatcattactaagggtttcagttatgtatttaagcggcaggtataagagagatgctagaatctagaaatgattactaatgaacactaaaaataagaagggaatgggtcatttgtgccactgctctgaggcattttcacccatttcctttctaacaggatctctggagtaattggcaaattgtgtttcttggaaatgaaatgctctccaaatggtagccaaaacaactgcggaaaaattaaaaattacaaagccatcaacgctcagagatccttgtttaacttttttctctctcaagtactctctttcttttggatataacaagtatttctcatccaaatactaaggtctttgggagttgaaaacacgttgaattttaatgaggcatgtgtaggtatgaacctgggagacaaagtggaatccttatgacagtgggaacgagagcctaatgggcctatttaaaaagagaaggaagcaagattagttctgtattccacagtatgagagtatcatagtaagcctgagtgtcttaagaattaactgtgcttttcagacat

SEQ ID NO: 417415 - DNA, 5205 bp, Homo sapiens
tcttgagagtgttcaaccatagaaatctaatggttggttggtgtcttttcagtcaaatgctacatgtttttcactccaatatttggcatgcatatagaattttgtgcgtcaagttggccttttcctttttctaattggttctggtcttttttggagaggttagagacacaatacaactttaaaaagagtgcatgtgtacacacagccacccacccacccacaccctcttcccggattgccctccacccccatgattataaagatgcttatggtgctcttaaaatctctctcatgtcagttgccatttgcattgagctcaaaaaataatattaaggcttttggcttcactaaacaaaagcaaatacaatttctgcttgcaattctatcctttacccaccctgcagtgcagggcccagtcaagtgtgagataagcaggggaggtccagagagaggccggtagaggcactgcacaagccttgccagcgtcacctcccacctcctggtccctttcactgctaagacatgcaactgctccatgacagccttgtgccttttgccaaatgtccagaaattttgcgaatctaagtattaaaaacacactgatttggtggtgctaataagaatagaaaaaggtcatttgaacagatctattttatgaatgaatacagacctaaaaatccttaagaaaacacaaatttcagagaacaatttcaacattgttctgtcgaacgttatactcagtcctgaaccacattactttcctgtctacgtttcatttcctgggggcttgccaagtgataaacagacccaggcgtgtgtggtagagttcgggttttttagcacgaagtgggtggctggagtttgcttgaaaacatcaattgactttgtgatcattacagaaatgctggtgtaaggtgttcagaagacaatggagaaaaaatggaaatactgtgctgtctattacatcatccagatacattttgtcaagggagtttgggaaaaaacagtcaacacagaagaaaatgtttatgctacacttggctctgatgtcaacctgacctgccaaacacagacagtaggcttcttcgtgcagatgcaatggtccaaggtcaccaataagatagacctgattgctgtctatcatccccaatacggcttctactgtgcctatgggagaccctgtgagtcacttgtgactttcacagaaactcctgagaatgggtcaaaatggactctgcacttaaggaatatgtcttgttcagtcagtggaaggtacgagtgtatgcttgttctgtatccagagggcattcagactaaaatctacaaccttctcattcagacacacgttacagcagatgaatggaacagcaaccatacgatagaaatagagataaatcagactctggaaataccatgctttcaaaatagctcctcaaaaatttcatctgagttcacctatgcatggtcggtggaggataatggaactcaggaaacacttatctcccaaaatcacctcatcagcaattccacattacttaaagatagagtcaagcttggtacagactacagactccacctctctccagtccaaatcttcgatgatgggcggaagttctcttgccacattagagtcggtcctaacaaaatcttgaggagctccaccacagtcaaggtttttgctaaaccagaaatccctgtgattgtggaaaataactccacggatgtcttggtagagagaagatttacctgcttactaaagaatgtatttcccaaagcaaatatcacatggtttatagatggaagttttcttcatgatgaaaaagaaggaatatatattactaatgaagagagaaaaggcaaagatggatttttggaactgaagtctgttttaacaagggtacatagtaataaaccagcccaatcagacaacttgaccatttggtgtatggctctgtctccagtcccaggaaataaagtgtggaacatctcatcagaaaagatcacttttctcttaggttctgaaatttcctcaacagaccctccactgagtgttacagaatctacccttgacacccaaccttctccagccagcagtgtatctcctgcaagatatccagctacatcttcagtgacccttgtagatgtgagtgccttgaggccaaacaccactcctcaacccagcaattccagtatgactacccgaggcttcaactatccctggacctccagtgggacagataccaaaaaatcagtttcacggatacctagtgaaacatacagttcatccccctcaggtgcaggctcaacacttcatgacaatgtctttaccagcacagccagagcattttcagaagtccccacaactgccaatggatctacgaaaactaatcacgtccatatcactggtattgtggtcaataagcccaaagatggaatgtcctggccagtgattgtagcagctttactcttttgctgcatgatattgtttggtcttggagtgagaaaatggtgtcagtaccaaaaagaaataatggaaagacctccacctttcaagccaccaccacctcccatcaagtacacttgcattcaagagcccaacgaaagtgatctgccttatcatgagatggagaccctctagtctcgtgagactttgccccatggcagaactctgctggaatcctattgagaaggtagacattgtgctttattaatatagtcgctcttcagccatgcctttgctgcagctgaaatggaagtcagaagtgagtgacctgttttcccagcaactcaccctctttcatctccaaacgcctgaagcttaaccaagagtgagaggatatgtcatgttcacactcaatgcaattcgtagtggttttcttgcttattgtaagaagtacatattagtctgccatctttaaaaaaaatacagtattttcatttaaattctctgatggagggacaacaatggtttcaactgtatgcccatgcctgatcctcttatttgaacatctatcaacattgtaaactctttgccaaaatcctggggctttgctgcattccctaagataattataggaaaaagaaaatgtaaaagtgctaacaaggctgccaagtaatggagaagtatggttagccttcatattgaaattctgttgcttattttcatggaaggaaacagaatactttgcacaggaaccacattttcaatcctccttcactgtcttcctaccatgttcagcccagactcctgccacatggaccaggatgaagagggatcaaagagataattagccaaaaacccagtagcctagaagatacaaaactccactggcctctaaaattatattagccaagagtggtttcatttgagtgccttcgtgtgtatgtccatcaaactggaaccaaactgttttgtaagtaaacaggcagcctaagcccaaccctactttctaattccggttattctctttttcatctggggatttacctgttcatttaatctgcctgttttgatctgttttgaaaaagataaagagcctcaaatcagaccagcactgattaattaaccctgctcctaccaatcttttttaaagcagttgaagcagaatgtataggtgtcagagaagaaacctagtcagccagacgtgctctgtattcagcaatagtttgtgaatgaataaattactaatcctccttgtcgcttgaaaccttcccacactccctgctccaggagggaaaaacagatgttgttgacagatagagtgataggcaaattctgtgtggactttagtcccaaaaggaaactttagttcacttgcagtatgcttatccttgactgcacatgagaatgccttgtgcagagttatttggagattatgtctttttcttaaacaccatggctgtcacacttcagttcaattaaatcagaatgtctgaggagtgagacacaggcatcaacactctcaaatgattcacatgttcagccaaagttgagaaccatcgagcctgtggaagttctttctcatggctcagaatcttaggtaggtgcttaactcttgtggtggccagcctccaagatgagccccagtgttcttgcctcctactattcacatctttatgtggtcccctccaatgctgaatacagatgatttgtgtaacctgaggccaggattaaggtgaggcaatcaatgtacctagggaaaaaatttaaggaggtattcacactcagggtcatgcacttgcacaatgttgagaatgagtaccactctcaccattggtatagccaaaaaaagcttggaagtgaccaaggctaggtcacaaaatacactgtggcttcttctttgatctctctttgaccatactgacactgggaaaagcccattcccatgccatgaagacaccaaggcagccctattgagaaatctacctgtcgtggccgggcgcagtggctcacgcctgtaatcccagcactttgggaggccgaggtgggtggatcacgaggtcaggagatcgagaccatcctggctaacacagtgaaaccccgtctctactaaaaatacaaaaattagccgggtgtggtgtcgggcacctgtagtcccagctactcaggaggctgaggcaggagaagggtgggaacccgggaggcagagcttgcagtgagccgagattgtgccactgcacactccaatctgggtgaaagaccgagactccgcctcaaaaaaaaaaaaaaaagaaagaaagaaagaaagaaagaaagaaatctacctgtcaaggaactaaggtattttgctaacaagcaccaacttgccagccatgtaagggagccatcttggaagcagatcctccagcctccagtcaagtcttcagataattgcaacttcagttgatcttttgaccaagacctcaagagagccagaactacccagctaagccttttactaaatttctgaacttctaacactattagataataagtgcttattgtttaacaccattaattttgagtataatttgttacatagcgacagataactatacagctcaacaactagaaaaataaactgtttacctgccttaattatttatctttagttccttattagttctcaagaaacaaatgctagcttcatatgtatggctgttgctttgcttcatgtgtatggctatttgtatttaacaagacttaatcatcagtaatttgtatac

SEQ ID NO: 417416 - DNA, 3994 bp, Homo sapiens
ggcgggcgcccctcccccagcctcgctgccgacttgcagtttgatctcagactgctgtgctagcaatcagcgagattccgtgggcgtaggaccctccgagccaggtgtgggatatagtctcgtggtgcgccgttttttaagccggtctgaaaagcgcaatattcgggtgggagtgacccgattttccagttacagcagatgaatggaacagcaaccatacgatagaaatagagataaatcagactctggaaataccatgctttcaaaatagctcctcaaaaatttcatctgagttcacctatgcatggtcggtggaggataatggaactcaggaaacacttatctcccaagactacagactccacctctctccagtccaaatcttcgatgatgggcggaagttctcttgccacattagagtcggtcctaacaaaatcttgaggagctccaccacagtcaaggtttttgctaaaccagaaatccctgtgattgtggaaaataactccacggatgtcttggtagagagaagatttacctgcttactaaagaatgtatttcccaaagcaaatatcacatggtttatagatggaagttttcttcatgatgaaaaagaaggaatatatattactaatgaagagagaaaaggcaaagatggatttttggaactgaagtctgttttaacaagggtacatagtaataaaccagcccaatcagacaacttgaccatttggtgtatggctctgtctccagtcccaggaaataaagtgtggaacatctcatcagaaaagatcacttttctcttaggttctgaaatttcctcaacagaccctccactgagtgttacagaatctacccttgacacccaaccttctccagccagcagtgtatctcctgcaagatatccagctacatcttcagtgacccttgtagatgtgagtgccttgaggccaaacaccactcctcaacccagcaattccagtatgactacccgaggcttcaactatccctggacctccagtgggacagataccaaaaaatcagtttcacggatacctagtgaaacatacagttcatccccctcaggtgcaggctcaacacttcatgacaatgtctttaccagcacagccagagcattttcagaagtccccacaactgccaatggatctacgaaaactaatcacgtccatatcactggtattgtggtcaataagcccaaagatggaatgtcctggccagtgattgtagcagctttactcttttgctgcatgatattgtttggtcttggagtgagaaaatggtgtcagtaccaaaaagaaataatggaaagacctccacctttcaagccaccaccacctcccatcaagtacacttgcattcaagagcccaacgaaagtgatctgccttatcatgagatggagaccctctagtctcgtgagactttgccccatggcagaactctgctggaatcctattgagaaggtagacattgtgctttattaatatagtcgctcttcagccatgcctttgctgcagctgaaatggaagtcagaagtgagtgacctgttttcccagcaactcaccctctttcatctccaaacgcctgaagcttaaccaagagtgagaggatatgtcatgttcacactcaatgcaattcgtagtggttttcttgcttattgtaagaagtacatattagtctgccatctttaaaaaaaatacagtattttcatttaaattctctgatggagggacaacaatggtttcaactgtatgcccatgcctgatcctcttatttgaacatctatcaacattgtaaactctttgccaaaatcctggggctttgctgcattccctaagataattataggaaaaagaaaatgtaaaagtgctaacaaggctgccaagtaatggagaagtatggttagccttcatattgaaattctgttgcttattttcatggaaggaaacagaatactttgcacaggaaccacattttcaatcctccttcactgtcttcctaccatgttcagcccagactcctgccacatggaccaggatgaagagggatcaaagagataattagccaaaaacccagtagcctagaagatacaaaactccactggcctctaaaattatattagccaagagtggtttcatttgagtgccttcgtgtgtatgtccatcaaactggaaccaaactgttttgtaagtaaacaggcagcctaagcccaaccctactttctaattccggttattctctttttcatctggggatttacctgttcatttaatctgcctgttttgatctgttttgaaaaagataaagagcctcaaatcagaccagcactgattaattaaccctgctcctaccaatcttttttaaagcagttgaagcagaatgtataggtgtcagagaagaaacctagtcagccagacgtgctctgtattcagcaatagtttgtgaatgaataaattactaatcctccttgtcgcttgaaaccttcccacactccctgctccaggagggaaaaacagatgttgttgacagatagagtgataggcaaattctgtgtggactttagtcccaaaaggaaactttagttcacttgcagtatgcttatccttgactgcacatgagaatgccttgtgcagagttatttggagattatgtctttttcttaaacaccatggctgtcacacttcagttcaattaaatcagaatgtctgaggagtgagacacaggcatcaacactctcaaatgattcacatgttcagccaaagttgagaaccatcgagcctgtggaagttctttctcatggctcagaatcttaggtaggtgcttaactcttgtggtggccagcctccaagatgagccccagtgttcttgcctcctactattcacatctttatgtggtcccctccaatgctgaatacagatgatttgtgtaacctgaggccaggattaaggtgaggcaatcaatgtacctagggaaaaaatttaaggaggtattcacactcagggtcatgcacttgcacaatgttgagaatgagtaccactctcaccattggtatagccaaaaaaagcttggaagtgaccaaggctaggtcacaaaatacactgtggcttcttctttgatctctctttgaccatactgacactgggaaaagcccattcccatgccatgaagacaccaaggcagccctattgagaaatctacctgtcgtggccgggcgcagtggctcacgcctgtaatcccagcactttgggaggccgaggtgggtggatcacgaggtcaggagatcgagaccatcctggctaacacagtgaaaccccgtctctactaaaaatacaaaaattagccgggtgtggtgtcgggcacctgtagtcccagctactcaggaggctgaggcaggagaagggtgggaacccgggaggcagagcttgcagtgagccgagattgtgccactgcacactccaatctgggtgaaagaccgagactccgcctcaaaaaaaaaaaaaaaagaaagaaagaaagaaagaaagaaagaaatctacctgtcaaggaactaaggtattttgctaacaagcaccaacttgccagccatgtaagggagccatcttggaagcagatcctccagcctccagtcaagtcttcagataattgcaacttcagttgatcttttgaccaagacctcaagagagccagaactacccagctaagccttttactaaatttctgaacttctaacactattagataataagtgcttattgtttaacaccattaattttgagtataatttgttacatagcgacagataactatacagctcaacaactagaaaaataaactgtttacctgccttaattatttatctttagttccttattagttctcaagaaacaaatgctagcttcatatgtatggctgttgctttgcttcatgtgtatggctatttgtatttaacaagacttaatcatcagtaatttgtatac

SEQ ID NO: 417417 - DNA, 317 bp, Homo sapiens
aaacaagttaaaaactagttcagattcaactgttgtgcaatgtcacactaaaagaggcttggctctagtgaaataattaattaaaaccaaagatataatcagcatatcacattgcatacttatttgtatactttgcttataatcagtctcctttgttggaatctaagctctgaaaaaagaattttgtctgttttgttcaatgtcttattcaaaatgcctgtaatttgcctggcacataacaaaaattcagtaattatttgttgaataaatggatgaatggaaaccttcacaacacctttacagaggctgtaagctct

SEQ ID NO: 417418 - DNA, 361 bp, Homo sapiens
ggaactctggactagatgacctctaagatcctcctcacctccaatcactaatgaaactttttctctctttattcacttgaacccccagaaatgagagttgccctcaactccccaactgatgcctccttagcctcttcctgctctgctcccccgttatctcaggcagcatcacaaccacctgcctggtgactaccatctctccgtgttctggccatttagcctctttttaaattcttttcctatttaactctttcttaaagaaaatattccagctcactagtgttagaaaggtgcttaatgatctggagattttgttaactaaaatcatactataaatacaagcagcaactagttacagtag

SEQ ID NO: 417419 - DNA, 130 bp, Homo sapiens
aaaggcttctgtcgtgagtggcacacgtagggcaactcgattgctctgcgtgcggaatcgacatcaagagatttcggaagcataatttttggtatttgggcagctggtgatcgttggtcccggcgccctt

SEQ ID NO: 417420 - DNA, 321 bp, Homo sapiens
ggacctagtggacaatattatgatggagagcaggagagttctcatggccctgaggaaagacagtgaagttatactcttgctcctaccaagtgaaagctaattgtgtcttgctctgataccaaaaccagacaaggaaactacaaaaaaagaaaactgcagactaatactcctgatgaacatagatgtaataatcttcaacaaaatactagcaaaccaaaatccaacagcatatcaaaaagataatacaccatgatcaaatgggattcataccagggatgtaaggatggttcaatatataaatcataaacatgattcaacaga

SEQ ID NO: 417421 - DNA, 1774 bp, Homo sapiens
atagaaagcacgtgatggaatctgtgatgtctaatgtgtcttatgaaaattgccaaacaactgtccctggggattctgctttgattggcatttttagtcatgggaatgtatatttgctgatatatctgctctgtgtttgggcctctcttgctgtcattatgatgtattttgagatgattagtcaagagtcaaggttgcgagtacaggccaagaccatgggaaaaaaagccatgctcactggccaataaagagcttgatgctgcctggccaaatgaggtgactcagatagaatctgatcccattcagagcttggtaaatgtcactgtacagaagacattgaaaaggaagaggcatagtcatgatcaaaaggatatattgacagttatctatagccagggtagttgttaatacctgcttgtttggggagatatgtttgattatagagagactctgggccaccctcaaacaccgtcagatgcattagcagcccactgcatgggacaatcgcaggcagatacgaggaatgtatcccctgcctattttccttgtgtaacaaatggaaaacattctcccctgtgagaaataatgcaatttctaattatctggatgttcgttgaaaatatattagacattctccctgaggttaaaaacaaaaagtacgtgaccagtctggtaagaagtattaatgaagtagctaatattacagcttcattttctactagcacctatcataatggtcttagtcatttcacacaaatcagaacttccttccccaccagggaggacaacatcttcatgctgtgattgaagcatccattcagaacacgaggcaatattgtagtccacagggaatggatgcttcacttgatctccggaccttggctgcagaggccatcgcagcttttgaaaagtgaaggggttaattcccattggtgtctttgcttatagcatttttctctaacctataacaaggagacattacattttactttagaacatgagaatagcagttttgctcatgacttaccattccagctgcatgggaaagcaaagcagaaaacagtgccccaaatggaaaaaagatactcacacagaacaaaacagttcttggtcttgttcttggtcttgtcaaaccttgcctgatgctctttctaaagtcaaaatatgaatgctaagaaggcataacctacatccttctctgatttcttcagcagggtcaaaagacagttactagcaatggggaatgcttgtcactgtggagaaagagttttgtatatgtctgataccgttgttataacaaaacaaatttttttactatagttttttgttttctacctgcacacccaccagaagagcacaaagcaaggccattgcaacaggcatttaaaaattattatcaaacatgcacatgcttgtacacacacacacacacacacacacaaacaggggcatttgtaaaggtgtccctggaatgtaagatttataatgtttaaggcaaggtgaaggcattgccaagtgtgtgtcgctcataggactagtgtatattcactgaaagttaacctgatgatttgttattgtttgaaccatatgctgatttgcttctggtttctgtttagtgtgttctctctgataaggggctgaaagattctgcatcacacatcctctgagacctaccatgtcgcacactttgttaatgacaaacttcactctacactatacagtaccttgttgatatattcagtaaagtcttattttaaaagaaaaaaaaaacatt

SEQ ID NO: 417422 - DNA, 379 bp, Homo sapiens
ggatcctagcacagaggaagggaggctgagatggtggaggaaaagggtcactgacaaaatatttgataatctcagagtttaagggtctggggctgggggagcagagacgttctttcatccatagcataggttagcttgacaattgcatacaaaccaaaggtctggcgaagaccagctggaggtatttagttggcaacggataagattgactccaccaaggcagggcacagtggctcacaatctcagcatgttgagaggctgaggagggtggatcatttgaggccaggaactcgagaacagcttggccaacatggcaaaaccccatctgtactaaaaatacaaaaattagccaggcatggcgatgcgcacctgtaatccc

SEQ ID NO: 417423 - DNA, 236 bp, Homo sapiens
tgggctctggcactaaccagctatgggagatgggtccttacctgcaaaatgaagtggacctgagaggtctgcacggaccacacacagcccagggaaggcacctgtgcttctccatggaggcctacattcatcgctctctctcaggaagggggaagagtcctccaagacatgggaatggaaaaaccaagtgcttccaaaactactggctcccctgggaaacatccactcagatgagc

SEQ ID NO: 417424 - DNA, 4785 bp, Homo sapiens
  misc_feature (1)..(1): n is a, c, g, or t
ngcctgtcagggtgttgtgggggtgcccagctgcctgtcagaccctgaggactaccagacagagagtgggcagccatttcccgggaggcttccccttcccccacctcactctcttgccatacgggggtcaggagtcacgtgtagccacagcgctctgggccaggggtcggggctctggtgtggctcccccaggccctggctgtatgtgggtgggcatgtggcctccccccaccctgtgtgttaggaactcgtgtcctgtcccggagtgtctgtctctgtttcacttcttgtgttcccgtgtctgtctgtcttgcatccctagcccgcagtctttttctctgtccctttatctttctgtttttgtctgtgtcctaggtcggtttctgccactggctctcctgtccctgtgatctgggtctctgtgtggtctccgctggcagggggaggggagtgtgaggaaacagaactaaaagtgctgggctgtgtgggtcggggctgtgtggacagagggggcgtggcagccccgggtgggtgtgatctgtggcttgaagggaaggatgacgctgagtgggtctcgggggcaggaggagcccccaccgagccgagtcccacgggccgtgcgcgtggccagtctgctgagcgagggagaggaactgtctggggacgaccaaggggatgaggaagaggatgaccacgcctatgagggcgtccccaatggcggatggcataccagcagcctgagcttgtccttgcccagcacaatagctgcgccacaccccatggacgggccgcctgggggctccacccccgtcacaccagtcatcaaggctggctggctggacaagaacccaccgcagggatcttacatctatcagaaacgatgggtgagactggatactgatcacctgcgatactttgacagtaacaaggacgcttactctaagcgctttatctctgtggcctgcatctcccacgtggctgccatcggggaccagaagtttgaagtgatcacaaacaaccgaacctttgccttccgggcagagagtgatgtggagcggaaggagtggatgcaggccctgcagcaggccatggctgagcagcgtgcccgggcccggctctctagcgcttatctgctgggagttccaggctcagagcagcctgaccgcgctggcagcctggagcttcgtggcttcaagaataagctgtacgtggccgtggtcggggacaaagtgcagctctacaagaatctagaggagtaccacctgggcattggcatcaccttcatcgacatgagcgtgggcaacgtgaaggaagtggaccggcgcagcttcgacctcaccacgccctaccgcatcttcagcttctctgctgactcagagctagagaaggagcagtggttggaggccatgcagggagccatcgctgaggccctgtctacctcggaggtggccgagcgcatctgggctgcagcccccaacaggttctgtgctgactgcggggctcctcagcctgactgggcctccatcaacctctgtgttgttatctgcaagcgctgtgcaggggagcaccgtggcctgggcgctggcgtctccaaggtgcggagcctgaagatggacaggaaggtgtggacagaaacacttatcgagctcttcttacagctggggaatggcgctgggaaccgcttctgggcagccaacgtgccccccagtgaggccctgcagcccagcagcagccccagcacccggcggtgccacctggaggccaagtaccgtgagggcaagtaccgccgctaccacccgctctttggcaaccaggaggagctggacaaggccctgtgtgctgcagtcaccaccacagacctggctgagacccaggcgctcctgggctgtggggctgggatcaactgcttctcgggggaccctgaggcccccacgcccctggctcttgcagagcaggcggggcagacgctgcagatggaattccttcggaacaaccggaccacagaggtgcctcggctggactcgatgaagcccctggaaaagcactactcagttgtcctgccgaccgtgagccacagtggcttcctctacaagactgcctctgccggcaagctgctacaggaccgccgggcccgggaagagttcagccggcgctggtgtgtccttggtgacggggtcctgagctactttgagaatgagcgggcagtgacccccaatggagagattcgggccagcgagattgtgtgcctggcagtgccccctcctgacacccatggctttgagcacacctttgaggtgtacacggagggagaacggctgtacctgtttgggctggagagtgcggagcaggctcatgagtgggtcaagtgtattgctaaggcattcgtgcctcccctagccgaggatctgctggcccgggattttgagcggctgggacgcctaccctacaaagctggcctgagcctacagcgggcccaggagggctggttctctctcagtggctcggagctccgtgctgtcttcccggaggggccctgcgaagagccgctgcaactacggaaactgcaggagctttccatccagggggacagtgagaaccaggtgctggtgctggtggagcgaaggaggacactgtacatacagggcgagcggcggctggacttcatgggttggctgggggccatccagaaagcagccgccagcatgggggacacgctgtcggagcagcagcttggggactcggatatcccggtgatcgtgtaccgctgtgtggactacatcacgcagtgcggcctgacctccgagggcatctaccgcaagtgtgggcagacatcgaagacacagcggctgctggagagcctgcggcaggatgcgcgctctgtgcacctcaaggagggcgagcagcacgtggatgatgtttcctcggcgctcaagcgcttcctgcgcgacctgcctgatgggctcttcactcgcgcccagcgcctaacctggctggaggcctcagagattgaggacgaggaggagaaggtctccaggtaccgagagctgctggtgcggctgccccctgtcaaccgggccacagtgaaggcccttatcagccacctgtactgtgttcagtgcttctcagacacgaaccagatgaacgtgcacaacctggcaattgtgtttgggcccacgctcttccagacagatgggcaggactacaaggctggccgtgtggtggaagacctcattaaccactatgtggtggtgtttagtgtggatgaggaagagctcaggaagcagcgggaggagatcactgccattgtgaagatgcgcgtggctggcactgccagtgggacccagcatgccggtgacttcatctgcacagtgtatctggaagagaagaaggcagagactgagcagcatatcaaggtcccagcatccatgactgctgaggagctcaccctggagatcctggatcgccggaacgtgggcatcagggagaaggactattggacctgctttgaggtcaacgagagggaggaggcagagcgccccctgcactttgcggagaaggtgctgcccatcctgcacgggctgggcacggacagccacctggtggtgaagaagcaccaggccatggaggccatgctgctgtacctggccagccgtgtcggtgacaccaagcatggcatgatgaagttccgtgaggaccgcagcctcctgggcctgggcctgccctcaggtggcttccacgatcgctacttcatcctcaacagcagctgcttgcggctctacaaggaggtccggagccagaggccgtggagcggggcccctgagaccagtcaccggcctgagaaggagtggcctattaagagtctcaaagtctacctgggagtgaagaagaaactcaggccacccacctgctggggcttcacagtggtgcatgagacagagaaacatgagaagcagcagtggtacctctgctgtgacacacagatggagctccgggagtggttcgctacctttctgtttgtgcagcatgacggcctggtgtggccctcagagccctcacgcgtgtcccgggcagtgcctgaggtccggctgggtagtgtgtcactgatcccccttcgaggtagtgaaaatgaaatgcgccggagtgtggctgccttcaccgcggaccctctgtctcttctgcgcaacgtctgagcacaggagcccatccttggctctaggattccgccgctggaagccttctgttcagacaccccttatgctccaaggcctgatgtgagccagcggggggtgcatgggaaactgcaccccacaacccacatcctccatcctgactgcagcatggggttccccggcaggggtgggaggcagcaggggtcagcctgggcaggaacctctcccaactctgtccaggtgttcagacctcttggcccaacctgctcaccccaccgggttcactgtccttgtggggctggagagatgggcataagtcaggaacttgggaggaccaccaccctttcagaggcgtgaggccctggggccctgccggaagggagccccctgctcctcccaacaaactccagaacagcagaaagcgggtgctgtagaggagcactcagctcacggggagggagctcttggctgagcttctacagggctgagagctgcgctttggggacttcagccttccttccagtctgggctgagtggggggtccagactacctgatgccccttccccaatttggggactttttgataatataaatatatctgtatattttacccta

SEQ ID NO: 417425 - DNA, 1030 bp, Homo sapiens
ccagttgcagagggctggtgcaggagcccaggcaaggattacggggctcagtcctgccctgtggggagcaagagtacacggctggattccagagctgccagcaggcctaccccctggggcctgcctgtggcctctcatccctgcctgtcccagtagacactgggggtgggtaagtgctcccgtgaagggggggcccaggtgattctgggtctggccctgtgtctacaggggagcaccgtggcctgggcgctggcgtctccaaggtgcggagcctgaagatggacaggaaggtgtggacagaaacacttatcgaggtggggatgcccctgcttgccaccgatacttggggtctgccccattcaacagctgtctgggtctcccagccccctccctatctcagtgaccacagcaccttggagctggaagagaccctttgtgataatctagtgggtggggatttcggaaaagcaatttttggcaaagtcagcaaactggccagtgagctaagaatgtttttatagttgtaaagtgttatttttttttaaagaaaaaaaaaggaagaaaatgcagcagagactgtatgtgttctgtaaagccgaaaataattactatttcgccctttagagaaagaatttgctaacttctgatctaatttcactgtcatccattgaatagatgtgtaaactgaggtcctgggcagggctgtaatctgcctgagattaccctgtaaatgcatattgaccaccatccctgcctctttccatcccacttctggctgacccagggccttctcccctaccttgcacagcccctcagaggccctcagcctccatttcatgtgaactcacatgtaccagtgggtatatatatgtgtgctgtgtgtgcacacacgtgtacatttatgcccctgtactggaaactcccaggtacccatatgtggtagatataggggagaacctgcaatgggagggtagacccaggctgcagactccagacacttggagtgtcacatccgtttctcacctcccca

SEQ ID NO: 417426 - DNA, 218 bp, Homo sapiens
agaatcgagctggtaccatctcgacaagttgtgcatgcatgccttgtcatatcgtatgtcatatgcctcccgggccaccctcctccctcattctgtccacatgcaggtgttctcccaacccagactccatttgacaccctccaccttctgcacatacatgccatacacacaccccaaccccacacatcactgcacacttgtcgagtcctggctctaga

SEQ ID NO: 417427 - DNA, 4160 bp, Homo sapiens
  misc_feature (49)..(49): n is a, c, g, or t
gccggtctgacctcttatgaggagtctcccctgagatatatgctgtttnccaaaaaaaaaaaaaaaaaaaagagaatgtgctactttgagtctgacttcagtcactcttgctgtaaagtccatcttcttgccagtggccatttgggattcttcctccctagaacctggctgatcctcactctgagtgtggcttctgagggctggggtggtcctggaacctgtcctcctacccccggtcatttgcttgttgtccctctccctctccagatcttacatctatcagaaacgatgggtgagactggatactgatcacctgcgatactttgacagtaacaaggacgcttactctaagcgctttatctctgtggcctgcatctcccacgtggctgccatcggggaccagaagtttgaagtgatcacaaacaaccgaacctttgccttccgggcagagagtgatgtggagcggaaggagtggatgcaggccctgcagcaggccatggctgagcagcgtgcccgggcccggctctctagcgcttatctgctgggagttccaggctcagagcagcctgaccgcgctggcagcctggagcttcgtggcttcaagaataagctgtacgtggccgtggtcggggacaaagtgcagctctacaagaatctagaggagtaccacctgggcattggcatcaccttcatcgacatgagcgtgggcaacgtgaaggaagtggaccggcgcagcttcgacctcaccacgccctaccgcatcttcagcttctctgctgactcagagctagagaaggagcagtggttggaggccatgcagggagccatcgctgaggccctgtctacctcggaggtggccgagcgcatctgggctgcagcccccaacaggttctgtgctgactgcggggctcctcagcctgactgggcctccatcaacctctgtgttgttatctgcaagcgctgtgcaggggagcaccgtggcctgggcgctggcgtctccaaggtgcggagcctgaagatggacaggaaggtgtggacagaaacacttatcgagctcttcttacagctggggaatggcgctgggaaccgcttctgggcagccaacgtgccccccagtgaggccctgcagcccagcagcagccccagcacccggcggtgccacctggaggccaagtaccgtgagggcaagtaccgccgctaccacccgctctttggcaaccaggaggagctggacaaggccctgtgtgctgcagtcaccaccacagacctggctgagacccaggcgctcctgggctgtggggctgggatcaactgcttctcgggggaccctgaggcccccacgcccctggctcttgcagagcaggcggggcagacgctgcagatggaattccttcggaacaaccggaccacagaggtgcctcggctggactcgatgaagcccctggaaaagcactactcagttgtcctgccgaccgtgagccacagtggcttcctctacaagactgcctctgccggcaagctgctacaggaccgccgggcccgggaagagttcagccggcgctggtgtgtccttggtgacggggtcctgagctactttgagaatgagcgggcagtgacccccaatggagagattcgggccagcgagattgtgtgcctggcagtgccccctcctgacacccatggctttgagcacacctttgaggtgtacacggagggagaacggctgtacctgtttgggctggagagtgcggagcaggctcatgagtgggtcaagtgtattgctaaggcattcgtgcctcccctagccgaggatctgctggcccgggattttgagcggctgggacgcctaccctacaaagctggcctgagcctacagcgggcccaggagggctggttctctctcagtggctcggagctccgtgctgtcttcccggaggggccctgcgaagagccgctgcaactacggaaactgcaggagctttccatccagggggacagtgagaaccaggtgctggtgctggtggagcgaaggaggacactgtacatacagggcgagcggcggctggacttcatgggttggctgggggccatccagaaagcagccgccagcatgggggacacgctgtcggagcagcagcttggggactcggatatcccggtgatcgtgtaccgctgtgtggactacatcacgcagtgcggcctgacctccgagggcatctaccgcaagtgtgggcagacatcgaagacacagcggctgctggagagcctgcggcaggatgcgcgctctgtgcacctcaaggagggcgagcagcacgtggatgatgtttcctcggcgctcaagcgcttcctgcgcgacctgcctgatgggctcttcactcgcgcccagcgcctaacctggctggaggcctcagagattgaggacgaggaggagaaggtctccaggtaccgagagctgctggtgcggctgccccctgtcaaccgggccacagtgaaggcccttatcagccacctgtactgtgttcagtgcttctcagacacgaaccagatgaacgtgcacaacctggcaattgtgtttgggcccacgctcttccagacagatgggcaggactacaaggctggccgtgtggtggaagacctcattaaccactatgtggtggtgtttagtgtggatgaggaagagctcaggaagcagcgggaggagatcactgccattgtgaagatgcgcgtggctggcactgccagtgggacccagcatgccggtgacttcatctgcacagtgtatctggaagagaagaaggcagagactgagcagcatatcaaggtcccagcatccatgactgctgaggagctcaccctggagatcctggatcgccggaacgtgggcatcagggagaaggactattggacctgctttgaggtcaacgagagggaggaggcagagcgccccctgcactttgcggagaaggtgctgcccatcctgcacgggctgggcacggacagccacctggtggtgaagaagcaccaggccatggaggccatgctgctgtacctggccagccgtgtcggtgacaccaagcatggcatgatgaagttccgtgaggaccgcagcctcctgggcctgggcctgccctcaggtggcttccacgatcgctacttcatcctcaacagcagctgcttgcggctctacaaggaggtccggagtcaccggcctgagaaggagtggcctattaagagtctcaaagtctacctgggagtgaagaagaaactcaggccacccacctgctggggcttcacagtggtgcatgagacagagaaacatgagaagcagcagtggtacctctgctgtgacacacagatggagctccgggagtggttcgctacctttctgtttgtgcagcatgacggcctggtgtggccctcagagccctcacgcgtgtcccgggcagtgcctgaggtccggctgggtagtgtgtcactgatcccccttcgaggtagtgaaaatgaaatgcgccggagtgtggctgccttcaccgcggaccctctgtctcttctgcgcaacgtctgagcacaggagcccatccttggctctaggattccgccgctggaagccttctgttcagacaccccttatgctccaaggcctgatgtgagccagcggggggtgcatgggaaactgcaccccacaacccacatcctccatcctgactgcagcatggggttccccggcaggggtgggaggcagcaggggtcagcctgggcaggaacctctcccaactctgtccaggtgttcagacctcttggcccaacctgctcaccccaccgggttcactgtccttgtggggctggagagatgggcataagtcaggaacttgggaggaccaccaccctttcagaggcgtgaggccctggggccctgccggaagggagccccctgctcctcccaacaaactccagaacagcagaaagcgggtgctgtagaggagcactcagctcacggggagggagctcttggctgagcttctacagggctgagagctgcgctttggggacttcagccttccttccagtctgggctgagtggggggtccagactacctgatgccccttccccaatttggggactttttgataatataaatatatctgtatattttacccta

SEQ ID NO: 417428 - DNA, 4568 bp, Homo sapiens
  misc_feature (49)..(49): n is a, c, g, or t
gccggtctgacctcttatgaggagtctcccctgagatatatgctgtttnccaaaaaaaaaaaaaaaaaaaagagaatgtgctactttgagtctgacttcagtcactcttgctgtaaagtccatcttcttgccagtggccatttgggattcttcctccctagaacctggctgatcctcactctgagtgtggcttctgagggctggggtggtcctggaacctgtcctcctacccccggtcatttgcttgttgtccctctccctctccagatcttacatctatcagaaacgatgggtgagactggatactgatcacctgcgatactttgacagtaacaaggacgcttactctaagcgctttatctctgtggcctgcatctcccacgtggctgccatcggggaccagaagtttgaagtgatcacaaacaaccgaacctttgccttccgggcagagagtgatgtggagcggaaggagtggatgcaggccctgcagcaggccatggctgagcagcgtgcccgggcccggctctctagcgcttatctgctgggagttccaggctcagagcagcctgaccgcgctggcagcctggagcttcgtggcttcaagaataagctgtacgtggccgtggtcggggacaaagtgcagctctacaagaatctagaggtgctaaggggtcatggaacctctcccctgcccatgtccacctaccctgccccaggctgacctagggccttagccctgccttttctgttccctcttttcctgcactgggcccagccctttgcctggatatgtcctcgctcccccaagttctgaccacttcccccaggctctgagcactgccctccagtccctgccctggcccttgctcccccgcacctctgttcattgctgtgtgggccctgaacctgcagccccttaccctgcccagcctcccatgtcccctgctgtctccctcctgggcaccccccccagtccctgagttgcaccaccttcccttcctctccctgtcccaagcctcacgccctgcccccaaagccttgccctcatcccgtcccatctgccctccaggagtaccacctgggcattggcatcaccttcatcgacatgagcgtgggcaacgtgaaggaagtggaccggcgcagcttcgacctcaccacgccctaccgcatcttcagcttctctgctgactcagagctagagaaggagcagtggttggaggccatgcagggagccatcgctgaggccctgtctacctcggaggtggccgagcgcatctgggctgcagcccccaacaggttctgtgctgactgcggggctcctcagcctgactgggcctccatcaacctctgtgttgttatctgcaagcgctgtgcaggggagcaccgtggcctgggcgctggcgtctccaaggtgcggagcctgaagatggacaggaaggtgtggacagaaacacttatcgagctcttcttacagctggggaatggcgctgggaaccgcttctgggcagccaacgtgccccccagtgaggccctgcagcccagcagcagccccagcacccggcggtgccacctggaggccaagtaccgtgagggcaagtaccgccgctaccacccgctctttggcaaccaggaggagctggacaaggccctgtgtgctgcagtcaccaccacagacctggctgagacccaggcgctcctgggctgtggggctgggatcaactgcttctcgggggaccctgaggcccccacgcccctggctcttgcagagcaggcggggcagacgctgcagatggaattccttcggaacaaccggaccacagaggtgcctcggctggactcgatgaagcccctggaaaagcactactcagttgtcctgccgaccgtgagccacagtggcttcctctacaagactgcctctgccggcaagctgctacaggaccgccgggcccgggaagagttcagccggcgctggtgtgtccttggtgacggggtcctgagctactttgagaatgagcgggcagtgacccccaatggagagattcgggccagcgagattgtgtgcctggcagtgccccctcctgacacccatggctttgagcacacctttgaggtgtacacggagggagaacggctgtacctgtttgggctggagagtgcggagcaggctcatgagtgggtcaagtgtattgctaaggcattcgtgcctcccctagccgaggatctgctggcccgggattttgagcggctgggacgcctaccctacaaagctggcctgagcctacagcgggcccaggagggctggttctctctcagtggctcggagctccgtgctgtcttcccggaggggccctgcgaagagccgctgcaactacggaaactgcaggagctttccatccagggggacagtgagaaccaggtgctggtgctggtggagcgaaggaggacactgtacatacagggcgagcggcggctggacttcatgggttggctgggggccatccagaaagcagccgccagcatgggggacacgctgtcggagcagcagcttggggactcggatatcccggtgatcgtgtaccgctgtgtggactacatcacgcagtgcggcctgacctccgagggcatctaccgcaagtgtgggcagacatcgaagacacagcggctgctggagagcctgcggcaggatgcgcgctctgtgcacctcaaggagggcgagcagcacgtggatgatgtttcctcggcgctcaagcgcttcctgcgcgacctgcctgatgggctcttcactcgcgcccagcgcctaacctggctggaggcctcagagattgaggacgaggaggagaaggtctccaggtaccgagagctgctggtgcggctgccccctgtcaaccgggccacagtgaaggcccttatcagccacctgtactgtgttcagtgcttctcagacacgaaccagatgaacgtgcacaacctggcaattgtgtttgggcccacgctcttccagacagatgggcaggactacaaggctggccgtgtggtggaagacctcattaaccactatgtggtggtgtttagtgtggatgaggaagagctcaggaagcagcgggaggagatcactgccattgtgaagatgcgcgtggctggcactgccagtgggacccagcatgccggtgacttcatctgcacagtgtatctggaagagaagaaggcagagactgagcagcatatcaaggtcccagcatccatgactgctgaggagctcaccctggagatcctggatcgccggaacgtgggcatcagggagaaggactattggacctgctttgaggtcaacgagagggaggaggcagagcgccccctgcactttgcggagaaggtgctgcccatcctgcacgggctgggcacggacagccacctggtggtgaagaagcaccaggccatggaggccatgctgctgtacctggccagccgtgtcggtgacaccaagcatggcatgatgaagttccgtgaggaccgcagcctcctgggcctgggcctgccctcaggtggcttccacgatcgctacttcatcctcaacagcagctgcttgcggctctacaaggaggtccggagtcaccggcctgagaaggagtggcctattaagagtctcaaagtctacctgggagtgaagaagaaactcaggccacccacctgctggggcttcacagtggtgcatgagacagagaaacatgagaagcagcagtggtacctctgctgtgacacacagatggagctccgggagtggttcgctacctttctgtttgtgcagcatgacggcctggtgtggccctcagagccctcacgcgtgtcccgggcagtgcctgaggtccggctgggtagtgtgtcactgatcccccttcgaggtagtgaaaatgaaatgcgccggagtgtggctgccttcaccgcggaccctctgtctcttctgcgcaacgtctgagcacaggagcccatccttggctctaggattccgccgctggaagccttctgttcagacaccccttatgctccaaggcctgatgtgagccagcggggggtgcatgggaaactgcaccccacaacccacatcctccatcctgactgcagcatggggttccccggcaggggtgggaggcagcaggggtcagcctgggcaggaacctctcccaactctgtccaggtgttcagacctcttggcccaacctgctcaccccaccgggttcactgtccttgtggggctggagagatgggcataagtcaggaacttgggaggaccaccaccctttcagaggcgtgaggccctggggccctgccggaagggagccccctgctcctcccaacaaactccagaacagcagaaagcgggtgctgtagaggagcactcagctcacggggagggagctcttggctgagcttctacagggctgagagctgcgctttggggacttcagccttccttccagtctgggctgagtggggggtccagactacctgatgccccttccccaatttggggactttttgataatataaatatatctgtatattttacccta

SEQ ID NO: 417429 - DNA, 4148 bp, Homo sapiens
tgcaaccttgggcttactcctctacccttctcctgcagtggagcggaaggagtggatgcaggccctgcagcaggccatggctgagcagcgtgcccgggcccggctctctagcgcttatctgctgggagttccaggctcagagcagcctgaccgcgctggcagcctggagcttcgtggcttcaagaataagctgtacgtggccgtggtcggggacaaagtgcagctctacaagaatctagaggtgctaaggggtcatggaacctctcccctgcccatgtccacctaccctgccccaggctgacctagggccttagccctgccttttctgttccctcttttcctgcactgggcccagccctttgcctggatatgtcctcgctcccccaagttctgaccacttcccccaggctctgagcactgccctccagtccctgccctggcccttgctcccccgcacctctgttcattgctgtgtgggccctgaacctgcagccccttaccctgcccagcctcccatgtcccctgctgtctccctcctgggcaccccccccagtccctgagttgcaccaccttcccttcctctccctgtcccaagcctcacgccctgcccccaaagccttgccctcatcccgtcccatctgccctccaggagtaccacctgggcattggcatcaccttcatcgacatgagcgtgggcaacgtgaaggaagtggaccggcgcagcttcgacctcaccacgccctaccgcatcttcagcttctctgctgactcagagctagagaaggagcagtggttggaggccatgcagggagccatcgctgaggccctgtctacctcggaggtggccgagcgcatctgggctgcagcccccaacaggttctgtgctgactgcggggctcctcagcctgactgggcctccatcaacctctgtgttgttatctgcaagcgctgtgcaggggagcaccgtggcctgggcgctggcgtctccaaggtgcggagcctgaagatggacaggaaggtgtggacagaaacacttatcgagctcttcttacagctggggaatggcgctgggaaccgcttctgggcagccaacgtgccccccagtgaggccctgcagcccagcagcagccccagcacccggcggtgccacctggaggccaagtaccgtgagggcaagtaccgccgctaccacccgctctttggcaaccaggaggagctggacaaggccctgtgtgctgcagtcaccaccacagacctggctgagacccaggcgctcctgggctgtggggctgggatcaactgcttctcgggggaccctgaggcccccacgcccctggctcttgcagagcaggcggggcagacgctgcagatggaattccttcggaacaaccggaccacagaggtgcctcggctggactcgatgaagcccctggaaaagcactactcagttgtcctgccgaccgtgagccacagtggcttcctctacaagactgcctctgccggcaagctgctacaggaccgccgggcccgggaagagttcagccggcgctggtgtgtccttggtgacggggtcctgagctactttgagaatgagcgggcagtgacccccaatggagagattcgggccagcgagattgtgtgcctggcagtgccccctcctgacacccatggctttgagcacacctttgaggtgtacacggagggagaacggctgtacctgtttgggctggagagtgcggagcaggctcatgagtgggtcaagtgtattgctaaggcattcgtgcctcccctagccgaggatctgctggcccgggattttgagcggctgggacgcctaccctacaaagctggcctgagcctacagcgggcccaggagggctggttctctctcagtggctcggagctccgtgctgtcttcccggaggggccctgcgaagagccgctgcaactacggaaactgcaggagctttccatccagggggacagtgagaaccaggtgctggtgctggtggagcgaaggaggacactgtacatacagggcgagcggcggctggacttcatgggttggctgggggccatccagaaagcagccgccagcatgggggacacgctgtcggagcagcagcttggggactcggatatcccggtgatcgtgtaccgctgtgtggactacatcacgcagtgcggcctgacctccgagggcatctaccgcaagtgtgggcagacatcgaagacacagcggctgctggagagcctgcggcaggatgcgcgctctgtgcacctcaaggagggcgagcagcacgtggatgatgtttcctcggcgctcaagcgcttcctgcgcgacctgcctgatgggctcttcactcgcgcccagcgcctaacctggctggaggcctcagagattgaggacgaggaggagaaggtctccaggtaccgagagctgctggtgcggctgccccctgtcaaccgggccacagtgaaggcccttatcagccacctgtactgtgttcagtgcttctcagacacgaaccagatgaacgtgcacaacctggcaattgtgtttgggcccacgctcttccagacagatgggcaggactacaaggctggccgtgtggtggaagacctcattaaccactatgtggtggtgtttagtgtggatgaggaagagctcaggaagcagcgggaggagatcactgccattgtgaagatgcgcgtggctggcactgccagtgggacccagcatgccggtgacttcatctgcacagtgtatctggaagagaagaaggcagagactgagcagcatatcaaggtcccagcatccatgactgctgaggagctcaccctggagatcctggatcgccggaacgtgggcatcagggagaaggactattggacctgctttgaggtcaacgagagggaggaggcagagcgccccctgcactttgcggagaaggtgctgcccatcctgcacgggctgggcacggacagccacctggtggtgaagaagcaccaggccatggaggccatgctgctgtacctggccagccgtgtcggtgacaccaagcatggcatgatgaagttccgtgaggaccgcagcctcctgggcctgggcctgccctcaggtggcttccacgatcgctacttcatcctcaacagcagctgcttgcggctctacaaggaggtccggagtcaccggcctgagaaggagtggcctattaagagtctcaaagtctacctgggagtgaagaagaaactcaggccacccacctgctggggcttcacagtggtgcatgagacagagaaacatgagaagcagcagtggtacctctgctgtgacacacagatggagctccgggagtggttcgctacctttctgtttgtgcagcatgacggcctggtgtggccctcagagccctcacgcgtgtcccgggcagtgcctgaggtccggctgggtagtgtgtcactgatcccccttcgaggtagtgaaaatgaaatgcgccggagtgtggctgccttcaccgcggaccctctgtctcttctgcgcaacgtctgagcacaggagcccatccttggctctaggattccgccgctggaagccttctgttcagacaccccttatgctccaaggcctgatgtgagccagcggggggtgcatgggaaactgcaccccacaacccacatcctccatcctgactgcagcatggggttccccggcaggggtgggaggcagcaggggtcagcctgggcaggaacctctcccaactctgtccaggtgttcagacctcttggcccaacctgctcaccccaccgggttcactgtccttgtggggctggagagatgggcataagtcaggaacttgggaggaccaccaccctttcagaggcgtgaggccctggggccctgccggaagggagccccctgctcctcccaacaaactccagaacagcagaaagcgggtgctgtagaggagcactcagctcacggggagggagctcttggctgagcttctacagggctgagagctgcgctttggggacttcagccttccttccagtctgggctgagtggggggtccagactacctgatgccccttccccaatttggggactttttgataatataaatatatctgtatattttacccta

SEQ ID NO: 417430 - DNA, 3977 bp, Homo sapiens
  misc_feature (49)..(49): n is a, c, g, or t
gccggtctgacctcttatgaggagtctcccctgagatatatgctgtttnccaaaaaaaaaaaaaaaaaaaagagaatgtgctactttgagtctgacttcagtcactcttgctgtaaagtccatcttcttgccagtggccatttgggattcttcctccctagaacctggctgatcctcactctgagtgtggcttctgagggctggggtggtcctggaacctgtcctcctacccccggtcatttgcttgttgtccctctccctctccagatcttacatctatcagaaacgatgggtgagactggatactgatcacctgcgatactttgacagtaacaaggacgcttactctaagcgctttatctctgtggcctgcatctcccacgtggctgccatcggggaccagaagtttgaagtgatcacaaacaaccgaacctttgccttccgggcagagagtgatgtggagcggaaggagtggatgcaggccctgcagcaggccatggctgagcagcgtgcccgggcccggctctctagcgcttatctgctgggagttccaggctcagagcagcctgaccgcgctggcagcctggagcttcgtggcttcaagaataagctgtacgtggccgtggtcggggacaaagtgcagctctacaagaatctagaggagtaccacctgggcattggcatcaccttcatcgacatgagcgtgggcaacgtgaaggaagtggaccggcgcagcttcgacctcaccacgccctaccgcatcttcagcttctctgctgactcagagctagagaaggagcagtggttggaggccatgcagggagccatcgctgaggccctgtctacctcggaggtggccgagcgcatctgggctgcagcccccaacaggttctgtgctgactgcggggctcctcagcctgactgggcctccatcaacctctgtgttgttatctgcaagcgctgtgcaggggagcaccgtggcctgggcgctggcgtctccaaggtgcggagcctgaagatggacaggaaggtgtggacagaaacacttatcgaggccctgtgtgctgcagtcaccaccacagacctggctgagacccaggcgctcctgggctgtggggctgggatcaactgcttctcgggggaccctgaggcccccacgcccctggctcttgcagagcaggcggggcagacgctgcagatggaattccttcggaacaaccggaccacagaggtgcctcggctggactcgatgaagcccctggaaaagcactactcagttgtcctgccgaccgtgagccacagtggcttcctctacaagactgcctctgccggcaagctgctacaggaccgccgggcccgggaagagttcagccggcgctggtgtgtccttggtgacggggtcctgagctactttgagaatgagcgggcagtgacccccaatggagagattcgggccagcgagattgtgtgcctggcagtgccccctcctgacacccatggctttgagcacacctttgaggtgtacacggagggagaacggctgtacctgtttgggctggagagtgcggagcaggctcatgagtgggtcaagtgtattgctaaggcattcgtgcctcccctagccgaggatctgctggcccgggattttgagcggctgggacgcctaccctacaaagctggcctgagcctacagcgggcccaggagggctggttctctctcagtggctcggagctccgtgctgtcttcccggaggggccctgcgaagagccgctgcaactacggaaactgcaggagctttccatccagggggacagtgagaaccaggtgctggtgctggtggagcgaaggaggacactgtacatacagggcgagcggcggctggacttcatgggttggctgggggccatccagaaagcagccgccagcatgggggacacgctgtcggagcagcagcttggggactcggatatcccggtgatcgtgtaccgctgtgtggactacatcacgcagtgcggcctgacctccgagggcatctaccgcaagtgtgggcagacatcgaagacacagcggctgctggagagcctgcggcaggatgcgcgctctgtgcacctcaaggagggcgagcagcacgtggatgatgtttcctcggcgctcaagcgcttcctgcgcgacctgcctgatgggctcttcactcgcgcccagcgcctaacctggctggaggcctcagagattgaggacgaggaggagaaggtctccaggtaccgagagctgctggtgcggctgccccctgtcaaccgggccacagtgaaggcccttatcagccacctgtactgtgttcagtgcttctcagacacgaaccagatgaacgtgcacaacctggcaattgtgtttgggcccacgctcttccagacagatgggcaggactacaaggctggccgtgtggtggaagacctcattaaccactatgtggtggtgtttagtgtggatgaggaagagctcaggaagcagcgggaggagatcactgccattgtgaagatgcgcgtggctggcactgccagtgggacccagcatgccggtgacttcatctgcacagtgtatctggaagagaagaaggcagagactgagcagcatatcaaggtcccagcatccatgactgctgaggagctcaccctggagatcctggatcgccggaacgtgggcatcagggagaaggactattggacctgctttgaggtcaacgagagggaggaggcagagcgccccctgcactttgcggagaaggtgctgcccatcctgcacgggctgggcacggacagccacctggtggtgaagaagcaccaggccatggaggccatgctgctgtacctggccagccgtgtcggtgacaccaagcatggcatgatgaagttccgtgaggaccgcagcctcctgggcctgggcctgccctcaggtggcttccacgatcgctacttcatcctcaacagcagctgcttgcggctctacaaggaggtccggagtcaccggcctgagaaggagtggcctattaagagtctcaaagtctacctgggagtgaagaagaaactcaggccacccacctgctggggcttcacagtggtgcatgagacagagaaacatgagaagcagcagtggtacctctgctgtgacacacagatggagctccgggagtggttcgctacctttctgtttgtgcagcatgacggcctggtgtggccctcagagccctcacgcgtgtcccgggcagtgcctgaggtccggctgggtagtgtgtcactgatcccccttcgaggtagtgaaaatgaaatgcgccggagtgtggctgccttcaccgcggaccctctgtctcttctgcgcaacgtctgagcacaggagcccatccttggctctaggattccgccgctggaagccttctgttcagacaccccttatgctccaaggcctgatgtgagccagcggggggtgcatgggaaactgcaccccacaacccacatcctccatcctgactgcagcatggggttccccggcaggggtgggaggcagcaggggtcagcctgggcaggaacctctcccaactctgtccaggtgttcagacctcttggcccaacctgctcaccccaccgggttcactgtccttgtggggctggagagatgggcataagtcaggaacttgggaggaccaccaccctttcagaggcgtgaggccctggggccctgccggaagggagccccctgctcctcccaacaaactccagaacagcagaaagcgggtgctgtagaggagcactcagctcacggggagggagctcttggctgagcttctacagggctgagagctgcgctttggggacttcagccttccttccagtctgggctgagtggggggtccagactacctgatgccccttccccaatttggggactttttgataatataaatatatctgtatattttacccta

SEQ ID NO: 417431 - DNA, 2949 bp, Homo sapiens
ctgaggatggactgctccaggcctgggccctgtgtgctgcagtcaccaccacagacctggctgagacccaggcgctcctgggctgtggggctgggatcaactgcttctcgggggaccctgaggcccccacgcccctggctcttgcagagcaggcggggcagacgctgcagatggaattccttcggaacaaccggaccacagaggtgcctcggctggactcgatgaagcccctggaaaagcactactcagttgtcctgccgaccgtgagccacagtggcttcctctacaagactgcctctgccggcaagctgctacaggaccgccgggcccgggaagagttcagccggcgctggtgtgtccttggtgacggggtcctgagctactttgagaatgagcgggcagtgacccccaatggagagattcgggccagcgagattgtgtgcctggcagtgccccctcctgacacccatggctttgagcacacctttgaggtgtacacggagggagaacggctgtacctgtttgggctggagagtgcggagcaggctcatgagtgggtcaagtgtattgctaaggcattcgtgcctcccctagccgaggatctgctggcccgggattttgagcggctgggacgcctaccctacaaagctggcctgagcctacagcgggcccaggagggctggttctctctcagtggctcggagctccgtgctgtcttcccggaggggccctgcgaagagccgctgcaactacggaaactgcaggagctttccatccagggggacagtgagaaccaggtgctggtgctggtggagcgaaggaggacactgtacatacagggcgagcggcggctggacttcatgggttggctgggggccatccagaaagcagccgccagcatgggggacacgctgtcggagcagcagcttggggactcggatatcccggtgatcgtgtaccgctgtgtggactacatcacgcagtgcggcctgacctccgagggcatctaccgcaagtgtgggcagacatcgaagacacagcggctgctggagagcctgcggcaggatgcgcgctctgtgcacctcaaggagggcgagcagcacgtggatgatgtttcctcggcgctcaagcgcttcctgcgcgacctgcctgatgggctcttcactcgcgcccagcgcctaacctggctggaggcctcagagattgaggacgaggaggagaaggtctccaggtaccgagagctgctggtgcggctgccccctgtcaaccgggccacagtgaaggcccttatcagccacctgtactgtgttcagtgcttctcagacacgaaccagatgaacgtgcacaacctggcaattgtgtttgggcccacgctcttccagacagatgggcaggactacaaggctggccgtgtggtggaagacctcattaaccactatgtggtggtgtttagtgtggatgaggaagagctcaggaagcagcgggaggagatcactgccattgtgaagatgcgcgtggctggcactgccagtgggacccagcatgccggtgacttcatctgcacagtgtatctggaagagaagaaggcagagactgagcagcatatcaaggtcccagcatccatgactgctgaggagctcaccctggagatcctggatcgccggaacgtgggcatcagggagaaggactattggacctgctttgaggtcaacgagagggaggaggcagagcgccccctgcactttgcggagaaggtgctgcccatcctgcacgggctgggcacggacagccacctggtggtgaagaagcaccaggccatggaggccatgctgctgtacctggccagccgtgtcggtgacaccaagcatggcatgatgaagttccgtgaggaccgcagcctcctgggcctgggcctgccctcaggtggcttccacgatcgctacttcatcctcaacagcagctgcttgcggctctacaaggaggtccggagtcaccggcctgagaaggagtggcctattaagagtctcaaagtctacctgggagtgaagaagaaactcaggccacccacctgctggggcttcacagtggtgcatgagacagagaaacatgagaagcagcagtggtacctctgctgtgacacacagatggagctccgggagtggttcgctacctttctgtttgtgcagcatgacggcctggtgtggccctcagagccctcacgcgtgtcccgggcagtgcctgaggtccggctgggtagtgtgtcactgatcccccttcgaggtagtgaaaatgaaatgcgccggagtgtggctgccttcaccgcggaccctctgtctcttctgcgcaacgtctgagcacaggagcccatccttggctctaggattccgccgctggaagccttctgttcagacaccccttatgctccaaggcctgatgtgagccagcggggggtgcatgggaaactgcaccccacaacccacatcctccatcctgactgcagcatggggttccccggcaggggtgggaggcagcaggggtcagcctgggcaggaacctctcccaactctgtccaggtgttcagacctcttggcccaacctgctcaccccaccgggttcactgtccttgtggggctggagagatgggcataagtcaggaacttgggaggaccaccaccctttcagaggcgtgaggccctggggccctgccggaagggagccccctgctcctcccaacaaactccagaacagcagaaagcgggtgctgtagaggagcactcagctcacggggagggagctcttggctgagcttctacagggctgagagctgcgctttggggacttcagccttccttccagtctgggctgagtggggggtccagactacctgatgccccttccccaatttggggactttttgataatataaatatatctgtatattttacccta

SEQ ID NO: 417432 - DNA, 2369 bp, Homo sapiens
cacgaggccgtgctgtcttcccggaggggccctgcgaagagccgctgagagagaaccagccctcctgggcccgctgtaggctcaggccagctttgtaggctggttctctctcagtggctcggagctccgtgctgtcttcccggaggggccctgcgaagagccgctgcaactacggaaactgcaggagctttccatccagggggacagtgagaaccaggtgctggtgctggtggagcgaaggaggacactgtacatacagggcgagcggcggctggacttcatgggttggctgggggccatccagaaagcagccgccagcatgggggacacgctgtcggagcagcagcttggggactcggatatcccggtgatcgtgtaccgctgtgtggactacatcacgcagtgcggcctgacctccgagggcatctaccgcaagtgtgggcagacatcgaagacacagcggctgctggagagcctgcggcaggatgcgcgctctgtgcacctcaaggagggcgagcagcacgtggatgatgtttcctcggcgctcaagcgcttcctgcgcgacctgcctgatgggctcttcactcgcgcccagcgcctaacctggctggaggcctcagagattgaggacgaggaggagaaggtctccaggtaccgagagctgctggtgcggctgccccctgtcaaccgggccacagtgaaggcccttatcagccacctgtactgtgttcagtgcttctcagacacgaaccagatgaacgtgcacaacctggcaattgtgtttgggcccacgctcttccagacagatgggcaggactacaaggctggccgtgtggtggaagacctcattaaccactatgtggtggtgtttagtgtggatgaggaagagctcaggaagcagcgggaggagatcactgccattgtgaagatgcgcgtggctggcactgccagtgggacccagcatgccggtgacttcatctgcacagtgtatctggaagagaagaaggcagagactgagcagcatatcaaggtcccagcatccatgactgctgaggagctcaccctggagatcctggatcgccggaacgtgggcatcagggagaaggactattggacctgctttgaggtcaacgagagggaggaggcagagcgccccctgcactttgcggagaaggtgctgcccatcctgcacgggctgggcacggacagccacctggtggtgaagaagcaccaggccatggaggccatgctgctgtacctggccagccgtgtcggtgacaccaagcatggcatgatgaagttccgtgaggaccgcagcctcctgggcctgggcctgccctcaggtggcttccacgatcgctacttcatcctcaacagcagctgcttgcggctctacaaggaggtccggagtcaccggcctgagaaggagtggcctattaagagtctcaaagtctacctgggagtgaagaagaaactcaggccacccacctgctggggcttcacagtggtgcatgagacagagaaacatgagaagcagcagtggtacctctgctgtgacacacagatggagctccgggagtggttcgctacctttctgtttgtgcagcatgacggcctggtgtggccctcagagccctcacgcgtgtcccgggcagtgcctgaggtccggctgggtagtgtgtcactgatcccccttcgaggtagtgaaaatgaaatgcgccggagtgtggctgccttcaccgcggaccctctgtctcttctgcgcaacgtctgagcacaggagcccatccttggctctaggattccgccgctggaagccttctgttcagacaccccttatgctccaaggcctgatgtgagccagcggggggtgcatgggaaactgcaccccacaacccacatcctccatcctgactgcagcatggggttccccggcaggggtgggaggcagcaggggtcagcctgggcaggaacctctcccaactctgtccaggtgttcagacctcttggcccaacctgctcaccccaccgggttcactgtccttgtggggctggagagatgggcataagtcaggaacttgggaggaccaccaccctttcagaggcgtgaggccctggggccctgccggaagggagccccctgctcctcccaacaaactccagaacagcagaaagcgggtgctgtagaggagcactcagctcacggggagggagctcttggctgagcttctacagggctgagagctgcgctttggggacttcagccttccttccagtctgggctgagtggggggtccagactacctgatgccccttccccaatttggggactttttgataatataaatatatctgtatattttacccta

SEQ ID NO: 417433 - DNA, 4249 bp, Homo sapiens
  misc_feature (49)..(49): n is a, c, g, or t
gccggtctgacctcttatgaggagtctcccctgagatatatgctgtttnccaaaaaaaaaaaaaaaaaaaagagaatgtgctactttgagtctgacttcagtcactcttgctgtaaagtccatcttcttgccagtggccatttgggattcttcctccctagaacctggctgatcctcactctgagtgtggcttctgagggctggggtggtcctggaacctgtcctcctacccccggtcatttgcttgttgtccctctccctctccagatcttacatctatcagaaacgatgggtgagactggatactgatcacctgcgatactttgacagtaacaaggacgcttactctaagcgctttatctctgtggcctgcatctcccacgtggctgccatcggggaccagaagtttgaagtgatcacaaacaaccgaacctttgccttccgggcagagagtgatgtggagcggaaggagtggatgcaggccctgcagcaggccatggctgagcagcgtgcccgggcccggctctctagcgcttatctgctgggagttccaggctcagagcagcctgaccgcgctggcagcctggagcttcgtggcttcaagaataagctgtacgtggccgtggtcggggacaaagtgcagctctacaagaatctagaggagtaccacctgggcattggcatcaccttcatcgacatgagcgtgggcaacgtgaaggaagtggaccggcgcagcttcgacctcaccacgccctaccgcatcttcagcttctctgctgactcagagctagagaaggagcagtggttggaggccatgcagggagccatcgctgaggccctgtctacctcggaggtggccgagcgcatctgggctgcagcccccaacaggttctgtgctgactgcggggctcctcagcctgactgggcctccatcaacctctgtgttgttatctgcaagcgctgtgcaggggagcaccgtggcctgggcgctggcgtctccaaggtgcggagcctgaagatggacaggaaggtgtggacagaaacacttatcgagctcttcttacagctggggaatggcgctgggaaccgcttctgggcagccaacgtgccccccagtgaggccctgcagcccagcagcagccccagcacccggcggtgccacctggaggccaagtaccgtgagggcaagtaccgccgctaccacccgctctttggcaaccaggaggagctggacaaggccctgtgtgctgcagtcaccaccacagacctggctgagacccaggcgctcctgggctgtggggctgggatcaactgcttctcgggggaccctgaggcccccacgcccctggctcttgcagagcaggcggggcagacgctgcagatggaattccttcggaacaaccggaccacagaggtgcctcggctggactcgatgaagcccctggaaaagcactactcagttgtcctgccgaccgtgagccacagtggcttcctctacaagactgcctctgccggcaagctgctacaggaccgccgggcccgggaagagttcagccggcgctggtgtgtccttggtgacggggtcctgagctactttgagaatgagcgggcagtgacccccaatggagagattcgggccagcgagattgtgtgcctggcagtgccccctcctgacacccatggctttgagcacacctttgaggtgtacacggagggagaacggctgtacctgtttgggctggagagtgcggagcaggctcatgagtgggtcaagtgtattgctaaggcattcgtgcctcccctagccgaggatctgctggcccgggattttgagcggctgggacgcctaccctacaaagctggcctgagcctacagcgggcccaggagggctggttctctctcagtggctcggagctccgtgctgtcttcccggaggggccctgcgaagagccgctgcaactacggaaactgcaggagctttccatccagggggacagtgagaaccaggtgctggtgctggtggagcgaaggaggacactgtacatacagggcgagcggcggctggacttcatgggttggctgggggccatccagaaagcagccgccagcatgggggacacgctgtcggagcagcagcttggggactcggatatcccggtgatcgtgtaccgctgtgtggactacatcacgcagtgcggcctgacctccgagggcatctaccgcaagtgtgggcagacatcgaagacacagcggctgctggagagcctgcggcaggatgcgcgctctgtgcacctcaaggagggcgagcagcacgtggatgatgtttcctcggcgctcaagcgcttcctgcgcgacctgcctgatgggctcttcactcgcgcccagcgcctaacctggctggaggcctcagagattgaggacgaggaggagaaggtctccaggtaccgagagctgctggtgcggctgccccctgtcaaccgggccacagtgaaggcccttatcagccacctgtactgtgttcagtgcttctcagacacgaaccagatgaacgtgcacaacctggcaattgtgtttgggcccacgctcttccagacagatgggcaggactacaaggctggccgtgtggtggaagacctcattaaccactatgtggtggtgtttagtgtgcgtccctggccagtgggcagtggagggcaggggtgatccttgcagatgacggtgaccacctgtccctgcctctcgccccttcccaggtggatgaggaagagctcaggaagcagcgggaggagatcactgccattgtgaagatgcgcgtggctggcactgccagtgggacccagcatgccggtgacttcatctgcacagtgtatctggaagagaagaaggcagagactgagcagcatatcaaggtcccagcatccatgactgctgaggagctcaccctggagatcctggatcgccggaacgtgggcatcagggagaaggactattggacctgctttgaggtcaacgagagggaggaggcagagcgccccctgcactttgcggagaaggtgctgcccatcctgcacgggctgggcacggacagccacctggtggtgaagaagcaccaggccatggaggccatgctgctgtacctggccagccgtgtcggtgacaccaagcatggcatgatgaagttccgtgaggaccgcagcctcctgggcctgggcctgccctcaggtggcttccacgatcgctacttcatcctcaacagcagctgcttgcggctctacaaggaggtccggagtcaccggcctgagaaggagtggcctattaagagtctcaaagtctacctgggagtgaagaagaaactcaggccacccacctgctggggcttcacagtggtgcatgagacagagaaacatgagaagcagcagtggtacctctgctgtgacacacagatggagctccgggagtggttcgctacctttctgtttgtgcagcatgacggcctggtgtggccctcagagccctcacgcgtgtcccgggcagtgcctgaggtccggctgggtagtgtgtcactgatcccccttcgaggtagtgaaaatgaaatgcgccggagtgtggctgccttcaccgcggaccctctgtctcttctgcgcaacgtctgagcacaggagcccatccttggctctaggattccgccgctggaagccttctgttcagacaccccttatgctccaaggcctgatgtgagccagcggggggtgcatgggaaactgcaccccacaacccacatcctccatcctgactgcagcatggggttccccggcaggggtgggaggcagcaggggtcagcctgggcaggaacctctcccaactctgtccaggtgttcagacctcttggcccaacctgctcaccccaccgggttcactgtccttgtggggctggagagatgggcataagtcaggaacttgggaggaccaccaccctttcagaggcgtgaggccctggggccctgccggaagggagccccctgctcctcccaacaaactccagaacagcagaaagcgggtgctgtagaggagcactcagctcacggggagggagctcttggctgagcttctacagggctgagagctgcgctttggggacttcagccttccttccagtctgggctgagtggggggtccagactacctgatgccccttccccaatttggggactttttgataatataaatatatctgtatattttacccta

SEQ ID NO: 417434 - DNA, 5290 bp, Homo sapiens
  misc_feature (1)..(1): n is a, c, g, or t
ngcctgtcagggtgttgtgggggtgcccagctgcctgtcagaccctgaggactaccagacagagagtgggcagccatttcccgggaggcttccccttcccccacctcactctcttgccatacgggggtcaggagtcacgtgtagccacagcgctctgggccaggggtcggggctctggtgtggctcccccaggccctggctgtatgtgggtgggcatgtggcctccccccaccctgtgtgttaggaactcgtgtcctgtcccggagtgtctgtctctgtttcacttcttgtgttcccgtgtctgtctgtcttgcatccctagcccgcagtctttttctctgtccctttatctttctgtttttgtctgtgtcctaggtcggtttctgccactggctctcctgtccctgtgatctgggtctctgtgtggtctccgctggcagggggaggggagtgtgaggaaacagaactaaaagtgctgggctgtgtgggtcggggctgtgtggacagagggggcgtggcagccccgggtgggtgtgatctgtggcttgaagggaaggatgacgctgagtgggtctcgggggcaggaggagcccccaccgagccgagtcccacgggccgtgcgcgtggccagtctgctgagcgagggagaggaactgtctggggacgaccaaggggatgaggaagaggatgaccacgcctatgagggcgtccccaatggcggatggcataccagcagcctgagcttgtccttgcccagcacaatagctgcgccacaccccatggacgggccgcctgggggctccacccccgtcacaccagtcatcaaggctggctggctggacaagaacccaccgcagggatcttacatctatcagaaacgatgggtgagactggatactgatcacctgcgatactttgacagtaacaaggacgcttactctaagcgctttatctctgtggcctgcatctcccacgtggctgccatcggggaccagaagtttgaagtgatcacaaacaaccgaacctttgccttccgggcagagagtgatgtggagcggaaggagtggatgcaggccctgcagcaggccatggctgagcagcgtgcccgggcccggctctctagcgcttatctgctgggagttccaggctcagagcagcctgaccgcgctggcagcctggagcttcgtggcttcaagaataagctgtacgtggccgtggtcggggacaaagtgcagctctacaagaatctagaggagtaccacctgggcattggcatcaccttcatcgacatgagcgtgggcaacgtgaaggaagtggaccggcgcagcttcgacctcaccacgccctaccgcatcttcagcttctctgctgactcagagctagagaaggagcagtggttggaggccatgcagggagccatcgctgaggccctgtctacctcggaggtggccgagcgcatctgggctgcagcccccaacaggttctgtgctgactgcggggctcctcagcctgactgggcctccatcaacctctgtgttgttatctgcaagcgctgtgcaggggagcaccgtggcctgggcgctggcgtctccaaggtgcggagcctgaagatggacaggaaggtgtggacagaaacacttatcgagctcttcttacagctggggaatggcgctgggaaccgcttctgggcagccaacgtgccccccagtgaggccctgcagcccagcagcagccccagcacccggcggtgccacctggaggccaagtaccgtgagggcaagtaccgccgctaccacccgctctttggcaaccaggaggagctggacaaggccctgtgtgctgcagtcaccaccacagacctggctgagacccaggcgctcctgggctgtggggctgggatcaactgcttctcgggggaccctgaggcccccacgcccctggctcttgcagagcaggcggggcagacgctgcagatggaattccttcggaacaaccggaccacagaggtgcctcggctggactcgatgaagcccctggaaaagcactactcagttgtcctgccgaccgtgagccacagtggcttcctctacaagactgcctctgccggcaagctgctacaggaccgccgggcccgggaagagttcagccggcgctggtgtgtccttggtgacggggtcctgagctactttgagaatgagcgggcagtgacccccaatggagagattcgggccagcgagattgtgtgcctggcagtgccccctcctgacacccatggctttgagcacacctttgaggtgtacacggagggagaacggctgtacctgtttgggctggagagtgcggagcaggctcatgagtgggtcaagtgtattgctaaggcattcgtgcctcccctagccgaggatctgctggcccgggattttgagcggctgggacgcctaccctacaaagctggcctgagcctacagcgggcccaggagggctggttctctctcagtggctcggagctccgtgctgtcttcccggaggggccctgcgaagagccgctgcaactacggaaactgcaggagctttccatccagggggacagtgagaaccaggtgctggtgctggtggagcgaaggaggacactgtacatacagggcgagcggcggctggacttcatgggttggctgggggccatccagaaagcagccgccagcatgggggacacgctgtcggagcagcagcttggggactcggatatcccggtgatcgtgtaccgctgtgtggactacatcacgcagtgcggcctgacctccgagggcatctaccgcaagtgtgggcagacatcgaagacacagcggctgctggagagcctgcggcaggatgcgcgctctgtgcacctcaaggagggcgagcagcacgtggatgatgtttcctcggcgctcaagcgcttcctgcgcgacctgcctgatgggctcttcactcgcgcccagcgcctaacctggctggaggcctcagagattgaggacgaggaggagaaggtctccaggtaccgagagctgctggtgcggctgccccctgtcaaccgggccacagtgaaggcccttatcagccacctgtactgtgttcagtgcttctcagacacgaaccagatgaacgtgcacaacctggcaattgtgtttgggcccacgctcttccagacagatgggcaggactacaaggctggccgtgtggtggaagacctcattaaccactatgtggtggtgtttagtgtggatgaggaagagctcaggaagcagcgggaggagatcactgccattgtgaagatgcgcgtggctggcactgccagtgggacccagcatgccggtgacttcatctgcacagtgtatctggaagagaagaaggcagagactgagcagcatatcaaggtcccagcatccatgactgctgaggagctcaccctggagatcctggatcgccggaacgtgggcatcagggagaaggactattggacctgctttgaggtcaacgagagggaggaggcagagcgccccctgcactttgcggagaaggtgctgcccatcctgcacgggctgggcacggacagccacctggtggtgaagaagcaccaggccatggaggccatgctgctgtacctggccagccgtgtcggtgacaccaagcatggcatgatgaagttccgtgaggaccgcagcctcctgggcctgggcctgccctcaggtggcttccacgatcgctacttcatcctcaacagcagctgcttgcggctctacaaggaggtccggagccagaggccgtggagcggggcccctgagaccagtcaccggcctgagaaggagtggcctattaagagtctcaaagtctacctgggagtgaagaagaaactcaggccacccacctgctggggcttcacagtggtgcatgagacagagaaacatgagaagcagcagtggtacctctgctgtgacacacagatggagctccgggagtggttcgctacctttctgtttgtgcagcatgacggcctggtgtggccctcagagccctcacgcgtgtcccgggcagtgcctgaggtccggctgggtagtgtgtcactgatcccccttcgaggtagtgaaaatgaaatgcgccggagtgtggctgccttcaccgcggaccctctgtctcttctgcgcaacgtctgagcacaggagcccatccttggctctaggattccgccgctggaagccttctgttcagacaccccttatgctccaaggcctgatgtgagccagcggggggtgcatgggaaactgcaccccacaacccacatcctccatcctgactgcagcatggggttccccggcaggggtgggaggcagcaggggtcagcctgggcaggaacctctcccaactctgtccaggtgttcagacctcttggcccaacctgctcaccccaccgggttcactgtccttgtggggctggagagatgggcataagtcaggaacttgggaggaccaccaccctttcagaggcgtgaggccctggggccctgccggaagggagccccctgctcctcccaacaaactccagaacagcagaaagcgggtgctgtagaggagcactcagctcacggggagggagctcttggctgagcttctacagggctgagagctgcgctttggggacttcagccttccttccagtctgggctgagtggggggtccagactacctgatgccccttccccaatttggggactttttgataatataaatatatctgtatattttaccctaaaaaaaaaaaagaacaaaacgaagaaaccaacaaaacaccgcgggcgctcctcttgtccgggcgggggacaacaaagggcggcttggcactcgccccggggcctacacatgggggtttccgcgaccccactttttttgtcccaccggggggacaatccgggggcccccccaaatagggggccggaataaattgcgaaaagcccgggttacctgctttagggtctccggggccaaagtgatacaactaaaggccgaacgaactacgcggagcactgacaggggtgcatcacatctgggaacagaaacacatggttcgagcaaccgtctacgactacagctactcgaaacacaccttaccccgcacgccatacacctgactcgcgaggccgactgcatatcacctcgagtactcacgcgagcaggaagatcactacccatgctagacatcagcgcagccctagagagcgccacggacgaagccataactcacagcacactgcggcca

SEQ ID NO: 417435 - DNA, 2317 bp, Homo sapiens
aaaaaatattactaagcgagcgaggcccgcgtgttaaattaccttcaatagggctgaggcgatcgaggtatatatacatggggccgcggggacgacgaattctatcaaaagtggcacagttgatccaaacgacgtgtactccggtggactcacatggtatgcgtatagtaacagacgatgtgtagcatcatcggcgggctatccgcgtatagttgaggtctcttttagtttgtcgtagtaaggccatgtaaaacatgcaatcgatgcatgggggacacgctgtcggagcagcagcttggggactcggatatcccggtgatcgtgtaccgctgtgtggactacatcacgcagtgcggcctgacctccgagggcatctaccgcaagtgtgggcagacatcgaagacacagcggctgctggagagcctgcggcaggatgcgcgctctgtgcacctcaaggagggcgagcagcacgtggatgatgtttcctcggcgctcaagcgcttcctgcgcgacctgcctgatgggctcttcactcgcgcccagcgcctaacctggctggaggcctcagagattgaggacgaggaggagaaggtctccaggtaccgagagctgctggtgcggctgccccctgtcaaccgggccacagtgaaggcccttatcagccacctgtactgtgttcagtgcttctcagacacgaaccagatgaacgtgcacaacctggcaattgtgtttgggcccacgctcttccagacagatgggcaggactacaaggctggccgtgtggtggaagacctcattaaccactatgtggtggtgtttagtgtggatgaggaagagctcaggaagcagcgggaggagatcactgccattgtgaagatgcgcgtggctggcactgccagtgggacccagcatgccggtgacttcatctgcacagtgtatctggaagagaagaaggcagagactgagcagcatatcaaggtcccagcatccatgactgctgaggagctcaccctggagatcctggatcgccggaacgtgggcatcagggagaaggactattggacctgctttgaggtcaacgagagggaggaggcagagcgccccctgcactttgcggagaaggtgctgcccatcctgcacgggctgggcacggacagccacctggtggtgaagaagcaccaggccatggaggccatgctgctgtacctggccagccgtgtcggtgacaccaagcatggcatgatgaagttccgtgaggaccgcagcctcctgggcctgggcctgccctcaggtggcttccacgatcgctacttcatcctcaacagcagctgcttgcggctctacaaggaggtccggagtcaccggcctgagaaggagtggcctattaagagtctcaaagtctacctgggagtgaagaagaaactcaggccacccacctgctggggcttcacagtggtgcatgagacagagaaacatgagaagcagcagtggtacctctgctgtgacacacagatggagctccgggagtggttcgctacctttctgtttgtgcagcatgacggcctggtgtggccctcagagccctcacgcgtgtcccgggcagtgcctgaggtccggctgggtagtgtgtcactgatcccccttcgaggtagtgaaaatgaaatgcgccggagtgtggctgccttcaccgcggaccctctgtctcttctgcgcaacgtctgagcacaggagcccatccttggctctaggattccgccgctggaagccttctgttcagacaccccttatgctccaaggcctgatgtgagccagcggggggtgcatgggaaactgcaccccacaacccacatcctccatcctgactgcagcatggggttccccggcaggggtgggaggcagcaggggtcagcctgggcaggaacctctcccaactctgtccaggtgttcagacctcttggcccaacctgctcaccccaccgggttcactgtccttgtggggctggagagatgggcataagtcaggaacttgggaggaccaccaccctttcagaggcgtgaggccctggggccctgccggaagggagccccctgctcctcccaacaaactccagaacagcagaaagcgggtgctgtagaggagcactcagctcacggggagggagctcttggctgagcttctacagggctgagagctgcgctttggggacttcagccttccttccagtctgggctgagtggggggtccagactacctgatgccccttccccaatttggggactttttgataatataaatatatctgtatattttacccta

SEQ ID NO: 417436 - DNA, 5102 bp, Homo sapiens
  misc_feature (1)..(1): n is a, c, g, or t
ngcctgtcagggtgttgtgggggtgcccagctgcctgtcagaccctgaggactaccagacagagagtgggcagccatttcccgggaggcttccccttcccccacctcactctcttgccatacgggggtcaggagtcacgtgtagccacagcgctctgggccaggggtcggggctctggtgtggctcccccaggccctggctgtatgtgggtgggcatgtggcctccccccaccctgtgtgttaggaactcgtgtcctgtcccggagtgtctgtctctgtttcacttcttgtgttcccgtgtctgtctgtcttgcatccctagcccgcagtctttttctctgtccctttatctttctgtttttgtctgtgtcctaggtcggtttctgccactggctctcctgtccctgtgatctgggtctctgtgtggtctccgctggcagggggaggggagtgtgaggaaacagaactaaaagtgctgggctgtgtgggtcggggctgtgtggacagagggggcgtggcagccccgggtgggtgtgatctgtggcttgaagggaaggatgacgctgagtgggtctcgggggcaggaggagcccccaccgagccgagtcccacgggccgtgcgcgtggccagtctgctgagcgagggagaggaactgtctggggacgaccaaggggatgaggaagaggatgaccacgcctatgagggcgtccccaatggcggatggcataccagcagcctgagcttgtccttgcccagcacaatagctgcgccacaccccatggacgggccgcctgggggctccacccccgtcacaccagtcatcaaggctggctggctggacaagaacccaccgcagggatcttacatctatcagaaacgatgggtgagactggatactgatcacctgcgatactttgacagtaacaaggacgcttactctaagcgctttatctctgtggcctgcatctcccacgtggctgccatcggggaccagaagtttgaagtgatcacaaacaaccgaacctttgccttccgggcagagagtgatgtggagcggaaggagtggatgcaggccctgcagcaggccatggctgagcagcgtgcccgggcccggctctctagcgcttatctgctgggagttccaggctcagagcagcctgaccgcgctggcagcctggagcttcgtggcttcaagaataagctgtacgtggccgtggtcggggacaaagtgcagctctacaagaatctagaggagtaccacctgggcattggcatcaccttcatcgacatgagcgtgggcaacgtgaaggaagtggaccggcgcagcttcgacctcaccacgccctaccgcatcttcagcttctctgctgactcagagctagagaaggagcagtggttggaggccatgcagggagccatcgctgaggccctgtctacctcggaggtggccgagcgcatctgggctgcagcccccaacaggttctgtgctgactgcggggctcctcagcctgactgggcctccatcaacctctgtgttgttatctgcaagcgctgtgcaggggagcaccgtggcctgggcgctggcgtctccaaggtgcggagcctgaagatggacaggaaggtgtggacagaaacacttatcgagctcttcttacagctggggaatggcgctgggaaccgcttctgggcagccaacgtgccccccagtgaggccctgcagcccagcagcagccccagcacccggcggtgccacctggaggccaagtaccgtgagggcaagtaccgccgctaccacccgctctttggcaaccaggaggagctggacaaggccctgtgtgctgcagtcaccaccacagacctggctgagacccaggcgctcctgggctgtggggctgggatcaactgcttctcgggggaccctgaggcccccacgcccctggctcttgcagagcaggcggggcagacgctgcagatggaattccttcggaacaaccggaccacagaggtgcctcggctggactcgatgaagcccctggaaaagcactactcagttgtcctgccgaccgtgagccacagtggcttcctctacaagactgcctctgccggcaagctgctacaggaccgccgggcccgggaagagttcagccggcgctggtgtgtccttggtgacggggtcctgagctactttgagaatgagcgggcagtgacccccaatggagagattcgggccagcgagattgtgtgcctggcagtgccccctcctgacacccatggctttgagcacacctttgaggtgtacacggagggagaacggctgtacctgtttgggctggagagtgcggagcaggctcatgagtgggtcaagtgtattgctaaggcattcgtgcctcccctagccgaggatctgctggcccgggattttgagcggctgggacgcctaccctacaaagctggcctgagcctacagcgggcccaggagggctggttctctctcagtggctcggagctccgtgctgtcttcccggaggggccctgcgaagagccgctgcaactacggaaactgcaggagctttccatccagggggacagtgagaaccaggtgctggtgctggtggagcgaaggaggacactgtacatacagggcgagcggcggctggacttcatgggttggctgggggccatccagaaagcagccgccagcatgggggacacgctgtcggagcagcagcttggggactcggatatcccggtgatcgtgtaccgctgtgtggactacatcacgcagtgcggcctgacctccgagggcatctaccgcaagtgtgggcagacatcgaagacacagcggctgctggagagcctgcggcaggatgcgcgctctgtgcacctcaaggagggcgagcagcacgtggatgatgtttcctcggcgctcaagcgcttcctgcgcgacctgcctgatgggctcttcactcgcgcccagcgcctaacctggctggaggcctcagagattgaggacgaggaggagaaggtctccaggtaccgagagctgctggtgcggctgccccctgtcaaccgggccacagtgaaggcccttatcagccacctgtactgtgttcagtgcttctcagacacgaaccagatgaacgtgcacaacctggcaattgtgtttgggcccacgctcttccagacagatgggcaggactacaaggctggccgtgtggtggaagacctcattaaccactatgtggtggtgtttagtgtggatgaggaagagctcaggaagcagcgggaggagatcactgccattgtgaagatgcgcgtggctggcactgccagtgggacccagcatgccggtgacttcatctgcacagtgtatctggaagagaagaaggcagagactgagcagcatatcaaggtcccagcatccatgactgctgaggagctcaccctggagatcctggatcgccggaacgtgggcatcagggagaaggactattggacctgctttgaggtcaacgagagggaggaggcagagcgccccctgcactttgcggagaaggtgctgcccatcctgcacgggctgggcacggacagccacctggtggtgaagaagcaccaggccatggaggccatgctgctgtacctggccagccgtgtcggtgacaccaagcatggcatgatgaagttccgtgaggaccgcagcctcctgggcctgggcctgccctcaggtggcttccacgatcgctacttcatcctcaacagcagctgcttgcggctctacaaggaggtccggagccagaggccgtggagcggggcccctgagaccagtcaccggcctgagaaggagtggcctattaagagtctcaaagtctacctgggagtgaagaagaaactcaggccacccacctgctggggcttcacagtggtgcatgagacagagaaacatgagaagcagcagtggtacctctgctgtgacacacagatggagctccgggagtggttcgctacctttctgtttgtgcagcatgacggcctggtgtggccctcagagccctcacgcgtgtcccgggcagtgcctgaggtccggctgggtagtgtgtcactgatcccccttcgaggtagtgaaaatgaaatgcgccggagtgtggctgccttcaccgcggaccctctgtctcttctgcgcaacgtctgagcacaggagcccatccttggctctaggattccgccgctggaagccttctgttcagacaccccttatgctccaaggcctgatgtgagccagcggggggtgcatgggaaactgcaccccacaacccacatcctccatcctgactgcagcatggggttccccggcaggggtgggaggcagcaggggtcagcctgggcaggaacctctcccaactctgtccaggtgttcagacctcttggcccaacctgctcaccccaccgggttcactgtccttgtggggctggagagatgggcataagtcaggaacttgggaggaccaccaccctttcagaggcgtgaggccctggggccctgccggaagggagccccctgctcctcccaacaaactccagaacagcagaaagcgggtgctgtagaggagcactcagctcacggggagggagctcttggctgagcttctacagggctgagagctgcgctttggggacttcagccttccttccagtctgggctgagtggggggtccagactacctgatgccccttccccaatttggggactttttgataatataaatatatctgtatattttaccctaaccacacaaagcaacaaaagagcacaaacaaaaccacacacacgacacaagcacaaggccgcggtacacaagcggaggggaaccgcgggctccactacgcggagacctcccacccaggagggtatccccccagcccccatagagcctacgcgcggaaggcgagatgtcacccagaagagacgaccaccgaggacctatcgaggtcgccaactgatgcagccctatctcccggcggggacgacgagaagaacgacgcgacagcagcgaccagacccgaccgcgagcccaccgcgcacgcagacgggtactacacgtgg

SEQ ID NO: 417437 - DNA, 4345 bp, Homo sapiens
  misc_feature (49)..(49): n is a, c, g, or t
gccggtctgacctcttatgaggagtctcccctgagatatatgctgtttnccaaaaaaaaaaaaaaaaaaaagagaatgtgctactttgagtctgacttcagtcactcttgctgtaaagtccatcttcttgccagtggccatttgggattcttcctccctagaacctggctgatcctcactctgagtgtggcttctgagggctggggtggtcctggaacctgtcctcctacccccggtcatttgcttgttgtccctctccctctccagatcttacatctatcagaaacgatgggtgagactggatactgatcacctgcgatactttgacagtaacaaggacgcttactctaagcgctttatctctgtggcctgcatctcccacgtggctgccatcggggaccagaagtttgaagtgatcacaaacaaccgaacctttgccttccgggcagagagtgatgtggagcggaaggagtggatgcaggccctgcagcaggccatggctgagcagcgtgcccgggcccggctctctagcgcttatctgctgggagttccaggctcagagcagcctgaccgcgctggcagcctggagcttcgtggcttcaagaataagctgtacgtggccgtggtcggggacaaagtgcagctctacaagaatctagaggagtaccacctgggcattggcatcaccttcatcgacatgagcgtgggcaacgtgaaggaagtggaccggcgcagcttcgacctcaccacgccctaccgcatcttcagcttctctgctgactcagagctagagaaggagcagtggttggaggccatgcagggagccatcgctgaggccctgtctacctcggaggtggccgagcgcatctgggctgcagcccccaacaggttctgtgctgactgcggggctcctcagcctgactgggcctccatcaacctctgtgttgttatctgcaagcgctgtgcaggggagcaccgtggcctgggcgctggcgtctccaaggtgcggagcctgaagatggacaggaaggtgtggacagaaacacttatcgagctcttcttacagctggggaatggcgctgggaaccgcttctgggcagccaacgtgccccccagtgaggccctgcagcccagcagcagccccagcacccggcggtgccacctggaggccaagtaccgtgagggcaagtaccgccgctaccacccgctctttggcaaccaggaggagctggacaaggccctgtgtgctgcagtcaccaccacagacctggctgagacccaggcgctcctgggctgtggggctgggatcaactgcttctcgggggaccctgaggcccccacgcccctggctcttgcagagcaggcggggcagacgctgcagatggaattccttcggaacaaccggaccacagaggtgcctcggctggactcgatgaagcccctggaaaagcactactcagttgtcctgccgaccgtgagccacagtggcttcctctacaagactgcctctgccggcaagctgctacaggaccgccgggcccgggaagagttcagccggcgctggtgtgtccttggtgacggggtcctgagctactttgagaatgagcgggcagtgacccccaatggagagattcgggccagcgagattgtgtgcctggcagtgccccctcctgacacccatggctttgagcacacctttgaggtgtacacggagggagaacggctgtacctgtttgggctggagagtgcggagcaggctcatgagtgggtcaagtgtattgctaaggcattcgtgcctcccctagccgaggatctgctggcccgggattttgagcggctgggacgcctaccctacaaagctggcctgagcctacagcgggcccaggagggctggttctctctcagtggctcggagctccgtgctgtcttcccggaggggccctgcgaagagccgctgcaactacggaaactgcaggagctttccatccagggggacagtgagaaccaggtgctggtgctggtggagcgaaggaggacactgtacatacagggcgagcggcggctggacttcatgggttggctgggggccatccagaaagcagccgccagcatgggggacacgctgtcggagcagcagcttggggactcggatatcccggtgatcgtgtaccgctgtgtggactacatcacgcagtgcggcctgacctccgagggcatctaccgcaagtgtgggcagacatcgaagacacagcggctgctggagagcctgcggcaggatgcgcgctctgtgcacctcaaggagggcgagcagcacgtggatgatgtttcctcggcgctcaagcgcttcctgcgcgacctgcctgatgggctcttcactcgcgcccagcgcctaacctggctggaggcctcagagattgaggacgaggaggagaaggtctccaggtaccgagagctgctggtgcggctgccccctgtcaaccgggccacagtgaaggcccttatcagccacctgtactgtgttcagtgcttctcagacacgaaccagatgaacgtgcacaacctggcaattgtgtttgggcccacgctcttccagacagatgggcaggactacaaggctggccgtgtggtggaagacctcattaaccactatgtggtggtgtttagtgtggatgaggaagagctcaggaagcagcgggaggagatcactgccattgtgaagatgcgcgtggctggcactgccagtgggacccagcatgccggtgacttcatctgcacagtgtatctggaagagaagaaggcagagactgagcagcatatcaaggtcccagcatccatgactgctgaggagctcaccctggagatcctggatcgccggaacgtgggcatcagggagaaggactattggacctgctttgaggtcaacgagagggaggaggcagagcgccccctgcactttgcggagaaggtgctgcccatcctgcacgggctgggcacggacagccacctggtggtgaagaagcaccaggccatggaggccatgctgctgtacctggccagccgtgtcggtgacaccaagcatggcatgatgaagttccgtgaggaccgcagcctcctgggcctgggcctgccctcaggtggcttccacgatcgctacttcatcctcaacagcagctgcttgcggctctacaaggaggtccggagtcaccggcctgagaaggagtggcctattaagagtctcaaagtctacctgggagtgaagaagaaactcaggccacccacctgctggggcttcacagtggtgcatgagacagagaaacatgagaagcagcagtggtgagtgagcgcctcatcctgagatcccaggctgaggaaagatggtggcacgtcccccttcattgtgtccctcatcactgcccagatctgtgaccactagcagaccctgggctgggaaggcagacacggtgttccctgctcagtcaggcctttggcatcatgtgggtccgcgtccaaccctgcaggtacctctgctgtgacacacagatggagctccgggagtggttcgctacctttctgtttgtgcagcatgacggcctggtgtggccctcagagccctcacgcgtgtcccgggcagtgcctgaggtccggctgggtagtgtgtcactgatcccccttcgaggtagtgaaaatgaaatgcgccggagtgtggctgccttcaccgcggaccctctgtctcttctgcgcaacgtctgagcacaggagcccatccttggctctaggattccgccgctggaagccttctgttcagacaccccttatgctccaaggcctgatgtgagccagcggggggtgcatgggaaactgcaccccacaacccacatcctccatcctgactgcagcatggggttccccggcaggggtgggaggcagcaggggtcagcctgggcaggaacctctcccaactctgtccaggtgttcagacctcttggcccaacctgctcaccccaccgggttcactgtccttgtggggctggagagatgggcataagtcaggaacttgggaggaccaccaccctttcagaggcgtgaggccctggggccctgccggaagggagccccctgctcctcccaacaaactccagaacagcagaaagcgggtgctgtagaggagcactcagctcacggggagggagctcttggctgagcttctacagggctgagagctgcgctttggggacttcagccttccttccagtctgggctgagtggggggtccagactacctgatgccccttccccaatttggggactttttgataatataaatatatctgtatattttacccta

SEQ ID NO: 417438 - DNA, 1832 bp, Homo sapiens
ccgtacccctttcaacatctcatttctctgggtggggtaatagttacagggggtttctgacttgatttatctttcccacccagagattgaggacgaggaggagaaggtctccaggtaccgagagctgctggtgcggctgccccctgtcaaccgggccacagtgaaggcccttatcagccacctgtactgtgttcagtgcttctcagacacgaaccagatgaacgtgcacaacctggcaattgtgtttgggcccacgctcttccagacagatgggcaggactacaaggctggccgtgtggtggaagacctcattaaccactatgtggtggtgtttagtgtggatgaggaagagctcaggaagcagcgggaggagatcactgccattgtgaagatgcgcgtggctggcactgccagtgggacccagcatgccggtgacttcatctgcacagtgtatctggaagagaagaaggcagagactgagcagcatatcaaggtcccagcatccatgactgctgaggagctcaccctggagatcctggatcgccggaacgtgggcatcagggagaaggactattggacctgctttgaggtcaacgagagggaggaggcagagcgccccctgcactttgcggagaaggtgctgcccatcctgcacgggctgggcacggacagccacctggtggtgaagaagcaccaggccatggaggccatgctgctgtacctggccagccgtgtcggtgacaccaagcatggcatgatgaagttccgtgaggaccgcagcctcctgggcctgggcctgccctcaggtggcttccacgatcgctacttcatcctcaacagcagctgcttgcggctctacaaggaggtccggagtcaccggcctgagaaggagtggcctattaagagtctcaaagtctacctgggagtgaagaagaaactcaggccacccacctgctggggcttcacagtggtgcatgagacagagaaacatgagaagcagcagtggtacctctgctgtgacacacagatggagctccgggagtggttcgctacctttctgtttgtgcagcatgacggcctggtgtggccctcagagccctcacgcgtgtcccgggcagtgcctgaggtccggctgggtagtgtgtcactgatcccccttcgaggtagtgaaaatgaaatgcgccggagtgtggctgccttcaccgcggaccctctgtctcttctgcgcaacgtctgagcacaggagcccatccttggctctaggattccgccgctggaagccttctgttcagacaccccttatgctccaaggcctgatgtgagccagcggggggtgcatgggaaactgcaccccacaacccacatcctccatcctgactgcagcatggggttccccggcaggggtgggaggcagcaggggtcagcctgggcaggaacctctcccaactctgtccaggtgttcagacctcttggcccaacctgctcaccccaccgggttcactgtccttgtggggctggagagatgggcataagtcaggaacttgggaggaccaccaccctttcagaggcgtgaggccctggggccctgccggaagggagccccctgctcctcccaacaaactccagaacagcagaaagcgggtgctgtagaggagcactcagctcacggggagggagctcttggctgagcttctacagggctgagagctgcgctttggggacttcagccttccttccagtctgggctgagtggggggtccagactacctgatgccccttccccaatttggggactttttgataatataaatatatctgtatattttacccta

SEQ ID NO: 417439 - DNA, 4614 bp, Homo sapiens
  misc_feature (1)..(1): n is a, c, g, or t
ngcctgtcagggtgttgtgggggtgcccagctgcctgtcagaccctgaggactaccagacagagagtgggcagccatttcccgggaggcttccccttcccccacctcactctcttgccatacgggggtcaggagtcacgtgtagccacagcgctctgggccaggggtcggggctctggtgtggctcccccaggccctggctgtatgtgggtgggcatgtggcctccccccaccctgtgtgttaggaactcgtgtcctgtcccggagtgtctgtctctgtttcacttcttgtgttcccgtgtctgtctgtcttgcatccctagcccgcagtctttttctctgtccctttatctttctgtttttgtctgtgtcctaggtcggtttctgccactggctctcctgtccctgtgatctgggtctctgtgtggtctccgctggcagggggaggggagtgtgaggaaacagaactaaaagtgctgggctgtgtgggtcggggctgtgtggacagagggggcgtggcagccccgggtgggtgtgatctgtggcttgaagggaaggatgacgctgagtgggtctcgggggcaggaggagcccccaccgagccgagtcccacgggccgtgcgcgtggccagtctgctgagcgagggagaggaactgtctggggacgaccaaggggatgaggaagaggatgaccacgcctatgagggcgtccccaatggcggatggcataccagcagcctgagcttgtccttgcccagcacaatagctgcgccacaccccatggacgggccgcctgggggctccacccccgtcacaccagtcatcaaggctggctggctggacaagaacccaccgcagggatcttacatctatcagaaacgatgggtgagactggatactgatcacctgcgatactttgacagtaacaaggacgcttactctaagcgctttatctctgtggcctgcatctcccacgtggctgccatcggggaccagaagtttgaagtgatcacaaacaaccgaacctttgccttccgggcagagagtgatgtggagcggaaggagtggatgcaggccctgcagcaggccatggctgagcagcgtgcccgggcccggctctctagcgcttatctgctgggagttccaggctcagagcagcctgaccgcgctggcagcctggagcttcgtggcttcaagaataagctgtacgtggccgtggtcggggacaaagtgcagctctacaagaatctagaggagtaccacctgggcattggcatcaccttcatcgacatgagcgtgggcaacgtgaaggaagtggaccggcgcagcttcgacctcaccacgccctaccgcatcttcagcttctctgctgactcagagctagagaaggagcagtggttggaggccatgcagggagccatcgctgaggccctgtctacctcggaggtggccgagcgcatctgggctgcagcccccaacaggttctgtgctgactgcggggctcctcagcctgactgggcctccatcaacctctgtgttgttatctgcaagcgctgtgcaggggagcaccgtggcctgggcgctggcgtctccaaggtgcggagcctgaagatggacaggaaggtgtggacagaaacacttatcgagctcttcttacagctggggaatggcgctgggaaccgcttctgggcagccaacgtgccccccagtgaggccctgcagcccagcagcagccccagcacccggcggtgccacctggaggccaagtaccgtgagggcaagtaccgccgctaccacccgctctttggcaaccaggaggagctggacaaggccctgtgtgctgcagtcaccaccacagacctggctgagacccaggcgctcctgggctgtggggctgggatcaactgcttctcgggggaccctgaggcccccacgcccctggctcttgcagagcaggcggggcagacgctgcagatggaattccttcggaacaaccggaccacagaggtgcctcggctggactcgatgaagcccctggaaaagcactactcagttgtcctgccgaccgtgagccacagtggcttcctctacaagactgcctctgccggcaagctgctacaggaccgccgggcccgggaagagttcagccggcgctggtgtgtccttggtgacggggtcctgagctactttgagaatgagcgggcagtgacccccaatggagagattcgggccagcgagattgtgtgcctggcagtgccccctcctgacacccatggctttgagcacacctttgaggtgtacacggagggagaacggctgtacctgtttgggctggagagtgcggagcaggctcatgagtgggtcaagtgtattgctaaggcattcgtgcctcccctagccgaggatctgctggcccgggattttgagcggctgggacgcctaccctacaaagctggcctgagcctacagcgggcccaggagggctggttctctctcagtggctcggagctccgtgctgtcttcccggaggggccctgcgaagagccgctgcaactacggaaactgcaggagctttccatccagggggacagtgagaaccaggtgctggtgctggtggagcgaaggaggacactgtacatacagggcgagcggcggctggacttcatgggttggctgggggccatccagaaagcagccgccagcatgggggacacgctgtcggagcagcagcttggggactcggatatcccggtgatcgtgtaccgctgtgtggactacatcacgcagtgcggcctgacctccgagggcatctaccgcaagtgtgggcagacatcgaagacacagcggctgctggagagcctgcggcaggatgcgcgctctgtgcacctcaaggagggcgagcagcacgtggatgatgtttcctcggcgctcaagcgcttcctgcgcgacctgcctgatgggctcttcactcgcgcccagcgcctaacctggctggaggcctcagagattgaggacgaggaggagaaggtctccaggtaccgagagctgctggtgcggctgccccctgtcaaccgggccacagtgaaggcccttatcagccacctgtactgtgttcagtgcttctcagacacgaaccagatgaacgtgcacaacctggcaattgtgtttgggcccacgctcttccagacagatgggcaggactacaaggctggccgtgtggtggaagacctcattaaccactatgtggtggtgtttagtgtggatgaggaagagctcaggaagcagcgggaggagatcactgccattgtgaagatgcgcgtggctggcactgccagtgggacccagcatgccggtgacttcatctgcacagtgtatctggaagagaagaaggcagagactgagcagcatatcaaggtcccagcatccatgactgctgaggagctcaccctggagatcctggatcgccggaacgtgggcatcagggagaaggactattggacctgctttgaggtcaacgagagggaggaggcagagcgccccctgcactttgcggagaaggtgctgcccatcctgcacgggctgggcacggacagccacctggtggtgaagaagcaccaggccatggaggccatgctgctgtacctggccagccgtgtcggtgacaccaagcatggcatgatgaagttccgtgaggaccgcagcctcctgggcctgggcctgccctcaggtggcttccacgatcgctacttcatcctcaacagcagctgcttgcggctctacaaggaggtccggagccagaggccgtggagcggggcccctgagaccagtcaccggcctgagaaggagtggcctattaagagtctcaaagtctacctgggagtgaagaagaaactcaggccacccacctgctggggcttcacagtggtgcatgagacagagaaacatgagaagcagcagtggtacctctgctgtgacacacagatggagctccgggagtggttcgctacctttctgtttgtgcagcatgacggcctggtgtggccctcagagccctcacgcgtgtcccgggcagtgcctgaggtccggctgggtagtgtgtcactgatcccccttcgaggtagtgaaaatgaaatgcgccggagtgtggctgccttcaccgcggaccctctgtctcttctgcgcaacgtctgagcacaggagcccatccttggctctaggattccgccgctggaagccttctgttcagacaccccttatgctccaaggcctgatgtgagccagcggggggtgcatgggaaactgcaccccacaacccacatcctccatcctgactgcagcatggggttccccggcaggggtgggaggcagcaggggtcagcctgggcaggaacctctcccaactctgtccaggtgttcagacctcttggcccaacctgctcaccccaccgggttcactgtccttgtggggctggagagatgggcataagtcaggaacttgggaggaccaccaccctttcagaggcgtgaggccctggggccctgccggaagggagccccctgctcctcccaacaaactccagcacccgctttctgctgttctggagtttgttggtcg

SEQ ID NO: 417440 - DNA, 4107 bp, Homo sapiens
  misc_feature (49)..(49): n is a, c, g, or t
gccggtctgacctcttatgaggagtctcccctgagatatatgctgtttnccaaaaaaaaaaaaaaaaaaaagagaatgtgctactttgagtctgacttcagtcactcttgctgtaaagtccatcttcttgccagtggccatttgggattcttcctccctagaacctggctgatcctcactctgagtgtggcttctgagggctggggtggtcctggaacctgtcctcctacccccggtcatttgcttgttgtccctctccctctccagatcttacatctatcagaaacgatgggtgagactggatactgatcacctgcgatactttgacagtaacaaggacgcttactctaagcgctttatctctgtggcctgcatctcccacgtggctgccatcggggaccagaagtttgaagtgatcacaaacaaccgaacctttgccttccgggcagagagtgatgtggagcggaaggagtggatgcaggccctgcagcaggccatggctgagcagcgtgcccgggcccggctctctagcgcttatctgctgggagttccaggctcagagcagcctgaccgcgctggcagcctggagcttcgtggcttcaagaataagctgtacgtggccgtggtcggggacaaagtgcagctctacaagaatctagaggagtaccacctgggcattggcatcaccttcatcgacatgagcgtgggcaacgtgaaggaagtggaccggcgcagcttcgacctcaccacgccctaccgcatcttcagcttctctgctgactcagagctagagaaggagcagtggttggaggccatgcagggagccatcgctgaggccctgtctacctcggaggtggccgagcgcatctgggctgcagcccccaacaggttctgtgctgactgcggggctcctcagcctgactgggcctccatcaacctctgtgttgttatctgcaagcgctgtgcaggggagcaccgtggcctgggcgctggcgtctccaaggtgcggagcctgaagatggacaggaaggtgtggacagaaacacttatcgagctcttcttacagctggggaatggcgctgggaaccgcttctgggcagccaacgtgccccccagtgaggccctgcagcccagcagcagccccagcacccggcggtgccacctggaggccaagtaccgtgagggcaagtaccgccgctaccacccgctctttggcaaccaggaggagctggacaaggccctgtgtgctgcagtcaccaccacagacctggctgagacccaggcgctcctgggctgtggggctgggatcaactgcttctcgggggaccctgaggcccccacgcccctggctcttgcagagcaggcggggcagacgctgcagatggaattccttcggaacaaccggaccacagaggtgcctcggctggactcgatgaagcccctggaaaagcactactcagttgtcctgccgaccgtgagccacagtggcttcctctacaagactgcctctgccggcaagctgctacaggaccgccgggcccgggaagagttcagccggcgctggtgtgtccttggtgacggggtcctgagctactttgagaatgagcgggcagtgacccccaatggagagattcgggccagcgagattgtgtgcctggcagtgccccctcctgacacccatggctttgagcacacctttgaggtgtacacggagggagaacggctgtacctgtttgggctggagagtgcggagcaggctcatgagtgggtcaagtgtattgctaaggcattcgtgcctcccctagccgaggatctgctggcccgggattttgagcggctgggacgcctaccctacaaagctggcctgagcctacagcgggcccaggagggctggttctctctcagtggctcggagctccgtgctgtcttcccggaggggccctgcgaagagccgctgcaactacggaaactgcaggagctttccatccagggggacagtgagaaccaggtgctggtgctggtggagcgaaggaggacactgtacatacagggcgagcggcggctggacttcatgggttggctgggggccatccagaaagcagccgccagcatgggggacacgctgtcggagcagcagcttggggactcggatatcccggtgatcgtgtaccgctgtgtggactacatcacgcagtgcggcctgacctccgagggcatctaccgcaagtgtgggcagacatcgaagacacagcggctgctggagagcctgcggcaggatgcgcgctctgtgcacctcaaggagggcgagcagcacgtggatgatgtttcctcggcgctcaagcgcttcctgcgcgacctgcctgatgggctcttcactcgcgcccagcgcctaacctggctggaggcctcagagattgaggacgaggaggagaaggtctccaggtaccgagagctgctggtgcggctgccccctgtcaaccgggccacagtgaaggcccttatcagccacctgtactgtgttcagtgcttctcagacacgaaccagatgaacgtgcacaacctggcaattgtgtttgggcccacgctcttccagacagatgggcaggactacaaggctggccgtgtggtggaagacctcattaaccactatgtggtggtgtttagtgtggatgaggaagagctcaggaagcagcgggaggagatcactgccattgtgaagatgcgcgtggctggcactgccagtgggacccagcatgccggtgacttcatctgcacagtgtatctggaagagaagaaggcagagactgagcagcatatcaaggtcccagcatccatgactgctgaggagctcaccctggagatcctggatcgccggaacgtgggcatcagggagaaggactattggacctgctttgaggtcaacgagagggaggaggcagagcgccccctgcactttgcggagaaggtgctgcccatcctgcacgggctgggcacggacagccacctggtggtgaagaagcaccaggccatggaggccatgctgctgtacctggccagccgtgtcggtgacaccaagcatggcatgatgaagttccgtgaggaccgcagcctcctgggcctgggcctgccctcaggtggcttccacgatcgctacttcatcctcaacagcagctgcttgcggctctacaaggaggtccggagtcaccggcctgagaaggagtggcctattaagagtctcaaagtctacctgggagtgaagaagaaactcaggccacccacctgctggggcttcacagtggtgcatgagacagagaaacatgagaagcagcagtggtacctctgctgtgacacacagatggagctccgggagtggttcgctacctttctgtttgtgcagcatgacggcctggtgtggccctcagagccctcacgcgtgtcccgggcagtgcctgaggtccggctgggtagtgtgtcactgatcccccttcgaggtacttctgcgcaacgtctgagcacaggagcccatccttggctctaggattccgccgctggaagccttctgttcagacaccccttatgctccaaggcctgatgtgagccagcggggggtgcatgggaaactgcaccccacaacccacatcctccatcctgactgcagcatggggttccccggcaggggtgggaggcagcaggggtcagcctgggcaggaacctctcccaactctgtccaggtgttcagacctcttggcccaacctgctcaccccaccgggttcactgtccttgtggggctggagagatgggcataagtcaggaacttgggaggaccaccaccctttcagaggcgtgaggccctggggccctgccggaagggagccccctgctcctcccaacaaactccagaacagcagaaagcgggtgctgtagaggagcactcagctcacggggagggagctcttggctgagcttctacagggctgagagctgcgctttggggacttcagccttccttccagtctgggctgagtggggggtccagactacctgatgccccttccccaatttggggactttttgataatataaatatatctgtatattttacccta

SEQ ID NO: 417441 - DNA, 1635 bp, Homo sapiens
aactctacaggacttaagttacagcgtcaggcaccctggcaattgtgtttgggcccacgctcttccagacagatgggcaggactacaaggctggccgtgtggtggaagacctcattaaccactatgtggtggtgtttagtgtggatgaggaagagctcaggaagcagcgggaggagatcactgccattgtgaagatgcgcgtggctggcactgccagtgggacccagcatgccggtgacttcatctgcacagtgtatctggaagagaagaaggcagagactgagcagcatatcaaggtcccagcatccatgactgctgaggagctcaccctggagatcctggatcgccggaacgtgggcatcagggagaaggactattggacctgctttgaggtcaacgagagggaggaggcagagcgccccctgcactttgcggagaaggtgctgcccatcctgcacgggctgggcacggacagccacctggtggtgaagaagcaccaggccatggaggccatgctgctgtacctggccagccgtgtcggtgacaccaagcatggcatgatgaagttccgtgaggaccgcagcctcctgggcctgggcctgccctcaggtggcttccacgatcgctacttcatcctcaacagcagctgcttgcggctctacaaggaggtccggagtcaccggcctgagaaggagtggcctattaagagtctcaaagtctacctgggagtgaagaagaaactcaggccacccacctgctggggcttcacagtggtgcatgagacagagaaacatgagaagcagcagtggtacctctgctgtgacacacagatggagctccgggagtggttcgctacctttctgtttgtgcagcatgacggcctggtgtggccctcagagccctcacgcgtgtcccgggcagtgcctgaggtccggctgggtagtgtgtcactgatcccccttcgaggtagtgaaaatgaaatgcgccggagtgtggctgccttcaccgcggaccctctgtctcttctgcgcaacgtctgagcacaggagcccatccttggctctaggattccgccgctggaagccttctgttcagacaccccttatgctccaaggcctgatgtgagccagcggggggtgcatgggaaactgcaccccacaacccacatcctccatcctgactgcagcatggggttccccggcaggggtgggaggcagcaggggtcagcctgggcaggaacctctcccaactctgtccaggtgttcagacctcttggcccaacctgctcaccccaccgggttcactgtccttgtggggctggagagatgggcataagtcaggaacttgggaggaccaccaccctttcagaggcgtgaggccctggggccctgccggaagggagccccctgctcctcccaacaaactccagaacagcagaaagcgggtgctgtagaggagcactcagctcacggggagggagctcttggctgagcttctacagggctgagagctgcgctttggggacttcagccttccttccagtctgggctgagtggggggtccagactacctgatgccccttccccaatttggggactttttgataatataaatatatctgtatattttacccta

SEQ ID NO: 417442 - DNA, 1753 bp, Homo sapiens
ttgacctccaaccagcctcttccttgggggtcattgcccccatccctctgcctccgagccagcctgctccttccaagcccagacccatatgcagaggcgggggccagaggtgaacattttggcaatctggtgtccctccccagtacattggtctctcgcttcctgacctagaccattgggaagttcttcctgtggtctgttgaacagctgttctgcttcagcttgagtcattagcctccttgtggaaccaaagagctagtaactgctggtccctcaagccttctgttcacacggtcaaccctggagcctccatggggcagagagggctgagaaatgaataatctgagatgaacatagacacaggcagccaaccgaggctctctgatcacacccgctcgttccagtttggtgctgggggaggatgtacagttctccctccacatacaatctgattcagggtgatacttcaagtcctccagtttgcagggcatcagggtggtgctgggattcgctgttacagatgtcccagttgggacggctgcctcggagactgagggttgactgtctgatactgctgcagggagacaggccttgggggcctagggctgggaggttggttgggctagattgtgaacagggagggctttatcaggaaggcttcttggaggaggcgccctgtgctgggatgcaaagagggctggggagttggaagagggagctgcccagtcgggagagcggccccagtgccctttctgcagactaaagtgccctcttctccttgccctacctcagagtcaccggcctgagaaggagtggcctattaagagtctcaaagtctacctgggagtgaagaagaaactcaggccacccacctgctggggcttcacagtggtgcatgagacagagaaacatgagaagcagcagtggtacctctgctgtgacacacagatggagctccgggagtggttcgctacctttctgtttgtgcagcatgacggcctggtgtggccctcagagccctcacgcgtgtcccgggcagtgcctgaggtccggctgggtagtgtgtcactgatcccccttcgaggtagtgaaaatgaaatgcgccggagtgtggctgccttcaccgcggaccctctgtctcttctgcgcaacgtctgagcacaggagcccatccttggctctaggattccgccgctggaagccttctgttcagacaccccttatgctccaaggcctgatgtgagccagcggggggtgcatgggaaactgcaccccacaacccacatcctccatcctgactgcagcatggggttccccggcaggggtgggaggcagcaggggtcagcctgggcaggaacctctcccaactctgtccaggtgttcagacctcttggcccaacctgctcaccccaccgggttcactgtccttgtggggctggagagatgggcataagtcaggaacttgggaggaccaccaccctttcagaggcgtgaggccctggggccctgccggaagggagccccctgctcctcccaacaaactccagaacagcagaaagcgggtgctgtagaggagcactcagctcacggggagggagctcttggctgagcttctacagggctgagagctgcgctttggggacttcagccttccttccagtctgggctgagtggggggtccagactacctgatgccccttccccaatttggggactttttgataatataaatatatctgtatattttacccta

SEQ ID NO: 417443 - DNA, 1634 bp, Homo sapiens
cacgctgcatctgcagtgactctagagatcccggtacagcttcctgacctagaccattgggaagttcttcctgtggtctgttgaacagctgttctgcttcagcttgagtcattagcctccttgtggaaccaaagagctagtaactgctggtccctcaagccttctgttcacacggtcaaccctggagcctccatggggcagagagggctgagaaatgaataatctgagatgaacatagacacaggcagccaaccgaggctctctgatcacacccgctcgttccagtttggtgctgggggaggatgtacagttctccctccacatacaatctgattcagggtgatacttcaagtcctccagtttgcagggcatcagggtggtgctgggattcgctgttacagatgtcccagttgggacggctgcctcggagactgagggttgactgtctgatactgctgcagggagacaggccttgggggcctagggctgggaggttggttgggctagattgtgaacagggagggctttatcaggaaggcttcttggaggaggcgccctgtgctgggatgcaaagagggctggggagttggaagagggagctgcccagtcgggagagcggccccagtgccctttctgcagactaaagtgccctcttctccttgccctacctcagagtcaccggcctgagaaggagtggcctattaagagtctcaaagtctacctgggagtgaagaagaaactcaggccacccacctgctggggcttcacagtggtgcatgagacagagaaacatgagaagcagcagtggtacctctgctgtgacacacagatggagctccgggagtggttcgctacctttctgtttgtgcagcatgacggcctggtgtggccctcagagccctcacgcgtgtcccgggcagtgcctgaggtccggctgggtagtgtgtcactgatcccccttcgaggtagtgaaaatgaaatgcgccggagtgtggctgccttcaccgcggaccctctgtctcttctgcgcaacgtctgagcacaggagcccatccttggctctaggattccgccgctggaagccttctgttcagacaccccttatgctccaaggcctgatgtgagccagcggggggtgcatgggaaactgcaccccacaacccacatcctccatcctgactgcagcatggggttccccggcaggggtgggaggcagcaggggtcagcctgggcaggaacctctcccaactctgtccaggtgttcagacctcttggcccaacctgctcaccccaccgggttcactgtccttgtggggctggagagatgggcataagtcaggaacttgggaggaccaccaccctttcagaggcgtgaggccctggggccctgccggaagggagccccctgctcctcccaacaaactccagaacagcagaaagcgggtgctgtagaggagcactcagctcacggggagggagctcttggctgagcttctacagggctgagagctgcgctttggggacttcagccttccttccagtctgggctgagtggggggtccagactacctgatgccccttccccaatttggggactttttgataatataaatatatctgtatattttacccta

SEQ ID NO: 417444 - DNA, 3330 bp, Homo sapiens
  misc_feature (49)..(49): n is a, c, g, or t
gccggtctgacctcttatgaggagtctcccctgagatatatgctgtttnccaaaaaaaaaaaaaaaaaaaagagaatgtgctactttgagtctgacttcagtcactcttgctgtaaagtccatcttcttgccagtggccatttgggattcttcctccctagaacctggctgatcctcactctgagtgtggcttctgagggctggggtggtcctggaacctgtcctcctacccccggtcatttgcttgttgtccctctccctctccagatcttacatctatcagaaacgatgggtgagactggatactgatcacctgcgatactttgacagtaacaaggacgcttactctaagcgctttatctctgtggcctgcatctcccacgtggctgccatcggggaccagaagtttgaagtgatcacaaacaaccgaacctttgccttccgggcagagagtgatgtggagcggaaggagtggatgcaggccctgcagcaggccatggctgagcagcgtgcccgggcccggctctctagcgcttatctgctgggagttccaggctcagagcagcctgaccgcgctggcagcctggagcttcgtggcttcaagaataagctgtacgtggccgtggtcggggacaaagtgcagctctacaagaatctagaggagtaccacctgggcattggcatcaccttcatcgacatgagcgtgggcaacgtgaaggaagtggaccggcgcagcttcgacctcaccacgccctaccgcatcttcagcttctctgctgactcagagctagagaaggagcagtggttggaggccatgcagggagccatcgctgaggccctgtctacctcggaggtggccgagcgcatctgggctgcagcccccaacaggttctgtgctgactgcggggctcctcagcctgactgggcctccatcaacctctgtgttgttatctgcaagcgctgtgcaggggagcaccgtggcctgggcgctggcgtctccaaggtgcggagcctgaagatggacaggaaggtgtggacagaaacacttatcgagctcttcttacagctggggaatggcgctgggaaccgcttctgggcagccaacgtgccccccagtgaggccctgcagcccagcagcagccccagcacccggcggtgccacctggaggccaagtaccgtgagggcaagtaccgccgctaccacccgctctttggcaaccaggaggagctggacaaggccctgtgtgctgcagtcaccaccacagacctggctgagacccaggcgctcctgggctgtggggctgggatcaactgcttctcgggggaccctgaggcccccacgcccctggctcttgcagagcaggcggggcagacgctgcagatggaattccttcggaacaaccggaccacagaggtgcctcggctggactcgatgaagcccctggaaaagcactactcagttgtcctgccgaccgtgagccacagtggcttcctctacaagactgcctctgccggcaagctgctacaggaccgccgggcccgggaagagttcagccggcgctggtgtgtccttggtgacggggtcctgagctactttgagaatgagcgggcagtgacccccaatggagagattcgggccagcgagattgtgtgcctggcagtgccccctcctgacacccatggctttgagcacacctttgaggtgtacacggagggagaacggctgtacctgtttgggctggagagtgcggagcaggctcatgagtgggtcaagtgtattgctaaggcattcgtgcctcccctagccgaggatctgctggcccgggattttgagcggctgggacgcctaccctacaaagctggcctgagcctacagcgggcccaggagggctggttctctctcagtggctcggagctccgtgctgtcttcccggaggggccctgcgaagagccgctgcaactacggaaactgcaggagctttccatccagggggacagtgagaaccaggtgctggtgctggtggagcgaaggaggacactgtacatacagggcgagcggcggctggacttcatgggttggctgggggccatccagaaagcagccgccagcatgggggacacgctgtcggagcagcagcttggggactcggatatcccggtgatcgtgtaccgctgtgtggactacatcacgcagtgcggcctgacctccgagggcatctaccgcaagtgtgggcagacatcgaagacacagcggctgctggagagcctgcggcaggatgcgcgctctgtgcacctcaaggagggcgagcagcacgtggatgatgtttcctcggcgctcaagcgcttcctgcgcgacctgcctgatgggctcttcactcgcgcccagcgcctaacctggctggaggcctcagagattgaggacgaggaggagaaggtctccaggtaccgagagctgctggtgcggctgccccctgtcaaccgggccacagtgaaggcccttatcagccacctgtactgtgttcagtgcttctcagacacgaaccagatgaacgtgcacaacctggcaattgtgtttgggcccacgctcttccagacagatgggcaggactacaaggctggccgtgtggtggaagacctcattaaccactatgtggtggtgtttagtgtggatgaggaagagctcaggaagcagcgggaggagatcactgccattgtgaagatgcgcgtggctggcactgccagtgggacccagcatgccggtgacttcatctgcacagtgtatctggaagagaagaaggcagagactgagcagcatatcaaggtcccagcatccatgactgctgaggagctcaccctggagatcctggatcgccggaacgtgggcatcagggagaaggactattggacctgctttgaggtcaacgagagggaggaggcagagcgccccctgcactttgcggagaaggtgctgcccatcctgctcaccccaccgggttcactgtccttgtggggctggagagatgggcataagtcaggaacttgggaggaccaccaccctttcagaggcgtgaggccctggggccctgccggaagggagccccctgctcctcccaacaaactccagaacagcagaaagcgggtgctgtagaggagcactcagctcacggggagggagctcttggctgagcttctacagggctgagagctgcgctttggggacttcagccttccttccagtctgggctgagtggggggtccagactacctgatgccccttccccaatttggggactttttgataatataaatatatctgtatattttacccta

SEQ ID NO: 417445 - DNA, 3601 bp, Homo sapiens
  misc_feature (49)..(49): n is a, c, g, or t
gccggtctgacctcttatgaggagtctcccctgagatatatgctgtttnccaaaaaaaaaaaaaaaaaaaagagaatgtgctactttgagtctgacttcagtcactcttgctgtaaagtccatcttcttgccagtggccatttgggattcttcctccctagaacctggctgatcctcactctgagtgtggcttctgagggctggggtggtcctggaacctgtcctcctacccccggtcatttgcttgttgtccctctccctctccagatcttacatctatcagaaacgatgggtgagactggatactgatcacctgcgatactttgacagtaacaaggacgcttactctaagcgctttatctctgtggcctgcatctcccacgtggctgccatcggggaccagaagtttgaagtgatcacaaacaaccgaacctttgccttccgggcagagagtgatgtggagcggaaggagtggatgcaggccctgcagcaggccatggctgagcagcgtgcccgggcccggctctctagcgcttatctgctgggagttccaggctcagagcagcctgaccgcgctggcagcctggagcttcgtggcttcaagaataagctgtacgtggccgtggtcggggacaaagtgcagctctacaagaatctagaggagtaccacctgggcattggcatcaccttcatcgacatgagcgtgggcaacgtgaaggaagtggaccggcgcagcttcgacctcaccacgccctaccgcatcttcagcttctctgctgactcagagctagagaaggagcagtggttggaggccatgcagggagccatcgctgaggccctgtctacctcggaggtggccgagcgcatctgggctgcagcccccaacaggttctgtgctgactgcggggctcctcagcctgactgggcctccatcaacctctgtgttgttatctgcaagcgctgtgcaggggagcaccgtggcctgggcgctggcgtctccaaggtgcggagcctgaagatggacaggaaggtgtggacagaaacacttatcgagctcttcttacagctggggaatggcgctgggaaccgcttctgggcagccaacgtgccccccagtgaggccctgcagcccagcagcagccccagcacccggcggtgccacctggaggccaagtaccgtgagggcaagtaccgccgctaccacccgctctttggcaaccaggaggagctggacaaggccctgtgtgctgcagtcaccaccacagacctggctgagacccaggcgctcctgggctgtggggctgggatcaactgcttctcgggggaccctgaggcccccacgcccctggctcttgcagagcaggcggggcagacgctgcagatggaattccttcggaacaaccggaccacagaggtgcctcggctggactcgatgaagcccctggaaaagcactactcagttgtcctgccgaccgtgagccacagtggcttcctctacaagactgcctctgccggcaagctgctacaggaccgccgggcccgggaagagttcagccggcgctggtgtgtccttggtgacggggtcctgagctactttgagaatgagcgggcagtgacccccaatggagagattcgggccagcgagattgtgtgcctggcagtgccccctcctgacacccatggctttgagcacacctttgaggtgtacacggagggagaacggctgtacctgtttgggctggagagtgcggagcaggctcatgagtgggtcaagtgtattgctaaggcattcgtgcctcccctagccgaggatctgctggcccgggattttgagcggctgggacgcctaccctacaaagctggcctgagcctacagcgggcccaggagggctggttctctctcagtggctcggagctccgtgctgtcttcccggaggggccctgcgaagagccgctgcaactacggaaactgcaggagctttccatccagggggacagtgagaaccaggtgctggtgctggtggagcgaaggaggacactgtacatacagggcgagcggcggctggacttcatgggttggctgggggccatccagaaagcagccgccagcatgggggacacgctgtcggagcagcagcttggggactcggatatcccggtgatcgtgtaccgctgtgtggactacatcacgcagtgcggcctgacctccgagggcatctaccgcaagtgtgggcagacatcgaagacacagcggctgctggagagcctgcggcaggatgcgcgctctgtgcacctcaaggagggcgagcagcacgtggatgatgtttcctcggcgctcaagcgcttcctgcgcgacctgcctgatgggctcttcactcgcgcccagcgcctaacctggctggaggcctcagagattgaggacgaggaggagaaggtctccaggtaccgagagctgctggtgcggctgccccctgtcaaccgggccacagtgaaggcccttatcagccacctgtactgtgttcagtgcttctcagacacgaaccagatgaacgtgcacaacctggcaattgtgtttgggcccacgctcttccagacagatgggcaggactacaaggctggccgtgtggtggaagacctcattaaccactatgtggtggtgtttagtgtggatgaggaagagctcaggaagcagcgggaggagatcactgccattgtgaagatgcgcgtggctggcactgccagtgggacccagcatgccggtgacttcatctgcacagtgtatctggaagagaagaaggcagagactgagcagcatatcaaggtcccagcatccatgactgctgaggagctcaccctggagatcctggatcgccggaacgtgggcatcagggagaaggactattggacctgctttgaggtcaacgagagggaggaggcagagcgccccctgcactttgcggagaaggtgctgcccatcctgcacgggctgggcacggacagccacctggtggtgaagaagcaccaggccatggaggccatgctgctgtacctggccagccgtgtcggtgacaccaagcatggcatgatgaagttccgtgaggaccgcagcctcctgggcctgggcctgccctcaggtggcttccacgatcgctacttcatcctcaacagcagctgcttgcggctctacaaggaggtccgggctctcaggatggcacagcagtgggggagaactgtagactctcaagacccctcctgctgtggccctggacggccactctagtgtgccctgtagccccactaagccctggcacccggatgccatcacaccactccatgcccatgctctgtctcactgtgcctgtgccttatcactgcatccacaggaacctgttacttgatgacagccccaagttgtgcatgcatgccttgtcatatcgtatgtcatatgcctcccgggccaccctcctccctcattctgtccacatgcaggtgttctcccaacccagactccatttgacaccctccaccttctgcacatacatgccatacacacaccccaaccccacacatcactgcacacttgtcgagtcctggctctaga

SEQ ID NO: 417446 - DNA, 3171 bp, Homo sapiens
  misc_feature (49)..(49): n is a, c, g, or t
gccggtctgacctcttatgaggagtctcccctgagatatatgctgtttnccaaaaaaaaaaaaaaaaaaaagagaatgtgctactttgagtctgacttcagtcactcttgctgtaaagtccatcttcttgccagtggccatttgggattcttcctccctagaacctggctgatcctcactctgagtgtggcttctgagggctggggtggtcctggaacctgtcctcctacccccggtcatttgcttgttgtccctctccctctccagatcttacatctatcagaaacgatgggtgagactggatactgatcacctgcgatactttgacagtaacaaggacgcttactctaagcgctttatctctgtggcctgcatctcccacgtggctgccatcggggaccagaagtttgaagtgatcacaaacaaccgaacctttgccttccgggcagagagtgatgtggagcggaaggagtggatgcaggccctgcagcaggccatggctgagcagcgtgcccgggcccggctctctagcgcttatctgctgggagttccaggctcagagcagcctgaccgcgctggcagcctggagcttcgtggcttcaagaataagctgtacgtggccgtggtcggggacaaagtgcagctctacaagaatctagaggagtaccacctgggcattggcatcaccttcatcgacatgagcgtgggcaacgtgaaggaagtggaccggcgcagcttcgacctcaccacgccctaccgcatcttcagcttctctgctgactcagagctagagaaggagcagtggttggaggccatgcagggagccatcgctgaggccctgtctacctcggaggtggccgagcgcatctgggctgcagcccccaacaggttctgtgctgactgcggggctcctcagcctgactgggcctccatcaacctctgtgttgttatctgcaagcgctgtgcaggggagcaccgtggcctgggcgctggcgtctccaaggtgcggagcctgaagatggacaggaaggtgtggacagaaacacttatcgagctcttcttacagctggggaatggcgctgggaaccgcttctgggcagccaacgtgccccccagtgaggccctgcagcccagcagcagccccagcacccggcggtgccacctggaggccaagtaccgtgagggcaagtaccgccgctaccacccgctctttggcaaccaggaggagctggacaaggccctgtgtgctgcagtcaccaccacagacctggctgagacccaggcgctcctgggctgtggggctgggatcaactgcttctcgggggaccctgaggcccccacgcccctggctcttgcagagcaggcggggcagacgctgcagatggaattccttcggaacaaccggaccacagaggtgcctcggctggactcgatgaagcccctggaaaagcactactcagttgtcctgccgaccgtgagccacagtggcttcctctacaagactgcctctgccggcaagctgctacaggaccgccgggcccgggaagagttcagccggcgctggtgtgtccttggtgacggggtcctgagctactttgagaatgagcgggcagtgacccccaatggagagattcgggccagcgagattgtgtgcctggcagtgccccctcctgacacccatggctttgagcacacctttgaggtgtacacggagggagaacggctgtacctgtttgggctggagagtgcggagcaggctcatgagtgggtcaagtgtattgctaaggcattcgtgcctcccctagccgaggatctgctggcccgggattttgagcggctgggacgcctaccctacaaagctggcctgagcctacagcgggcccaggagggctggttctctctcagtggctcggagctccgtgctgtcttcccggaggggccctgcgaagagccgctgcaactacggaaactgcaggagctttccatccagggggacagtgagaaccaggtgctggtgctggtggagcgaaggaggacactgtacatacagggcgagcggcggctggacttcatgggttggctgggggccatccagaaagcagccgccagcatgggggacacgctgtcggagcagcagcttggggactcggatatcccggtgatcgtgtaccgctgtgtggactacatcacgcagtgcggcctgacctccgagggcatctaccgcaagtgtgggcagacatcgaagacacagcggctgctggagagcctgcggcaggatgcgcgctctgtgcacctcaaggagggcgagcagcacgtggatgatgtttcctcggcgctcaagcgcttcctgcgcgacctgcctgatgggctcttcactcgcgcccagcgcctaacctggctggaggcctcagagattgaggacgaggaggagaaggtctccaggtaccgagagctgctggtgcggctgccccctgtcaaccgggccacagtgaaggcccttatcagccacctgtactgtgttcagtgcttctcagacacgaaccagatgaacgtgcacaacctggcaattgtgtttgggcccacgctcttccagacagatgggcaggactacaaggctggccgtgtggtggaagacctcattaaccactatgtggtggtgtttagtgtggatgaggaagagctcaggaagcagcgggaggagatcactgccattgtgaagatgcgcgtggctggcactgccagtgggacccagcatgccggtgacttcatctgcacagtgtatctggaagagaagaaggcagagactgagcagcatatcaaggtcccagcatccatgactgctgaggagctcaccctggagatcctggatcgccggaacgtgggcatcagggagaaggactattggacctgctttgaggtcaacgagagggaggaggcaggtgggtgacgctgggcttgtgcagggtgtggtatggcttgtcttgtctcagctgtagccccagtctgtcctcccctaccctgcacatgaggatgggtggtgaaaagggctttgatgacatgttgctgtcacactgatctctgtgatggtggtgatagggtgctggcagggattgaggttatggctgtcatgtggctgatagaagatgtcagtgacagtggtgatggttgagg

SEQ ID NO: 417447 - DNA, 1770 bp, Homo sapiens
  misc_feature (49)..(49): n is a, c, g, or t
gccggtctgacctcttatgaggagtctcccctgagatatatgctgtttnccaaaaaaaaaaaaaaaaaaaagagaatgtgctactttgagtctgacttcagtcactcttgctgtaaagtccatcttcttgccagtggccatttgggattcttcctccctagaacctggctgatcctcactctgagtgtggcttctgagggctggggtggtcctggaacctgtcctcctacccccggtcatttgcttgttgtccctctccctctccagatcttacatctatcagaaacgatgggtgagactggatactgatcacctgcgatactttgacagtaacaaggacgcttactctaagcgctttatctctgtggcctgcatctcccacgtggctgccatcggggaccagaagtttgaagtgatcacaaacaaccgaacctttgccttccgggcagagagtgatgtggagcggaaggagtggatgcaggccctgcagcaggccatggctgagcagcgtgcccgggcccggctctctagcgcttatctgctgggagttccaggctcagagcagcctgaccgcgctggcagcctggagcttcgtggcttcaagaataagctgtacgtggccgtggtcggggacaaagtgcagctctacaagaatctagaggagtaccacctgggcattggcatcaccttcatcgacatgagcgtgggcaacgtgaaggaagtggaccggcgcagcttcgacctcaccacgccctaccgcatcttcagcttctctgctgactcagagctagagaaggagcagtggttggaggccatgcagggagccatcgctgaggccctgtctacctcggaggtggccgagcgcatctgggctgcagcccccaacaggttctgtgctgactgcggggctcctcagcctgactgggcctccatcaacctctgtgttgttatctgcaagcgctgtgcaggggagcaccgtggcctgggcgctggcgtctccaaggtgcggagcctgaagatggacaggaaggtgtggacagaaacacttatcgaggtggggatgcccctgcttgccaccgatacttggggtctgccccattcaacagctgtctgggtctcccagccccctccctatctcagtgaccacagcaccttggagctggaagagaccctttgtgataatctagtgggtggggatttcggaaaagcaatttttggcaaagtcagcaaactggccagtgagctaagaatgtttttatagttgtaaagtgttatttttttttaaagaaaaaaaaaggaagaaaatgcagcagagactgtatgtgttctgtaaagccgaaaataattactatttcgccctttagagaaagaatttgctaacttctgatctaatttcactgtcatccattgaatagatgtgtaaactgaggtcctgggcagggctgtaatctgcctgagattaccctgtaaatgcatattgaccaccatccctgcctctttccatcccacttctggctgacccagggccttctcccctaccttgcacagcccctcagaggccctcagcctccatttcatgtgaactcacatgtaccagtgggtatatatatgtgtgctgtgtgtgcacacacgtgtacatttatgcccctgtactggaaactcccaggtacccatatgtggtagatataggggagaacctgcaatgggagggtagacccaggctgcagactccagacacttggagtgtcacatccgtttctcacctcccca

SEQ ID NO: 417448 - DNA, 1386 bp, Homo sapiens
  misc_feature (49)..(49): n is a, c, g, or t
  misc_feature (1244)..(1244): n is a, c, g, or t
  misc_feature (1272)..(1272): n is a, c, g, or t
gccggtctgacctcttatgaggagtctcccctgagatatatgctgtttnccaaaaaaaaaaaaaaaaaaaagagaatgtgctactttgagtctgacttcagtcactcttgctgtaaagtccatcttcttgccagtggccatttgggattcttcctccctagaacctggctgatcctcactctgagtgtggcttctgagggctggggtggtcctggaacctgtcctcctacccccggtcatttgcttgttgtccctctccctctccagatcttacatctatcagaaacgatgggtgagactggatactgatcacctgcgatactttgacagtaacaaggacgcttactctaagcgctttatctctgtggcctgcatctcccacgtggctgccatcggggaccagaagtttgaagtgatcacaaacaaccgaacctttgccttccgggcagagagtgatgtggagcggaaggagtggatgcaggccctgcagcaggccatggctgagcagcgtgcccgggcccggctctctagcgcttatctgctgggagttccaggctcagagcagcctgaccgcgctggcagcctggagcttcgtggcttcaagaataagctgtacgtggccgtggtcggggacaaagtgcagctctacaagaatctagaggagtaccacctgggcattggcatcaccttcatcgacatgagcgtgggcaacgtgaaggaagtggaccggcgcagcttcgacctcaccacgccctaccgcatcttcagcttctctgctgactcagagctagagaaggagcagtggttggaggccatgcagggagccatcgctgaggccctgtctacctcggaggtggccgagcgcatctgggctgcagcccccaacaggttctgtgctgactgcggggctcctcagcctgactgggcctccatcaacctctgtgttgttatctgcaagcgctgtgcaggggagcaccgtggcctgggcgctggcgtctccaaggtgcggagcctgaagatggacaggaaggtgtggacagaaacacttatcgagctcttcttacagctggggaatggcgctgggaaccgcttctgggcagccaacgtgccccccagtgaggccctgcagcccagcagcagccccagcacccggcggtgccacctggaggccaagtaccgtgagggcaagtaccgccgctaccacccgctctttggcaaccaggaggagctggacaagccctgtntgctgccctcagtcatcatgggtctctntcccatcttgggcaaagacaacaccatcgagcaccttttgcccctcttcctggctcagctgaaggatgagtgccctgaggtacggctgaacatcatctcttaacctggactgtt

SEQ ID NO: 417449 - DNA, 836 bp, Homo sapiens
  misc_feature (49)..(49): n is a, c, g, or t
gccggtctgacctcttatgaggagtctcccctgagatatatgctgtttnccaaaaaaaaaaaaaaaaaaaagagaatgtgctactttgagtctgacttcagtcactcttgctgtaaagtccatcttcttgccagtggccatttgggattcttcctccctagaacctggctgatcctcactctgagtgtggcttctgagggctggggtggtcctggaacctgtcctcctacccccggtcatttgcttgttgtccctctccctctccagatcttacatctatcagaaacgatgggtgagactggatactgatcacctgcgatactttgacagtaacaaggacgcttactctaagcgctttatctctgtggcctgcatctcccacgtggctgccatcggggaccagaagtttgaagtgatcacaaacaaccgaacctttgccttccgggcagagagtgatggtggggagtgtggggtgttgtgtgtgtgtgtagaagagggtagagaagactggaagtttgggcagaggagggggaagagagtcatggtgcatctgccctctcacatcacatccggggaggcatgctgcctttgtgaggtgggcagaggaagggggcaccctctgtgaccggctctgtgcttggcacggtcactgactcctcagaaccacacaatcagcgggagcaggcttggaggggtgaggtcacttgcccagcatcagtggcatagctgggattggagcctgagctcgttcaagtcagagaagtcaagcaaaatgatgggggcatctgagtgggctttctggaggaggtgttgcatgaggagcctagggccaggag

SEQ ID NO: 417450 - DNA, 204 bp, Homo sapiens
cagagatgcagtcatgttctccccacagctgcttctcatatcggcggggatcaaagctgagggtgtcatctcagaccacagctggaggcatttctgggaagggtgggcagatctgaggctgagtgtctgggtgaactgaagctgagcccagccccttcctctctgctccccagcatgacggcctggtgtggccctcagagccct

SEQ ID NO: 417451 - DNA, 307 bp, Homo sapiens
cagcctcctcctcctccacccatccctccggactcctgcgcccttcccttgtggcacttgcactaggcttaccctaacccacaggctccagttgcctgcctctgcttctcattcccatcgccgctccatacagagccaggggccctggaagaccgagagttccttaccctggttgaatgcctggcctgcattgacttggagggcacagggactgctgtcacccaccatgagaggcacagcagcccaggcggggtggggggaagatagttacagggggtttctgacttgatttatctttcccacccag

SEQ ID NO: 417452 - DNA, 332 bp, Homo sapiens
ttgtgtttgggcccacgctcttccagacagatgggcaggactacaaggctggccgtgtggtggaagacctcattaaccactatgtggtggtgtttagtgtgcgtccctggccagtgggcagtggagggcaggggtgatccttgcagatgacggtgaccacctgtccctgcctctcgccccttcccaggtggatgaggaagagctcaggaagcagcgggaggagatcactgccattgtgaagatgcgcgtggctggcactgccagtgggacccaggtgaaggctggagcctgggtggggggcttggacctgccacctgcacccatttcctagg

SEQ ID NO: 417453 - DNA, 443 bp, Homo sapiens
gtcccagcatccatgactgctgaggagctcaccctggagatcctggatcgccggaacgtgggcatcagggagaaggactattggacctgctttgaggtcaacgagagggaggaggcaggtgggtgacgctgggcttgtgcagggtgtggtatggcttgtcttgtctcagctgtagccccagtctgtcctcccctaccctgcacatgaggatgggtggtgaaaagggctttgatgacatgttgctgtcacactgatctctgtgatggtggtgatagggtgctggcagggattgaggttatggctgtcatgtggctgatagaagatgtcagtgacagtggtgatggttgaggtgagaaatgtattttatggtaaaggtggtcttgatggcagtggaggatgaggctgtatctgttcatttgttttactatatttgttgagtgcca

SEQ ID NO: 417454 - DNA, 1160 bp, Homo sapiens
agccccgggtaggggttggtgcagcctgtgcccactccagtcccaccccccagccagccgtgtcggtgacaccaagcatggcatgatgaagttccgtgaggaccgcagcctcctgggcctgggcctgccctcaggtggcttccacgatcgctacttcatcctcaacagcagctgcttgcggctctacaaggaggtccggagtcaccggcctgagaaggagtggcctattaagagtctcaaagtctacctgggagtgaagaagaaactcaggccacccacctgctggggcttcacagtggtgcatgagacagagaaacatgagaagcagcagtggtacctctgctgtgacacacagatggagctccgggagtggttcgctacctttctgtttgtgcagcatgacggcctggtgtggccctcagagccctcacgcgtgtcccgggcagtgcctgaggtccggctgggtagtgtgtcactgatcccccttcgaggtagtgaaaatgaaatgcgccggagtgtggctgccttcaccgcggaccctctgtctcttctgcgcaacgtctgagcacaggagcccatccttggctctaggattccgccgctggaagccttctgttcagacaccccttatgctccaaggcctgatgtgagccagcggggggtgcatgggaaactgcaccccacaacccacatcctccatcctgactgcagcatggggttccccggcaggggtgggaggcagcaggggtcagcctgggcaggaacctctcccaactctgtccaggtgttcagacctcttggcccaacctgctcaccccaccgggttcactgtccttgtggggctggagagatgggcataagtcaggaacttgggaggaccaccaccctttcagaggcgtgaggccctggggccctgccggaagggagccccctgctcctcccaacaaactccagaacagcagaaagcgggtgctgtagaggagcactcagctcacggggagggagctcttggctgagcttctacagggctgagagctgcgctttggggacttcagccttccttccagtctgggctgagtggggggtccagactacctgatgccccttccccaatttggggactttttgataatataaatatatctgtatattttacccta

SEQ ID NO: 417455 - DNA, 3896 bp, Homo sapiens
  misc_feature (49)..(49): n is a, c, g, or t
gccggtctgacctcttatgaggagtctcccctgagatatatgctgtttnccaaaaaaaaaaaaaaaaaaaagagaatgtgctactttgagtctgacttcagtcactcttgctgtaaagtccatcttcttgccagtggccatttgggattcttcctccctagaacctggctgatcctcactctgagtgtggcttctgagggctggggtggtcctggaacctgtcctcctacccccggtcatttgcttgttgtccctctccctctccagatcttacatctatcagaaacgatgggtgagactggatactgatcacctgcgatactttgacagtaacaaggacgcttactctaagcgctttatctctgtggcctgcatctcccacgtggctgccatcggggaccagaagtttgaagtgatcacaaacaaccgaacctttgccttccgggcagagagtgatgtggagcggaaggagtggatgcaggccctgcagcaggccatggctgagcagcgtgcccgggcccggctctctagcgcttatctgctgggagttccaggctcagagcagcctgaccgcgctggcagcctggagcttcgtggcttcaagaataagctgtacgtggccgtggtcggggacaaagtgcagctctacaagaatctagaggagtaccacctgggcattggcatcaccttcatcgacatgagcgtgggcaacgtgaaggaagtggaccggcgcagcttcgacctcaccacgccctaccgcatcttcagcttctctgctgactcagagctagagaaggagcagtggttggaggccatgcagggagccatcgctgaggccctgtctacctcggaggtggccgagcgcatctgggctgcagcccccaacaggttctgtgctgactgcggggctcctcagcctgactgggcctccatcaacctctgtgttgttatctgcaagcgctgtgcaggggagcaccgtggcctgggcgctggcgtctccaaggtgcggagcctgaagatggacaggaaggtgtggacagaaacacttatcgagctcttcttacagctggggaatggcgctgggaaccgcttctgggcagccaacgtgccccccagtgaggccctgcagcccagcagcagccccagcacccggcggtgccacctggaggccaagtaccgtgagggcaagtaccgccgctaccacccgctctttggcaaccaggaggagctggacaaggccctgtgtgctgcagtcaccaccacagacctggctgagacccaggcgctcctgggctgtggggctgggatcaactgcttctcgggggaccctgaggcccccacgcccctggctcttgcagagcaggcggggcagacgctgcagatggaattccttcggaacaaccggaccacagaggtgcctcggctggactcgatgaagcccctggaaaagcactactcagttgtcctgccgaccgtgagccacagtggcttcctctacaagactgcctctgccggcaagctgctacaggaccgccgggcccgggaagagttcagccggcgctggtgtgtccttggtgacggggtcctgagctactttgagaatgagcgggcagtgacccccaatggagagattcgggccagcgagattgtgtgcctggcagtgccccctcctgacacccatggctttgagcacacctttgaggtgtacacggagggagaacggctgtacctgtttgggctggagagtgcggagcaggctcatgagtgggtcaagtgtattgctaaggcattcgtgcctcccctagccgaggatctgctggcccgggattttgagcggctgggacgcctaccctacaaagctggcctgagcctacagcgggcccaggagggctggttctctctcagtggctcggagctccgtgctgtcttcccggaggggccctgcgaagagccgctgcaactacggaaactgcaggagctttccatccagggggacagtgagaaccaggtgctggtgctggtggagcgaaggaggacactgtacatacagggcgagcggcggctggacttcatgggttggctgggggccatccagaaagcagccgccagcatgggggacacgctgtcggagcagcagcttggggactcggatatcccggtgatcgtgtaccgctgtgtggactacatcacgcagtgcggcctgacctccgagggcatctaccgcaagtgtgggcagacatcgaagacacagcggctgctggagagcctgcggcaggatgcgcgctctgtgcacctcaaggagggcgagcagcacgtggatgatgtttcctcggcgctcaagcgcttcctgcgcgacctgcctgatgggctcttcactcgcgcccagcgcctaacctggctggaggcctcagagattgaggacgaggaggagaaggtctccaggtaccgagagctgctggtgcggctgccccctgtcaaccgggccacagtgaaggcccttatcagccacctgtactgtgttcagtgcttctcagacacgaaccagatgaacgtgcacaacctggcaattgtgtttgggcccacgctcttccagacagatgggcaggactacaaggctggccgtgtggtggaagacctcattaaccactatgtggtggtgtttagtgtggatgaggaagagctcaggaagcagcgggaggagatcactgccattgtgaagatgcgcgtggctggcactgccagtgggacccagcatgccggtgacttcatctgcacagtgtatctggaagagaagaaggcagagactgagcagcatatcaaggtcccagcatccatgactgctgaggagctcaccctggagatcctggatcgccggaacgtgggcatcagggagaaggactattggacctgctttgaggtcaacgagagggaggaggcagagcgccccctgcactttgcggagaaggtgctgcccatcctgcacgggctgggcacggacagccacctggtggtgaagaagcaccaggccatggaggccatgctgctgtacctggccagccgtgtcggtgacaccaagcatggcatgatgaagttccgtgaggaccgcagcctcctgggcctgggcctgccctcaggtggcttccacgatcgctacttcatcctcaacagcagctgcttgcggctctacaaggaggtccggagtcaccggcctgagaaggagtggcctattaagagtctcaaagtctacctgggagtgaagaagaaactcaggccacccacctgctggggcttcacagtggtgcatgagacagagaaacatgagaagcagcagtggtacctctgctgtgacacacagatggagctccgggagtggttcgctacctttctgtttgtgcagcatgacggcctggtgtggccctcagagccctcacgcgtgtcccgggcagtgcctgaggtccggctgggtagtgtgtcactgatcccccttcgaggtagtgaaaatgaaatgcgccggagtgtggctgccttcaccgcggaccctctgtctgtgagtggctctccatgcctttgggcagggggctgggggcctggctgggtgcctgccttctactccacagtagatgattgccctgattgccctccccgattgccctccggccccctccctccagccttggtgggggccctcataggcctctttggttcacaccattcaaaggagccccttctgcctggccctggaagctgggagtcccctctgcctggccctgggagctgggagcctggctgattggagtgctccccggctggcagtggagagtggctgcagcagctgcagcagcttcagcggggcgccagcccctctgggccttcacaaaatacctgtgggtctcttg

SEQ ID NO: 417456 - DNA, 3702 bp, Homo sapiens
  misc_feature (49)..(49): n is a, c, g, or t
gccggtctgacctcttatgaggagtctcccctgagatatatgctgtttnccaaaaaaaaaaaaaaaaaaaagagaatgtgctactttgagtctgacttcagtcactcttgctgtaaagtccatcttcttgccagtggccatttgggattcttcctccctagaacctggctgatcctcactctgagtgtggcttctgagggctggggtggtcctggaacctgtcctcctacccccggtcatttgcttgttgtccctctccctctccagatcttacatctatcagaaacgatgggtgagactggatactgatcacctgcgatactttgacagtaacaaggacgcttactctaagcgctttatctctgtggcctgcatctcccacgtggctgccatcggggaccagaagtttgaagtgatcacaaacaaccgaacctttgccttccgggcagagagtgatgtggagcggaaggagtggatgcaggccctgcagcaggccatggctgagcagcgtgcccgggcccggctctctagcgcttatctgctgggagttccaggctcagagcagcctgaccgcgctggcagcctggagcttcgtggcttcaagaataagctgtacgtggccgtggtcggggacaaagtgcagctctacaagaatctagaggagtaccacctgggcattggcatcaccttcatcgacatgagcgtgggcaacgtgaaggaagtggaccggcgcagcttcgacctcaccacgccctaccgcatcttcagcttctctgctgactcagagctagagaaggagcagtggttggaggccatgcagggagccatcgctgaggccctgtctacctcggaggtggccgagcgcatctgggctgcagcccccaacaggttctgtgctgactgcggggctcctcagcctgactgggcctccatcaacctctgtgttgttatctgcaagcgctgtgcaggggagcaccgtggcctgggcgctggcgtctccaaggtgcggagcctgaagatggacaggaaggtgtggacagaaacacttatcgagctcttcttacagctggggaatggcgctgggaaccgcttctgggcagccaacgtgccccccagtgaggccctgcagcccagcagcagccccagcacccggcggtgccacctggaggccaagtaccgtgagggcaagtaccgccgctaccacccgctctttggcaaccaggaggagctggacaaggccctgtgtgctgcagtcaccaccacagacctggctgagacccaggcgctcctgggctgtggggctgggatcaactgcttctcgggggaccctgaggcccccacgcccctggctcttgcagagcaggcggggcagacgctgcagatggaattccttcggaacaaccggaccacagaggtgcctcggctggactcgatgaagcccctggaaaagcactactcagttgtcctgccgaccgtgagccacagtggcttcctctacaagactgcctctgccggcaagctgctacaggaccgccgggcccgggaagagttcagccggcgctggtgtgtccttggtgacggggtcctgagctactttgagaatgagcgggcagtgacccccaatggagagattcgggccagcgagattgtgtgcctggcagtgccccctcctgacacccatggctttgagcacacctttgaggtgtacacggagggagaacggctgtacctgtttgggctggagagtgcggagcaggctcatgagtgggtcaagtgtattgctaaggcattcgtgcctcccctagccgaggatctgctggcccgggattttgagcggctgggacgcctaccctacaaagctggcctgagcctacagcgggcccaggagggctggttctctctcagtggctcggagctccgtgctgtcttcccggaggggccctgcgaagagccgctgcaactacggaaactgcaggagctttccatccagggggacagtgagaaccaggtgctggtgctggtggagcgaaggaggacactgtacatacagggcgagcggcggctggacttcatgggttggctgggggccatccagaaagcagccgccagcatgggggacacgctgtcggagcagcagcttggggactcggatatcccggtgatcgtgtaccgctgtgtggactacatcacgcagtgcggcctgacctccgagggcatctaccgcaagtgtgggcagacatcgaagacacagcggctgctggagagcctgcggcaggatgcgcgctctgtgcacctcaaggagggcgagcagcacgtggatgatgtttcctcggcgctcaagcgcttcctgcgcgacctgcctgatgggctcttcactcgcgcccagcgcctaacctggctggaggcctcagagattgaggacgaggaggagaaggtctccaggtaccgagagctgctggtgcggctgccccctgtcaaccgggccacagtgaaggcccttatcagccacctgtactgtgttcagtgcttctcagacacgaaccagatgaacgtgcacaacctggcaattgtgtttgggcccacgctcttccagacagatgggcaggactacaaggctggccgtgtggtggaagacctcattaaccactatgtggtggtgtttagtgtggatgaggaagagctcaggaagcagcgggaggagatcactgccattgtgaagatgcgcgtggctggcactgccagtgggacccagcatgccggtgacttcatctgcacagtgtatctggaagagaagaaggcagagactgagcagcatatcaaggtcccagcatccatgactgctgaggagctcaccctggagatcctggatcgccggaacgtgggcatcagggagaaggactattggacctgctttgaggtcaacgagagggaggaggcagagcgccccctgcactttgcggagaaggtgctgcccatcctgcacgggctgggcacggacagccacctggtggtgaagaagcaccaggccatggaggccatgctgctgtacctggccagccgtgtcggtgacaccaagcatggcatgatgaagttccgtgaggaccgcagcctcctgggcctgggcctgccctcaggtggcttccacgatcgctacttcatcctcaacagcagctgcttgcggctctacaaggaggtccgggtaagtggccccgctgggttctgccccagggtgggcacctgtacacctgaatgtgctcagagattccccttggtctgcaagtggaaatattcccgttacaggctctcaggatggcacagcagtgggggagaactgtagactctcaagacccctcctgctgtggccctggacggccactctagtgtgccctgtagccccactaagccctggcacccggatgccatcacaccactccatgcccatgctctgtctcactgtgcctgtgccttatcactgcatccacaggaacctgttacttgatgacagccccaagttgtgcatgcatgccttgtcatatcgtatgtcatatgcctcccgggccaccctcctccctcattctgtccacatgcaggtgttctcccaacccagactccatttgacaccctccaccttctgcacatacatgccatacacacaccccaaccccacacatcactgcacacttgtcgagtcctggctctaga

SEQ ID NO: 417457 - DNA, 3074 bp, Homo sapiens
  misc_feature (49)..(49): n is a, c, g, or t
gccggtctgacctcttatgaggagtctcccctgagatatatgctgtttnccaaaaaaaaaaaaaaaaaaaagagaatgtgctactttgagtctgacttcagtcactcttgctgtaaagtccatcttcttgccagtggccatttgggattcttcctccctagaacctggctgatcctcactctgagtgtggcttctgagggctggggtggtcctggaacctgtcctcctacccccggtcatttgcttgttgtccctctccctctccagatcttacatctatcagaaacgatgggtgagactggatactgatcacctgcgatactttgacagtaacaaggacgcttactctaagcgctttatctctgtggcctgcatctcccacgtggctgccatcggggaccagaagtttgaagtgatcacaaacaaccgaacctttgccttccgggcagagagtgatgtggagcggaaggagtggatgcaggccctgcagcaggccatggctgagcagcgtgcccgggcccggctctctagcgcttatctgctgggagttccaggctcagagcagcctgaccgcgctggcagcctggagcttcgtggcttcaagaataagctgtacgtggccgtggtcggggacaaagtgcagctctacaagaatctagaggagtaccacctgggcattggcatcaccttcatcgacatgagcgtgggcaacgtgaaggaagtggaccggcgcagcttcgacctcaccacgccctaccgcatcttcagcttctctgctgactcagagctagagaaggagcagtggttggaggccatgcagggagccatcgctgaggccctgtctacctcggaggtggccgagcgcatctgggctgcagcccccaacaggttctgtgctgactgcggggctcctcagcctgactgggcctccatcaacctctgtgttgttatctgcaagcgctgtgcaggggagcaccgtggcctgggcgctggcgtctccaaggtgcggagcctgaagatggacaggaaggtgtggacagaaacacttatcgagctcttcttacagctggggaatggcgctgggaaccgcttctgggcagccaacgtgccccccagtgaggccctgcagcccagcagcagccccagcacccggcggtgccacctggaggccaagtaccgtgagggcaagtaccgccgctaccacccgctctttggcaaccaggaggagctggacaaggccctgtgtgctgcagtcaccaccacagacctggctgagacccaggcgctcctgggctgtggggctgggatcaactgcttctcgggggaccctgaggcccccacgcccctggctcttgcagagcaggcggggcagacgctgcagatggaattccttcggaacaaccggaccacagaggtgcctcggctggactcgatgaagcccctggaaaagcactactcagttgtcctgccgaccgtgagccacagtggcttcctctacaagactgcctctgccggcaagctgctacaggaccgccgggcccgggaagagttcagccggcgctggtgtgtccttggtgacggggtcctgagctactttgagaatgagcgggcagtgacccccaatggagagattcgggccagcgagattgtgtgcctggcagtgccccctcctgacacccatggctttgagcacacctttgaggtgtacacggagggagaacggctgtacctgtttgggctggagagtgcggagcaggctcatgagtgggtcaagtgtattgctaaggcattcgtgcctcccctagccgaggatctgctggcccgggattttgagcggctgggacgcctaccctacaaagctggcctgagcctacagcgggcccaggagggctggttctctctcagtggctcggagctccgtgctgtcttcccggaggggccctgcgaagagccgctgcaactacggaaactgcaggagctttccatccagggggacagtgagaaccaggtgctggtgctggtggagcgaaggaggacactgtacatacagggcgagcggcggctggacttcatgggttggctgggggccatccagaaagcagccgccagcatgggggacacgctgtcggagcagcagcttggggactcggatatcccggtgatcgtgtaccgctgtgtggactacatcacgcagtgcggcctgacctccgagggcatctaccgcaagtgtgggcagacatcgaagacacagcggctgctggagagcctgcggcaggatgcgcgctctgtgcacctcaaggagggcgagcagcacgtggatgatgtttcctcggcgctcaagcgcttcctgcgcgacctgcctgatgggctcttcactcgcgcccagcgcctaacctggctggaggcctcagagattgaggacgaggaggagaaggtctccaggtaccgagagctgctggtgcggctgccccctgtcaaccgggccacagtgaaggcccttatcagccacctgtactgtgttcagtgcttctcagacacgaaccagatgaacgtgcacaacctggcaattgtgtttgggcccacgctcttccagacagatgggcaggactacaaggctggccgtgtggtggaagacctcattaaccactatgtggtggtgtttagtgtggatgaggaagagctcaggaagcagcgggaggagatcactgccattgtgaagatgcgcgtggctggcactgccagtgggacccagcatgccggtgacttcatctgcacagtgtatctggaagagaagaaggcagagactgagcagcatatcaaggtcccagcatccatgactgctgaggagctcaccctggagatcctggatcgccggaacgtgggcatcagggagaaggactattggacctgctttgaggtcaacgagagggaggaggcagagcgccccctgcactttgcggagaaggtgctgcccatcctgcacgggctgggcacggacagccacctggtggtgaagaagcaccaggccatggaggccatgctgctgtacctgggtaggtggtgcctgcagggtg

SEQ ID NO: 417458 - DNA, 746 bp, Homo sapiens
  misc_feature (49)..(49): n is a, c, g, or t
gccggtctgacctcttatgaggagtctcccctgagatatatgctgtttnccaaaaaaaaaaaaaaaaaaaagagaatgtgctactttgagtctgacttcagtcactcttgctgtaaagtccatcttcttgccagtggccatttgggattcttcctccctagaacctggctgatcctcactctgagtgtggcttctgagggctggggtggtcctggaacctgtcctcctacccccggtcatttgcttgttgtccctctccctctccagatcttacatctatcagaaacgatgggtgagactggatactgatcacctgcgatactttgacagtaacaaggacgcttactctaagcgctttatctctgtggcctgcatctcccacgtggctgccatcggggaccagaagtttgaagtgatcacaaacaaccgaacctttgccttccgggcagagagtgatgtggagcggaaggagtggatgcaggccctgcagcaggccatggctgagcagcgtgcccgggcccggctctctagcgcttatctgctgggagttccaggctcagagcagcctgaccgcgctggcagcctggagcttcgtggcttcaagaataagctgagtaccacctgggcattggcatcaccttcatcgacatgagcgtgggcaacgtgaaggaagtggaccggcgcagcttcgacctcaccacgccctaccgcatcttcaggtgaccctccatcttcttggctcaccg

SEQ ID NO: 417459 - DNA, 501 bp, Homo sapiens
gcagccgctactactactaaattcgcggccgtcgtcgacccgccaacatgggccgcgttcgcaccaaaaccgtgaagaaggcggcccgggtcatcatagaaaagtactacacgcgcctgggcaacgacttccacacgaacaagcgcgtgtgcgaggagatcgccattatccccagcaaaaagctccgcaacaagatagcaggttacgtcacgcatctgatgaagcgaattcagagaggcccagtaagaggtatctccatcaagctgcaggaggaggagagagaaaggagagacaattatgttcctgaggtctcagccttggatcaggagattattgaagtagatcctgacactaaggaaatgctgaagcttttggacttcggcagtctgtccaaccttcaggtcactcagcctacagttgggatgaatttcaaaacgcctcggggacctgtttgaattttttctgtagtgctgtattattttcaataaatctgggacaaca

SEQ ID NO: 417460 - DNA, 571 bp, Homo sapiens
ggtggctcccgagtaggctcagagcgaccgtggccgggcggaagcggctttctggcctaagctttaacaggcttcgcctgtgcttcctgtttcctcttttaccaaggacccgccaacatgggccgcgttcgcaccaaaaccgtgaagaaggcggcccgggtcatcatagaaaagtactacacgcgcctgggcaacgacttccacacgaacaagcgcgtgtgcgaggagatcgccattatccccagcaaaaagctccgcaacaagatagcaggttacgtcacgcatctgatgaagcgaattcagagaggcccagtaagaggtatctccatcaagctgcaggaggaggagagagaaaggagagacaattatgttcctgaggtctcagccttggatcaggagattattgaagtagatcctgacactaaggaaatgctgaagcttttggacttcggcagtctgtccaaccttcaggtcactcagcctacagttgggatgaatttcaaaacgcctcggggacctgtttgaattttttctgtagtgctgtattattttcaataaatctgggacaaca

SEQ ID NO: 417461 - DNA, 764 bp, Homo sapiens
caacatggtaggtgttttggctcgaggccgccatcctccacaatcgtcccccatctgcagcttcccgcggtcctcagcccacagagaggccctgggccgggaaggcgcagagccctgtcaggctggagcgcaacgggccggcggcttccgcattaagcccggcgcccggcactgtttagccgggccctctccggctcagcgcagccggcggtccccaaccacaccggccggggctcggcgccgcactcttcccagaaggttgcgctggctcgtgagtgatcctgtcctctccacccgcagacccgccaacatgggccgcgttcgcaccaaaaccgtgaagaaggcggcccgggtcatcatagaaaagtactacacgcgcctgggcaacgacttccacacgaacaagcgcgtgtgcgaggagatcgccattatccccagcaaaaagctccgcaacaagatagcaggttacgtcacgcatctgatgaagcgaattcagagaggcccagtaagaggtatctccatcaagctgcaggaggaggagagagaaaggagagacaattatgttcctgaggtctcagccttggatcaggagattattgaagtagatcctgacactaaggaaatgctgaagcttttggacttcggcagtctgtccaaccttcaggtcactcagcctacagttgggatgaatttcaaaacgcctcggggacctgtttgaattttttctgtagtgctgtattattttcaataaatctgggacaaca

SEQ ID NO: 417462 - DNA, 503 bp, Homo sapiens
aaagtaggctaggtacgaggccgggtggttaatcggccgacccgccaacatgggccgcgttcgcaccaaaaccgtgaagaaggcggcccgggtcatcatagaaaagtactacacgcgcctgggcaacgacttccacacgaacaagcgcgtgtgcgaggagatcgccattatccccagcaaaaagctccgcaacaagatagcaggttacgtcacgcatctgatgaagcgaattcagagaggcccagtaagaggtatctccatcaagctgcaggaggaggagagagaaaggagagacaattatgttcctgaggtctcagccttggatcaggagattattgaagtagatcctgacactaaggaaatgctgaagcttttggacttcggcagtctgtccaaccttcaggtcactcagcctacagttgggatgaatttcaaaacgcctcggggacctgtttgaattttttctgtagtgctgtattattttcaataaatctgggacaaca

SEQ ID NO: 417463 - DNA, 703 bp, Homo sapiens
gcagccgctactactactaaattcgcggccgtcgtcgacccgccaacatgggccgcgttcgcaccaaaaccgtgaagaaggcggcccgggtcatcatagaaaagtactacacgcgcctgggcaacgacttccacacgaacaagcgcgtgtgcgaggagatcgccattatccccagcaaaaagctccgcaacaagatagcaggttacgtcacgcatctgatgaagcgaattcagagaggcccagtaagaggtatctccatcaagctgcaggaggaggagagagaaaggagagacaattatgttcctgaggtctcagccttggatcaggagattattgaagtagatcctgacactaaggaaatgctgaagcttttggacttcggcagtctgtccaaccttcaggtcactcagcctacagttgggatgaatttcaaaacgcctcggggacctgtttgaattttttctgtagtgctgtattattttcaataaatctgggacaacagcaaaaaaaaaaaaaaaaaacaaaaaaaaaaaaaacaaaaaaaaacaaaaaaaaaaggggggggcctacagaaaggaacccccaggggggcccacaaagagagacgagcccacggttccgggaagccaagggggccccaaagggggagccctatcaaaacgacgaggctgggcgccctcaaaaagaggcggaaggggaaaag

SEQ ID NO: 417464 - DNA, 616 bp, Homo sapiens
  misc_feature (582)..(582): n is a, c, g, or t
caacatggtaggtgttttggctcgaggccgccatcctccacaatcgtcccccatctgcagcttcccgcggtcctcagcccacagagaggccctgggccgggaaggcgcagagccctgtcaggctggagcgcaacgggccggcggcttccgcattaagcccggcgcccggcactgtttagccgggccctctccggctcagcgcagccggcggtccccaaccacaccggccggggctcggcgccgcactcttcccagaaggttgcgctggctcgtgagtgatcctgtcctctccacccgcagacccgccaacatgggccgcgttcgcaccaaaaccgtgaagaaggcggcccgggtcatcatagaaaagtactacacgcgcctgggcaacgacttccacacgaacaagcgcgtgtgcgaggagatcgccattatcagaggcccagtaagaggtatctccatcaagctgcaggaggaggagagagaaaggagagacaattatgttcctgaggtctcagccttggatcaggagattattgaagtagatcctgacactaaggaaatgctgaagcttttggtgctganagctttgggacttcgcagtctgtccccttaggtc

SEQ ID NO: 417465 - DNA, 1424 bp, Homo sapiens
ggtggctcccgagtaggctcagagcgaccgtggccgggcggaagcggctttctggcctaagctttaacaggcttcgcctgtgcttcctgtttcctcttttaccaaggacccgccaacatgggccgcgttcgcaccaaaaccgtgaagaaggcggcccgggtcatcatagaaaagtactacacgcgcctgggcaacgacttccacacgaacaagcgcgtgtgcgaggagatcgccattatccccagcaaaaagctccgcaacaagatagcaggttacgtcacgcatctgatgaagcgaattcagagaggcccagtaagaggtatctccatcaagctgcaggaggaggagagagaaaggagagacaattatgttcctgaggtctcagccttggatcaggagattattgaagtagatcctgacactaaggaaatgctgaagcttttggacttcggcagtctgtccaaccttcaggtcactcagcctacagttgggatgaatttcaaaacgcctcggggacctgtttgaattttttctgtagtgctgtattattttcaataaatctgggacaacagcaacaaacaaaaacaaagacacaagaaaaaacacacagggagactaacatggaggcagggaagccagaaaaagagggatacacaacagcgcgcaagcgggcacacacaaaaacgcaacacacgcgaacacccacagaaacacaccagcgagcacacaaaggggacaacacccacggccgagacacacacaagacgaccagagacaagacaacaagacaacgaaaaaaagacaaggaacacacacgggaacacacaaagaagaagaggacaaaagaaaacagcaaggcaacgacgacacacaggagaaaaagaaacagagcaaaagaccaacacgcgacgggaccgccaaacaaggcggagcgaggaagccggcagagcggaaggagcaggccacccaggagaacgcgggacgagggcgagaaaaagcagacaaaagaagaagacacgaacgcagacagcacaggcagccagcgacccacaaaacggccgaaaggagaaaaacagaaaagggggaggaaagaggaggcgacgagcgaaggaaagaacgggcgacgaacagaggagaagggaggagaacaggggagaaagcggggagacggacaaggcggcagagacgggagcagaaggggacgacgaacgacccaggccacgaagccagaaaacaagcaacgcaaacaacgaacgacagaggcacacagaagcaacgagacagaacgcaaccgagacaagaaagggaagacaggggacaagggcgaaagagagcaaaagcaaagaataaaaggagaaagaggaggaaagaggagagaacgcaggaaggaggggaagaagacggaagaagagcgaataaggaaa

SEQ ID NO: 417466 - DNA, 863 bp, Homo sapiens
gcagccgctactactactaaattcgcggccgtcgtcgacccgccaacatgggccgcgttcgcaccaaaaccgtgaagaaggcggcccgggtcatcatagaaaagtactacacgcgcctgggcaacgacttccacacgaacaagcgcgtgtgcgaggagatcgccattatccccagcaaaaagctccgcaacaagatagcaggttacgtcacgcatctgatgaagcgaattcagagaggcccagtaagaggtatctccatcaagctgcaggaggaggagagagaaaggagagacaattatgttcctgaggtctcagccttggatcaggagattattgaagtagatcctgacactaaggaaatgctgaagcttttggtggtaagtgtttgctggattcctaaagtggtattttcctggtcaaaaaccatcagtaggtcttattatccaaggtcacccagctagtaagtggcagagttgggaatcccatctaaacttgtagccactaaactggactgctttcataaggggtgtagcggaagttgtgtgcattgagttagttcgccacaagatcatgattcccaaatctagtggcttccaggacaccttttctctcttggctgcttctgttcttggtttatagctggcttacgttgccccctttgtgtcagccctggctgaatctccctgcttttcttctgtgaaggcattcctttggtgtctccatgctaaccactcagaaatgagcttagggtccattatccaggtacatacaaggcactacttaggtagatcacgagtatcttcattgcactttggatgtatcctatggcttatctttagtcctttggcatacttggggtgaaa

SEQ ID NO: 417467 - DNA, 786 bp, Homo sapiens
ggtggctcccgagtaggctcagagcgaccgtggccgggcggaagcggctttctggcctaagctttaacaggcttcgcctgtgcttcctgtttcctcttttaccaaggacccgccaacatgggccgcgttcgcaccaaaaccgtgaagaaggcggcccgggtcatcatagaaaagtactacacgcgcctgggcaacgacttccacacgaacaagcgcgtgtgcgaggagatcgccattatccccagcaaaaagctccgcaacaagatagcaggttacgtcacgcatctgatgaagcgaattcagagaggcccagtaagaggtatctccatcaagctgcaggaggaggagagagaaaggagagacaattatgttcctgaggtctcagccttggatcaggagattattgaagtagatcctgacactaaggaaatgctgaagcttttggacttcggcagtctgtccaaccttcaggtcactcagcctacagttgggatgaatttcaaaacgcctcggggacctgtttgaattttttctgtagtgctgtattattttcaataaatctgggacaacaaaaaaaaaaaaaaaaaaaaaaaaaaaaaaaaaaaaaaaaaaaaaaaaacaaaaaaaaaaaaaaaaacacccggaggacacaaggggggggggcgaacaaacaggcacaaaagggcgaagtggataaaggtgtcggaaaaaggtttgttgtaaaaaggggaaacacgggaggccaaaagggggggaaaatataaacaaaaaggagaaacctgttaa

SEQ ID NO: 417468 - DNA, 1236 bp, Homo sapiens
ggggataatggcgatctcctcgcacacgcgcttgttcgtgtggaagtcgttgcccagcaaaaagctccgcaacaagatagcaggttacgtcacgcatctgatgaagcgaattcagagaggcccagtaagaggtatctccatcaagctgcaggaggaggagagagaaaggagagacaattatgttcctgaggtctcagccttggatcaggagattattgaagtagatcctgacactaaggaaatgctgaagcttttggacttcggcagtctgtccaaccttcaggtcactcagcctacagttgggatgaatttcaaaacgcctcggggacctgtttgaattttttctgtagtgctgtattattttcaataaatctgggacaacagcaacaaacaaaaacaaagacacaagaaaaaacacacagggagactaacatggaggcagggaagccagaaaaagagggatacacaacagcgcgcaagcgggcacacacaaaaacgcaacacacgcgaacacccacagaaacacaccagcgagcacacaaaggggacaacacccacggccgagacacacacaagacgaccagagacaagacaacaagacaacgaaaaaaagacaaggaacacacacgggaacacacaaagaagaagaggacaaaagaaaacagcaaggcaacgacgacacacaggagaaaaagaaacagagcaaaagaccaacacgcgacgggaccgccaaacaaggcggagcgaggaagccggcagagcggaaggagcaggccacccaggagaacgcgggacgagggcgagaaaaagcagacaaaagaagaagacacgaacgcagacagcacaggcagccagcgacccacaaaacggccgaaaggagaaaaacagaaaagggggaggaaagaggaggcgacgagcgaaggaaagaacgggcgacgaacagaggagaagggaggagaacaggggagaaagcggggagacggacaaggcggcagagacgggagcagaaggggacgacgaacgacccaggccacgaagccagaaaacaagcaacgcaaacaacgaacgacagaggcacacagaagcaacgagacagaacgcaaccgagacaagaaagggaagacaggggacaagggcgaaagagagcaaaagcaaagaataaaaggagaaagaggaggaaagaggagagaacgcaggaaggaggggaagaagacggaagaagagcgaataaggaaa

SEQ ID NO: 417469 - DNA, 1068 bp, Homo sapiens
ggtggctcccgagtaggctcagagcgaccgtggccgggcggaagcggctttctggcctaagctttaacaggcttcgcctgtgcttcctgtttcctcttttaccaaggacccgccaacatgggccgcgttcgcaccaaaaccgtgaagaaggcggcccgggtcatcatagaaaagtactacacgcgcctgggcaacgacttccacacgaacaagcgcgtgtgcgaggagatcgccattatccccagcaaaaagctccgcaacaagatagcaggttacgtcacgcatctgatgaagcgaattcagagaggcccagtaagaggtatctccatcaagctgcaggaggaggagagagaaaggagagacaattatgttcctgaggtctcagccttggatcaggagattattgaagtagatcctgacactaaggaaatgctgaagcttttggacttcggcagtctgtccaaccttcaggtcactcagcctacagttgggatgaatttcaaaacgcctcggggacctgtttgaattttttctgtagtgctgtattattttcaataaatctgggacaacaaaaaaaaaaaaaaaaaaaaaaaaaaaacaaaaaaaaaaaaagagagggggggggggataaaaattttcccggggggggcccaaattttaagcgcgttatccccggctttttgtgtttccaagggtggcccccataagggggagcgcgttttttagcccggggccgcgggcgcggcgtatcacagcggcttgtgggcgtgggaaaacccgtcgtcaccgtgtgggcactctttggcgaaggcgacccgctttatatttggggggggggcggggagacaatttatttgtgagcaacaattttactcctaaaaagagaagagtatcttaagacaggggtcatagagggggacaatatattaaaactttttaaaagggttgtatataattgtggtgttaaacacaaataggtggtaatattattttgttacgagtgtgttaaaaacactttattcgactcaaacggaggatatatattttagggaacattttttttcggag

SEQ ID NO: 417470 - DNA, 763 bp, Homo sapiens
  misc_feature (763)..(763): n is a, c, g, or t
ggtggctcccgagtaggctcagagcgaccgtggccgggcggaagcggctttctggcctaagctttaacaggcttcgcctgtgcttcctgtttcctcttttaccaaggacccgccaacatgggccgcgttcgcaccaaaaccgtgaagaaggcggcccgggtcatcatagaaaagtactacacgcgcctgggcaacgacttccacacgaacaagcgcgtgtgcgaggagatcgccattatccccagcaaaaagctccgcaacaagatagcaggttacgtcacgcatctgatgaagcgaattcagagaggcccagtaagaggtatctccatcaagctgcaggaggaggagagagaaaggagagacaattatgttcctgaggtctcagccttggatcaggagattattgaagtagatcctgacactaaggaaatgctgaagcttttggacttcggcagtctgtccaaccttcaggtcactcagcctacagttgggatgaatttcaaaacgcctcggggacctgtttgaattttttctgtagtgctgtattattttcaataaatctgggacaacaaaaaaaaaaaaaaaaaaaaaaccccgcaggccccaaggccgcgcgcgcgacacacgaggcacggacggggcccggggcccccgcggtcccggacccagctcccggcccaaaggggaaaaccggccggccccccaacagcggaccccgcacaaccccccaacaccccggccacccggcccacgcccccgcacn

SEQ ID NO: 417471 - DNA, 595 bp, Homo sapiens
ggtggctcccgagtaggctcagagcgaccgtggccgggcggaagcggctttctggcctaagctttaacaggcttcgcctgtgcttcctgtttcctcttttaccaaggacccgccaacatgggccgcgttcgcaccaaaaccgtgaagaaggcggcccgggtcatcatagaaaagtactacacgcgcctgggcaacgacttccacacgaacaagcgcgtgtgcgaggagatcgccattatccccagcaaaaagctccgcaacaagatagcaggttacgtcacgcatctgatgaagcgaattcagagaggcccagtaagaggtatctccatcaagctgcaggaggaggagagagaaaggagagacaattatgttcctgaggtctcagccttggatcaggagattattgaagtagatcctgacactaaggaaatgctgaagcttttggacttcggcagtctgtccaaccttcaggtcactcagcctacagttgggatgaatttcaaaacgcctcggggacctgtttgaattttttctgtagtgctgtattattttcaataaatctgggacaacagctggggaaaaaaaacaaaaacaa

SEQ ID NO: 417472 - DNA, 253 bp, Homo sapiens
ccaagtgtagatgtagcattgttccacacatttaaaacatttgaaggacctaaattcgtagcaaattctgtggcagttttaaaaagttaagctgctatagtaagttactgggcattctcaatacttgaatatggaacatatgcacaggggaaggaaataacattgcactttataaacactgtattgtaagtggaaaatgcaatgtcttaaataaaactatttaaaattggcaccataaaaaaagaaaccttaa

SEQ ID NO: 417473 - DNA, 182 bp, Homo sapiens
cggacgcgtgggtcgacccacgcgtccggtaagttactgggcattctcaatacttgaatatggaacatatgcacaggggaaggaaataacattgcactttataaacactgtattgtaagtggaaaatgcaatgtcttaaataaaactatttaaaattggcaccataaaaaaagaaaccttaa

SEQ ID NO: 417474 - DNA, 1696 bp, Homo sapiens
  misc_feature (1)..(2): n is a, c, g, or t
nncacgagcctggctctactgcaggcgctgggggttggggtgggggagaggcccagggcacatgatgccgcccccagcccgcccagcacatgacccaggcaggccggcggggtcctggcacacccgagccgcgtccgcgaacacagcccatggcctccccgcgcctagggaccttctgctgccccacgcgggacgcagccacgcagctcgtgctgagcttccagccgcgggccttccacgcgctctgcctgggcagcggcgggctccgcttggcgctgggccttctgcagctgctgcccggccgccggcccgcgggccccgggtcccccgcgacgtccccgccggcctcggtccgcatcctgcgcgctgccgctgcctgcgaccttctcggctgcctgggtatggtgatccggtccaccgtgtggttaggattcccaaattttgttgacagcgtctcggatatgaaccacacggaaatttggcctgctgctttctgcgtggggagtgcgatgtggatccagctgttgtacagtgcctgcttctggtggctgttttgctatgcagtggatgcttatctggtgatccggagatcggcaggactgagcaccatcctgctgtatcacatcatggcgtggggcctggccaccctgctctgtgtggagggagccgccatgctctactacccttccgtgtccaggtgtgagcggggcctggaccacgccatcccccactatgtcaccatgtacctgcccctgctgctggttctcgtggcgaaccccatcctgttccaaaagacagtgactgcagtggcctctttacttaaaggaagacaaggcatttacacggagaacgagaggaggatgggagccgtgatcaagatccgatttttcaaaatcatgctggttttaattatttgttggttgtcgaatatcatcaatgaaagccttttattctatcttgagatgcaaacagatatcaatggaggttctttgaaacctgtcagaactgcagccaagaccacatggtttattatgggaatcctgaatccagcccagggatttctcttgtctttggccttctacggctggacaggatgcagcctgggttttcagtctcccaggaaggagatccagtgggaatcactgaccacctcggctgctgagggggctcacccatccccactgatgccccatgaaaaccctgcttccgggaaggtgtctcaagtgggtgggcagacttctgacgaagccctgagcatgctgtctgaaggttctgatgccagcacaattgaaattcacactgcaagtgaatcctgcaacaaaaatgagggtgaccctgctctcccaacccatggagacctatgaaggggatgtgctgggggtccagaccccatattcctcagactcaacaattcttgttctttagaactgtgttctcaccttcccaacactgcactgccgaagtgtagcggcccccaaaccttgctctcatcaccagctagagcttcttcccgaagggcctttaggataggagaaagggttcatgcacacacgtgtgagaatggaagagccccctccagaccactctacagctgctctagccttagttgccactaggaagttttctgaggctggctgtaaagtaagtgtaaggtccacatccttggggaagtagttaaataaaatagttatgactg

SEQ ID NO: 417475 - DNA, 1767 bp, Homo sapiens
  misc_feature (1)..(2): n is a, c, g, or t
nncacgagcctggctctactgcaggcgctgggggttggggtgggggagaggcccagggcacatgatgccgcccccagcccgcccagcacatgacccaggcaggccggcggggtcctggcacacccgagccgcgtccgcgaacacagcccatggcctccccgcgcctagggaccttctgctgccccacgcgggacgcagccacgcagctcgtgctgagcttccagccgcgggccttccacgcgctctgcctgggcagcggcgggctccgcttggcgctgggccttctgcagctgctgcccggccgccggcccgcgggccccgggtcccccgcgacgtccccgccggcctcggtccgcatcctgcgcgctgccgctgcctgcgaccttctcggctgcctgggtatggtgatccggtccaccgtgtggttaggattcccaaattttgttgacagcgtctcggatatgaaccacacggaaatttggcctgctgctttctgcgtggggagtgcgatgtggatccagctgttgtacagtgcctgcttctggtggctgttttgctatgcagtggatgcttatctggtgatccggagatcggcaggactgagcaccatcctgctgtatcacatcatggcgtggggcctggccaccctgctctgtgtggagggagccgccatgctctactacccttccgtgtccaggtgtgagcggggcctggaccacgccatcccccactatgtcaccatgtacctgcccctgctgctggttctcgtggcgaaccccatcctgttccaaaagacagtgactgcagtggcctctttacttaaaggaagacaaggcatttacacggagaacgagaggaggatgggagccgtgatcaagatccgatttttcaaaatcatgctggttttaattatttgttggttgtcgaatatcatcaatgaaagccttttattctatcttgagatgcaaacagatatcaatggaggttctttgaaacctgtcagaactgcagccaagaccacatggtttattatgggaatcctgaatccagcccagggatttctcttgtctttggccttctacggctggacaggatgcagcctgggttttcagtctcccaggaaggagatccagtgggaatcactgaccacctcggctgctgagggggctcacccatccccactgatgccccatgaaaaccctgcttccgggaaggtgtctcaagtgggtgggcagacttctgacgaagccctgagcatgctgtctgaaggttctgatgccagcacaattgaaattcacactgcaagtgaatcctgcaacaaaaatgagggtgaccctgctctcccaacccatggagacctatgaaggggatgtgctgggggtccagaccccatattcctcagactcaacaattcttgttctttagaactgtgttctcaccttcccaacactgcactgccgaagtgtagcggcccccaaaccttgctctcatcaccagctagagcttcttcccgaagggcctttaggataggagaaagggttcatgcacacacgtgtgagaatggaagagccccctccagaccactctacagctgctctagccttagttgccactaggaagttttctgaggctggctgtaaagtaagtgtaaggtccacatccttggggaagtagttaaataaaatagttatgactgagctctcagcctgacttggattctgtcttaacacttctagcaaaagaaaataaatatatgtacagttaaaa

SEQ ID NO: 417476 - DNA, 940 bp, Homo sapiens
  misc_feature (1)..(2): n is a, c, g, or t
nncacgagcctggctctactgcaggcgctgggggttggggtgggggagaggcccagggcacatgatgccgcccccagcccgcccagcacatgacccaggcaggccggcggggtcctggcacacccgagccgcgtccgcgaacacagcccatggcctccccgcgcctagggaccttctgctgccccacgcgggacgcagccacgcagctcgtgctgagcttccagccgcgggccttccacgcgctctgcctgggcagcggcgggctccgcttggcgctgggccttctgcagctgctgcccggccgccggcccgcgggccccgggtcccccgcgacgtccccgccggcctcggtccgcatcctgcgcgctgccgctgcctgcgaccttctcggctgcctgggtatggtgatccggtccaccgtgtggttaggattcccaaattttgttgacagcgtctcggatatgaaccacacggaaatttggcctgctgctttctgcgtggggagtgcgatgtggatccagctgttgtacagtgcctgcttctggtggctgttttgctatgcagtggatgcttatctggtgatccggagatcggcaggactgagcaccatcctgctgtatcacatcatggcgtggggcctggccaccctgctctgtgtggagggagccgccatgctctactacccttccgtgtccagagggagatgtggccgctggaactgtctcaagcatttcctcaagtttacattcctgtccatgcaaccctcagttgcaaagccaaggtctttccaaggatatatactctaacttccaatggaaaactggaaaatggaagtggacagtgtctttgtctgtgatttttataccagggatcaacacagtgtagccctcaggacaaatccggcgttcttccgtttttgtaaataaagttttattggaat

SEQ ID NO: 417477 - DNA, 1037 bp, Homo sapiens
tgttagctttaagcatccttttgataaactatctctttaagagaaattgattctctgtgtatagttcttttaaaaggcatagacgtggccaggagcggtggctcatgcctgtaatcccagtgctttggaaggccaagatgtgaggattgcttgaggccaggagtttgagaccagcctgggcaacatagggagaccccgtccctacaaaaaacattaaaaattagccaggtacaatggcatgcatctgtagtcccagccacatgggaggctgaggcaggaggatcgcttgagcccagcagatgctgctatgatctatggtcacgccactgtactatagcctgggtgacagaatgaatgaatacatagacaaccctggattttgagaaaaaacaaatattgactgtacttcagttatccatttgttcctggttgcaagaaaacagtttttatatcaatgtttaagagaattaatggttcagatgtcacatagaatttttattctttgaaagaataatttttattccagatactcatttctttactaatcctagcccagtctctagcccagagccatcattgcaccactgcacaccaggttgggcaacagagaaaaacccttttccaaaaagaaaaaaaattcaaaaactgcttttagctcatggtggtagattacgtaaaacaggtggattaccactggagaaactgggcgaagcatacaagggctttttctgtattacttcttacaactgcacatgaatctacaattatctcaataaaaatttcaatttaacttgcaggttattggctagagttgacccataggcgttaatttcctaactcctgctctagctggtcagagcagcttatgagatatggtattgaattttaaactattgctttaaaaaatttttttattaatatttgtgattataggatacacatgatattttgttacatgcatagaatgtgtcatgatctagtcaatgtatttggggtgtctatcgcctcgagtattcattttttttttgagacagcct

SEQ ID NO: 417478 - DNA, 258 bp, Homo sapiens
aacaaaataatagtgacttacatttacatcttgcttctgaactgtcagtacatttactagctgtcagtaaaagagaaaaataaaaaaaactgactgtcagttttaaaagacagtaagaaagagaaagtatgccagtaaatgtagagaaaataattttgaaaaatattttacctacttcagcatgagtttttgtcctgtgtgaaatgtataactacataatttgaattgtttgatatcttaaaaccatagattctagga

SEQ ID NO: 417479 - DNA, 1483 bp, Homo sapiens
ggggctgctggagcttgggggctggtggcaggaacaagccctttccgaccccatggagctgtatgagacatccccctacttctaccaggaaccccgcttctatgatggggaaaactacctgcctgtccacctccagggcttcgaaccaccaggctacgagcggacggagctcaccctgagccccgaggccccagggccccttgaggacaaggggctggggacccccgagcactgtccaggccagtgcctgccgtgggcgtgtaaggtgtgtaagaggaagtcggtgtccgtggaccggcggcgggcggccacactgagggagaagcgcaggctcaagaaggtgaatgaggccttcgaggccctgaagagaagcaccctgctcaaccccaaccagcggctgcccaaggtggagatcctgcgcagtgccatccagtacatcgagcgcctccaggccctgctcagctccctcaaccaggaggagcgtgacctccgctaccggggcgggggcgggccccagccaggggtgcccagcgaatgcagctctcacagcgcctcctgcagtccagagtggggcagtgcactggagttcagcgccaacccaggggatcatctgctcacggctgaccctacagatgcccacaacctgcactccctcacctccatcgtggacagcatcacagtggaagatgtgtctgtggccttcccagatgaaaccatgcccaactgagattgtcttccaagccgggcatccttcgagccccccaagctggccacagatgccactacttctgtagcaggggcctcctaagccaggctgccctgatgctaggaagccagctctggggtgccataggccagactatccccttcctcatccatgtaaggttaacccaccccccagcaagggactggacgccctcattcagctgcctccttagaggagagggcatccctttccagggaggtaaagcaggggaccagagcgccccctcgtgtatgccccagctcagggggcaaactcaggagcttcctttttatcataacgcggcctctaattccaccccccaagtgaaacggtttgagagacgccgtgccctgacctggacaagctgtgcacgtctcctgttctggtctcttcccgatgcagtggctggctggcctgccctgaattgagagagaagaagggggagaggaacagccctctgttcccaagtcctggggggccaaacttttgcagtgaatattgggaaccttccagtggttttatgttttgttttgtttcgtgtgttgtttgtaaagctgccatccgaccaaggtctcctgtgctgaagttgccggggacaggcagggaaaaggggttggggcctcttgggggtgatttcttttgttaacaaagcatcgtgtggttttgccattgttttgtattttttttttttttttttttttttgctaacttatttggatttccttttttaaaaaatga

SEQ ID NO: 417480 - DNA, 1483 bp, Homo sapiens
gtctatgatacgaggtgtttgacgcagaccaccgttgtgacttggtgcaagtaggtcctcctagttctcatcgaggcaagcgtctgcttgtatgatggggaaaatcttgcctggctttgcttcctcacttcctagaggcttcgaaccaccaggctacgagcggacggagctcaccctgagccccgaggccccagggccccttgaggacaaggggctggggacccccgagcactgtccaggccagtgcctgccgtgggcgtgtaaggtgtgtaagaggaagtcggtgtccgtggaccggcggcgggcggccacactgagggagaagcgcaggctcaagaaggtgaatgaggccttcgaggccctgaagagaagcaccctgctcaaccccaaccagcggctgcccaaggtggagatcctgcgcagtgccatccagtacatcgagcgcctccaggccctgctcagctccctcaaccaggaggagcgtgacctccgctaccggggcgggggcgggccccagccaggggtgcccagcgaatgcagctctcacagcgcctcctgcagtccagagtggggcagtgcactggagttcagcgccaacccaggggatcatctgctcacggctgaccctacagatgcccacaacctgcactccctcacctccatcgtggacagcatcacagtggaagatgtgtctgtggccttcccagatgaaaccatgcccaactgagattgtcttccaagccgggcatccttcgagccccccaagctggccacagatgccactacttctgtagcaggggcctcctaagccaggctgccctgatgctaggaagccagctctggggtgccataggccagactatccccttcctcatccatgtaaggttaacccaccccccagcaagggactggacgccctcattcagctgcctccttagaggagagggcatccctttccagggaggtaaagcaggggaccagagcgccccctcgtgtatgccccagctcagggggcaaactcaggagcttcctttttatcataacgcggcctctaattccaccccccaagtgaaacggtttgagagacgccgtgccctgacctggacaagctgtgcacgtctcctgttctggtctcttcccgatgcagtggctggctggcctgccctgaattgagagagaagaagggggagaggaacagccctctgttcccaagtcctggggggccaaacttttgcagtgaatattgggaaccttccagtggttttatgttttgttttgtttcgtgtgttgtttgtaaagctgccatccgaccaaggtctcctgtgctgaagttgccggggacaggcagggaaaaggggttggggcctcttgggggtgatttcttttgttaacaaagcatcgtgtggttttgccattgttttgtattttttttttttttttttttttttgctaacttatttggatttccttttttaaaaaatga

SEQ ID NO: 417481 - DNA, 1493 bp, Homo sapiens
ctcagagccttcctgatgtatatatgcaggtagtgagaattgaatcggccctttgagacagtaatataataaaactctgatttggggagcagcggttctccttatttttctactctcttgtgggaatgagttgccaagcttttacttcggctgatacctttatacctctgaattctgacgcctctgcaactctgcctctgataatgcatcacagtgctgccgagtgtctaccagtctccaaccatgccaccaatgtgatgtctacagcaacaggacttcattattctgttccttcctgtcattatggaaaccagccatcaacctatggagtgatggcaggtagtttaaccccttgtctttataaatttcctgaccacaccttgagtcatggatttcctcctatacaccagcctcttctggcagaggaccccacagctgctgatttcaagcaggaactcaggcggaaaagtaaattggtggaagagccaatagacatggattctccagaaatcagagaacttgaaaagtttgccaatgaatttaaagtgagacgaattaaattaggatacacccagacaaatgttggggaggccctggcagctgtgcatggctctgaattcagtcaaacaacaatctgccgatttgaaaatctgcagctcagctttaaaaatgcatgcaaactgaaagcaatattatccaaatggctggaggaagctgagcaagtaggagctttgtacaatgaaaaagtgggagcaaatgaaaggaaaagaaaacgaagaacaactataagcattgctgctaaagatgctctggagagacactttggagaacagaataaaccttcttctcaagagatcatgaggatggctgaagaactgaatctggagaaagaagtagtaagagtttggttttgcaaccggaggcagagagaaaaacgggtgaaaacaagtctgaatcagagtttattttctatttctaaggaacatcttgagtgcagataagatttttctattgtataatagcctttttctcccgtttcattcctttctcttcctcaacaaaaacagaaattacttggttgacttaaaatcattttatatcaatagcttttacagaagctttacttttccacttttttttaaaaaaaagaaaccaacaatttaaattatattgatgttatttacttaaaataattattctcagaagccacattatctattttaagccaaatatattaacagtaataaaatgatctctctgtctctcccgctctctttctcacacacacgcagacatatgagtatgggtttataagttccttttccaaacatgtatattagctttttaacatgtaagtcagtaatgacacatatgtaaagcacatcaccagaaatatccaattcaaaaattaaccaatgttctgctttctaccaactctactaatttgtctgaactaaaagttttgaacttaagagctggaggtgtcttatagt

SEQ ID NO: 417482 - DNA, 1487 bp, Homo sapiens
  misc_feature (5)..(5): n is a, c, g, or t
tctanagtcccatctattttgtctttgatccaaactcctaaatgtttgtgcacacatttctcggtgacaacgttgggaaacacagcaacaggacttcattattctgttccttcctgtcattatggaaaccagccatcaacctatggagtgatggcaggtagtttaaccccttgtctttataaatttcctgaccacaccttgagtcatggatttcctcctatacaccagcctcttctggcagaggaccccacagctgctgatttcaagcaggaactcaggcggaaaagtaaattggtggaagagccaatagacatggattctccagaaatcagagaacttgaaaagtttgccaatgaatttaaagtgagacgaattaaattaggatacacccagacaaatgttggggaggccctggcagctgtgcatggctctgaattcagtcaaacaacaatctgccgatttgaaaatctgcagctcagctttaaaaatgcatgcaaactgaaagcaatattatccaaatggctggaggaagctgagcaagtaggagctttgtacaatgaaaaagtgggagcaaatgaaaggaaaagaaaacgaagaacaactataagcattgctgctaaacgactgctctggacgacgacccctttggacaacccgaactaaacccattcttcatcacgacgactcctgactgatggcttgaagaccctgacctcttggcgaaacgacacgtagtaccgacgttttggtatatgccacccgcgacggtcagagaccaaaaacaccggggttgacaaaccaacgtcttgaatccagagtttcatttatctcatttctcaagtgaacatcattgcagtgcgaggatcaagcatttttactcatctgtcataaatagccctttatactcaccggtttccattccctattctctttccctccaagcaacaaaccaggcaaattcaacttgggttttgcaccttcaacacatccatttctcatactcaacatagcctactataacgagaacgcctatcaactatttaccacgttattctttacataacaaccacacaagtaacacacactcgcacggggggggccccgtgtaccgccaagtaggcactaatcgatgagatggtcattaacaattacactggccggtccgattaaacaacgagtacgtgtacctgggggcccctgcacgttacccaaacttatatctgccatgtcagcaacatcccccatatcgaccaactggcgctacctaggcacaatgtccgagccggatcagcccttcccagcagttgtccacactaacatggcaatggcaacctgtatccgacacatatcgcacaatacggatcaatttggtcacacgatctatttaccccatcgcaaccggcaggggcgataagcacagaaccagaatggtagaggtcccctgacaaagcctatcacattcctcttatgacgctatgaggccccct

SEQ ID NO: 417483 - DNA, 1311 bp, Homo sapiens
  misc_feature (5)..(5): n is a, c, g, or t
tctanagtcccatctattttgtctttgatccaaactcctaaatgtttgtgcacacatttctcggtgacaacgttgggaaacacagcaacaggacttcattattctgttccttcctgtcattatggaaaccagccatcaacctatggagtgatggcaggtagtttaaccccttgtctttataaatttcctgaccacaccttgagtcatggatttcctcctatacaccagcctcttctggcagaggaccccacagctgctgatttcaagcaggaactcaggcggaaaagtaaattggtggaagagccaatagacatggattctccagaaatcagagaacttgaaaagtttgccaatgaatttaaagtgagacgaattaaattaggatacacccagacaaatgttggggaggccctggcagctgtgcatggctctgaattcagtcaaacaacaatctgccgatttgaaaatctgcagctcagctttaaaaatgcatgcaaactgaaagcaatattatccaaatggctggaggaagctgagcaagtaggagctttgtacaatgaaaaagtgggagcaaatgaaaggaaaagaaaacgaagaacaactataagcattgctgctaaagatgctctggagagacactttggagaacagaataaaccttcttctcaagagatcatgaggatggctgaagaactgaatctggagaaagaagtagtaagagtttggttttgcaaccggaggcagagagaaaaacgggtgaaaacaagtctgaatcagagtttattttctatttctaaggaacatcttgagtgcagataagatttttctattgtataatagcctttttctcccgtttcattcctttctcttcctcaacaaaaacagaaattacttggttgacttaaaatcattttatatcaatagcttttacagaagctttacttttccacttttttttaaaaaaaagaaaccaacaatttaaattatattgatgttatttacttaaaataattattctcagaagccacattatctattttaagccaaatatattaacagtaataaaatgatctctctgtctctcccgctctctttctcacacacacgcagacatatgagtatgggtttataagttccttttccaaacatgtatattagctttttaacatgtaagtcagtaatgacacatatgtaaagcacatcaccagaaatatccaattcaaaaattaaccaatgttctgctttctaccaactctactaatttgtctgaactaaaagttttgaacttaagagctggaggtgtcttatagt

SEQ ID NO: 417484 - DNA, 332 bp, Homo sapiens
ggagttcaagatcagcctgggcctcataaggagacccccatctctttatttaaaaaataaaataaaactacatgccggccaagagcagtggctcacgcctgtaatcccagcactttgggaggctgaggcaggtggatcacctgaggtcaggagtttgaaatcagcctgaccaatatggtgaaaccccgtctctaataaaaatataaaaattagccaggcatggtggcgtgcatctgtaaacccagctgcttggaaggctgaggcaggagaatcacttgaacccgggaggcagaggttgcagtgagccattgcactccagcctgggcaacaag

SEQ ID NO: 417485 - DNA, 353 bp, Homo sapiens
agtctcttcttacctaattagaaaaaaaatctagtcaaacaattataataatggggaagtcatatacaaaatacagagggtaccacttcagagtgtcctaagctgtgaatgagtgcttaccagcatcttacttccacgttcctgtttgtcatttcattgagtatgtgtatgtggcttcatatattgttattaacagggaacagattatgaaaagctgatgtactttttcctggggaaactgtcagtatttaccacttactattgtgaaagatttaactaaggcactcatcttaaattcttatgttttattggatttaaaaattattttcattggcttgattgtatttgaaatc

SEQ ID NO: 417486 - DNA, 459 bp, Homo sapiens
taaatatgagatggctgttgtgaagagaaggaagtcagttttttctcagtataattgtaaactttaaaaaaaattaaatcatcttccacttaatccccgagacttcccataatgtttagtaatacggacatgtgcaaagaattaaatcgtataattaaacaaaattttgtcaagttaactttgcttctcaaataaggaagttatataattaaacacatttgcttgtacctaatgagacgttagcatcaacatgactgtatatcatttccagaatttaattcaattagttattggctgagggatgaaatagagatgaaactaaatcctggcctcaaactagttttgtaccttattttccagcaatttggtttttttatatctagattttatctttactattttccctcatcttacccattcttagtctccatacacacctattaactttaatttcctttt

SEQ ID NO: 417487 - DNA, 663 bp, Homo sapiens
aagggagatactctatcattcttcatgtattagctgaagtagtctatgaagggagacttcccctcatctaccatttcattacccggtggtacagtttgatgaggaaaggcagagtgagcatttagatctcttcctacatttaccagttctcaaaaacagctacttcatccagggctttatttaaacattttcctagacacttgataaacatcttttttgtgtagagaactgcgctgggcactctgacggctacaaaggtgagttgggcacagtgcctgcatttaaggagctccccgtctaatcaagcaagacagaactgggcacaagtaataggaagcagtaactgaaaagatctggggctagaggcaatgctgtatggtaggagaatggactatatatcctttatattgcaaattggaacactggggtattggtgccacttttaaattccgtccaaattgtacatttaaaggtggagaatctcttttgagtatggaggaggagcagtgcagttgtgagtggagtgtgtgaggagttgggagggtggtttctggtagaagtgtgtttaattagccggctctcccattcctgttttccagacctggtatactgatgggagcaagactggcgcatcttagtcccatcagtagtaaaaaccatacc

SEQ ID NO: 417488 - DNA, 2589 bp, Homo sapiens
ggaccagagccggtagcgaggttgggagagacggagcggacctcagcgctgaagcagaagtccccggagctgcggtctccccgccgcggctgagccatgcggctccctgacctgagaccctggacctccctgctgctggtggacgcggctttactgtggctgcttcagggccctctggggactttgcttcctcaagggctgccaggactatggctggaggggaccctgcggctgggagggctgtgggggctgctaaagctaagagggctgctgggatttgtggggacactgctgctcccgctctgtctggccacccccctgactgtctccctgagagccctggtcgcgggggcctcacgtgctcccccagccagagtcgcttcagccccttggagctggctgctggtggggtacggggctgcggggctcagctggtcactgtgggctgttctgagccctcctggagcccaggagaaggagcaggaccaggtgaacaacaaagtcttgatgtggaggctgctgaagctctccaggccggacctgcctctcctcgttgccgccttcttcttccttgtccttgctgttttgggtgagacattaatccctcactattctggtcgtgtgattgacatcctgggaggtgattttgacccccatgcctttgccagtgccatcttcttcatgtgcctcttctcctttggcagctcactgtctgcaggctgccgaggaggctgcttcacctacaccatgtctcgaatcaacttgcggatccgggagcagcttttctcctccctgctgcgccaggacctcggtttcttccaggagactaagacaggggagctgaactcacggctgagctcggataccaccctgatgagtaactggcttcctttaaatgccaatgtgctcttgcgaagcctggtgaaagtggtggggctgtatggcttcatgctcagcatatcgcctcgactcaccctcctttctctgctgcacatgcccttcacaatagcagcggagaaggtgtacaacacccgccatcaggaagtgcttcgggagatccaggatgcagtggccagggcggggcaggtggtgcgggaagccgttggagggctgcagaccgttcgcagttttggggccgaggagcatgaagtctgtcgctataaagaggcccttgaacaatgtcggcagctgtattggcggagagacctggaacgcgccttgtacctgctcgtaaggagggtgctgcacttgggggtgcagatgctgatgctgagctgtgggctgcagcagatgcaggatggggagctcacccagggcagcctgctttcctttatgatctaccaggagagcgtggggagctatgtgcagaccctggtatacatatatggggatatgctcagcaacgtgggagctgcagagaaggttttctcctacatggaccgacagccaaatctgccttcacctggcacgcttgcccccaccactctgcagggggttgtgaaattccaagacgtctcctttgcatatcccaatcgccctgacaggcctgtgctcaaggggctgacgtttaccctacgtcctggtgaggtgacggcgctggtgggacccaatgggtctgggaagagcacagtggctgccctgctgcagaatctgtaccagcccacagggggacaggtgctgctggatgaaaagcccatctcacagtatgaacactgctacctgcacagccaggtggtttcagttgggcaggagcctgtgctgttctccggttctgtgaggaacaacattgcttatgggctgcagagctgcgaagatgataaggtgatggcggctgcccaggctgcccacgcagatgacttcatccaggaaatggagcatggaatatacacagatgtaggggagaaggggagccagctggctgcgggacagaaacaacgtctggccattgcccgggcccttgtacgagacccgcgggtcctcatcctggatgaggctactagtgccctagatgtgcagtgcgagcaggccctgcaggactggaattcccgtggggatcgcacagtgctggtgattgctcacaggctgcaggcagttcagcgcgcccaccagatcctggtgctccaggagggcaagctgcagaagcttgcccagctccaggagggacaggacctctattcccgcctggttcagcagcggctgatggactgaggccccagggatactgggccctcttctcaggggcgtctccaggacccagagctgttcctgctttgagtttccctagagctgtgcggccagatagctgttcctgagttgcaagcacgatggagatttggacactgtgtgcttttggtggggtggagaggtggggtggggtggggtgtggtggggtggaggctgtctgtgtccaggaaacttaattccctggtgactagagctttgcctggtgatgaggagtattttgtggcataatacatatattttaaaatattttccttcttacgtgaactgtatacattcatatagaaaatttagacaatataaaaaagtacaaagaagaaaagtaaaagtacccattgtttcacttcc

SEQ ID NO: 417489 - DNA, 475 bp, Homo sapiens
aggactgagaggtgtcagagctgctggtgacaggagcagggaaagcaccatctggccagcccccaggggccccctgtagggttcctctgcctggcagcgtttcgacgcttcttggcaggatccttgggtccttggcccccggcaccatctccctccttgacctgctgaggcccacataaaacatgttgctacttggggtgggcccgtcctcacgctctgtggcttcctgggtgtccacctccccacagcctgcctcacctacctccccagacttctcacgcacgtcaggagcctcctgtggactctggctctacctgcctctggcctctgcttaatcaggaacccacagtgggaaagctcctagggcccgcctgctgaagcaaacgcctccttgcaaagcccgtctgcagccccccacacacctcctcacctccctgtgcttcctctggagcccaagaccagtctgcctcacttg

SEQ ID NO: 417490 - DNA, 563 bp, Homo sapiens
attttcattcattcaacaaatacttattgagcatctgtggtggcccaggtcctctgtgaagcactgagaattcatccattaacaataaagaataagtccttgtttctaggagtgttcagtcttttccagcagagaggtagcagaggatcacacacattgactaacttgtaagagtggaggaaaatgttaggatagagaagtgcaggagagtctaattaaatactgtcgtcagccaacgctttcctgaagaagtgactagctttgctcaggaactgaaagaaggcctctggctgcagcatcgttgccaaaaggggaagctgagccagacaggcctgatcagggagccacagctggaccctctgaagatggctcagatccatgaagcatttggaaaaccactagagttttaagcaagacaggctaatgaaatgctgatatcttataaaggggaccttttttctttacatttctgacggtttttatcagaatgtatgtattaatgctatttgtctttgtatatttattttatttccacctgggtgacagagtgagactccgtctca

SEQ ID NO: 417491 - DNA, 1651 bp, Homo sapiens
attttcattcattcaacaaatacttattgagcatctgtggtggcccaggtcctctgtgaagcactgagaattcatccattaacaataaagaataagtccttgtttctaggagtgttcagtcttttccagcagagaggtagcagaggatcacacacattgactaacttgtaagagtggaggaaaatgttaggatagagaagtgcaggagagtctaattaaatactgtcgtcagccaacgctttcctgaagaagtgactagctttgctcaggaactgaaagaaggcctctggctgcagcatcgttgccaaaaggggaagctgagccagacaggcctgatcagggagccacagctggaccctctgaagatggctcagatccatgaagcatttggaaaaccactagagttttaagcaagacaggctaatgaaatgctgatatcttataaaggggaccttttttctttacatttctgacggtttttatcagaatgtatgtattaatgctatttgtctttgtatatttattttatttccagccactttacaaaactctttagctttgaaagtttttctgttgattttcttggattttccagctcatctacaaataatgatcgttttgtctgcaccttttcaatatacctctttagtctgttcctgtattgcatagttagaacctctaaagtaatgtttttaaggaatagcagtgcagctgagcttcctaattttatctctagttcagaggatgttaactttttgggggtcatggatcctgttgaaaatgtgatgaaagcttggagtctctcccatcctgaagcatacttgcctcatatgtatgcacagaccttcccccagccctcatttcaactgcagatccccatcaggttcctgttggactaaggttaagttgtctctagtatttgctgtttgtttctgataaccatgttttatcatgttcagattcttttttattcatccttgtatgctaatgtttgttttaaatcaaaaaatcaattttatcatgccttttcagcatctatcaagatggtcatgtaatctaacctttcaactgctacagtgctctcacttatattcacagatttcctaatgttgatcaacacttaacatttctggaatatatcctgatggtcattatgttttgtttactgtgctgctagttttaatctacatcacacatagagttgttgcagctttcttataaggaaaataacttttaaaaatattttttaagttttggttttggagttttgctattctgggaaggtaccttttactacaacaagtaaacatgcataataaagtaggattcatccaatgtctgacctttctttgcatcaaaagaacatttccggccaggcacggtggctcacgcctgtaatcccagcactttgggaggccgagccaggtggatcacgaggtcaggagatcgagaccagcctggctaacatggtgaaaccctgtctctactaaaaatacaaaaatgagccgggcatggtgggggggcaccgtagtcccagctacttgagaggctgagacaggagaatggcgtgaacccggggggcggagcttgtagtgagccgagatcgcgccactgcactccagcctgggtgacagagtgagactccgtctca

SEQ ID NO: 417492 - DNA, 1521 bp, Homo sapiens
tctgcccttgttaattaccggagcgacagactagggagctccgcccgggatttgcccatcggcggaggcgccaggctcccgtttctccccatccctctcgctgccgtccaggtgcaccgcctgcctctcagcaggatggacgtgatggatggctgccagttctcaccttctgagtacttctacgacggctcctgcataccgtcccccgagggtgaatttggggacgagtttgtgccgcgagtggctgccttcggagcgcacaaagcagagctgcagggctcagatgaggacgagcacgtgcgagcgcctaccggccaccaccaggctggtcactgcctcatgtgggcctgcaaagcctgcaagaggaagtccaccaccatggatcggcggaaggcagccactatgcgcgagcggaggcgcctgaagaaggtcaaccaggctttcgaaaccctcaagaggtgtaccacgaccaaccccaaccagaggctgcccaaggtggagatcctcaggaatgccatccgctacatcgagagcctgcaggagttgctgagagagcaggtggagaactactatagcctgccgggacagagctgctcggagcccaccagccccacctccaactgctctgatggcatgcccgaatgtaacagtcctgtctggtccagaaagagcagtacttttgacagcatctactgtcctgatgtatcaaatgtatatgccacagataaaaactccttatccagcttggattgcttatccaacatagtggaccggatcacctcctcagagcaacctgggttgcctctccaggatctggcttctctctctccagttgccagcaccgattcacagcctcgaactccaggggcttctagttccaggcttatctatcatgtgctatgaactaattttctggtctatatgacttcttccaggagggcctaatacacaggacgaagaaggcttcaaaaagtcccaaaccaagacaacatgtacataaagatttcttttcagttgtaaatttgtaaagattaccttgccactttataagaaagtgtatttaactaaaaagtcatcattgcaaataatactttcttcttctttattattctttgcttagatattaatacatagttccagtaatactatttctgatagggggccattgattgagggtagcttgttcgcaatgcttaacttatatatacatatatatatattataaatattgctcatcaaaatgtctctggtgtttagagctttatttttttctttaaaacattaaaacagctgagaatcagttaaatggaattttaaatatatttaactatttcttttctctttaatcctttagttatattgtattaaataaaaatataatactgcctaatgtatatattttgatcttttcttgtaagaaatgtatcttttaaatgtaagcacaaaatagtactttgtggatcatttcaagatataagaaattttggaaattccaccataaataaaattttttactacaag

SEQ ID NO: 417493 - DNA, 299 bp, Homo sapiens
gagagagagagactccatatcaaaaaaatgataataataaaaataaataaataaaaaataaaataaccaagtttaatgtatttttactacagtcagtttcttagttcatttgtactgctttaacagtacctgagacctggtaatttaaaaagaacagtagttggccgggcacagtggctcacacctataatctcagcactttgggaggctcaggtgagtggatcacttgagtccaggagttcaagaccactctgggcaacatagggagaccccatctctacaaaaaataataataataa

SEQ ID NO: 417494 - DNA, 468 bp, Homo sapiens
gtgagcattagtgtcctgatgtataatgtggcagtaacaaccctatctaccttatagggttgctaggaagattaagtgcaataatcaatgtaaagtacttagcacagttcttgtctcatagtaagccctcagtaaatgagaataatgacaataatggtaattattgatgctgttcttttacctacctagtaattagaccctgtttggtttataatttggtatatgtaggctccaaggaaatagtatccatttaggattttactaatcttaattgctctcaaaactagaacatctgtttaactcataaaattttccccttggctttttccattaaaacgttcattgatgctcccctgggccctttttaaaatgtatacaagaatctaatgttaacaccaatgaagaaggtttagtggaaagtaacaatgatgtgtcatttgtctggtattaaaaagaagtgcctatgag

SEQ ID NO: 417495 - DNA, 981 bp, Homo sapiens
cggcgtctgcgcagctgccagcgcctttaagcccgggctcgcgctctcggaccgtgctttcgccgcctgggagccgtccggcgcagcagtttctaggtccccactgtccccgccgtcccgccccttcgcgtcccgggaaccggctggcttccgagccgcactcgccgatcctccaggcatgccccgctacgagctggctttaatcctgaaagccatgcagcggccagagactgctgctactttgaaacgtacgatagaggccctgatggacagaggagcaatagtgagggacttggaaaacctgggtgaacgagcgcttccttataggatctctgcccacagtcagcagcacaacagaggcgggtatttcttggtggatttttatgcacccaccgcagctgttgaaagcatggtggagcacttgtctcgagatatagatgtgattagagggaatattgtcaaacaccctctgacccaggaactaaaagaatgtgaagggattgtcccagtcccactcgcagaaaaattatattccacaaagaagaggaagaagtgagaagattcgccagattttagccttatatgtaattccttcacatttgggcagcatggacgagaaggaagaatttgcaagtttggcctttatataagcatgtgttgcaggtgctgtttgatttttctaaggtatttttagcccttgatcccctttgcttgcgagaggtggggaactgctcactgacagcttctctgtaacctgcagtaccagtggatcattcttgattttgttttcattagtgtcatttctttgtcattgaggacttttccccttacaacagtaacaccattttttgaagagcaaaacttataatacctcctgggattgtgagctagtcattcagcctgtgtaaccatgtggaaataaaaattgacgaccaatgtattatatggacaacttttgctttgagtaataaacttgattgg

SEQ ID NO: 417496 - DNA, 5799 bp, Homo sapiens
gcaatagcaatggtgctgtgtccttcggcctaaattcaatagatctcatctcctagggcttccttttcacttggctcaaaggatccattgtattttggcacaaagagcctggccagggtcatgtagccatagctcttagggatgatacctcaagaaattagctgggacccatcactctgtgaaacttcacattttaagaactgagttgagggggttgttatgcacttctgtaacttgaggctaagcaaggggttaactcttgtgagagccaatagagtgtgtctgtattcgcagtccatggctcattttctttatagtaggcatatggatcttcccctctgactttgaatatcatttggtgtggcctgtgggttattttcattctttaccaccaaataaagcggcttattagctactcagttacttgctactcaaaggttaggtcttccctgttcctgcttggcagtgttaaagcttacagggttaacttatgatgattctcctggctcattttcatcagaggcatgatgactggaaagggatcacatgggtcgttggtggtgacacctcactgtttcctaggtttggatagagagatgtatacaagacctttcctgttaaattacgtgactacagagacttgccaggacaaaattttcctaagaaatcagaaaaatgattaagtgagataagtacctgggtgacacagatattagcccgttggtaaaagacaacaaatattagcttaaaatctgcatatgtagaatcattttcattagatttagagcttgaagcaccttggctctcagctactttaaactcctccccatataaatcagggcaccaataaataagtttcagctttttaaaccctggtttgatgttaagcattataaagtacgaagtttgttaccacagtagagataatttagtagaaaaatgctttgaggcttcagtatttgtaagattttgcattagccagatgctaggttgttgaaggcatttcagtgttgataatagcctgagcagacttctttacaaatgggatctgtttctatatgtgtatatgcccacttaccattcagagagactggtctttctctttgtcttccttcacattgctgtgtcagttctacacctagtcttttcagcacttagcaaattcaaattttgatttttttgtcagcttagttcactttaaggcatattggcatggtgtgtgaaagtgatgttttgccccagtattgaggacttttagatccaaataatgactcattaaatataattatgttttaagtatactgaatttctgttagcttaaaatgttaattctcaggaatgattttctcacactttgtgttggctaataataaaagcactgttttattctcaaaactcctttttcaaaaattagggagagagcagtagtgatcatttatgtgagcccctttgaaatgatggtgtcagagtgcagagaaacaatggagttttgatgccaaaaaggtttttttgcagtaaaagtaaaaatttggaattagttggcatatagaggaacccttttgtactggaacgtatgaggctggattgtgaaaaggtaatctttcgattgctagacttggttaacttagggctgcaaatctttttcttctatcaaggtcacttaatatggaatgtttttgtcagactgtcctttgttggaatactttagctgttcagctactttgactcctaggagagaatttagttaaggttcaaagtaattaactggctttgccagtggtgagtcccacaccattattcacttagtagtcatataaatgtttttatttaaacttctctctcttcaatgctgagaataaggctttaaattactgattcacctttaaaggaatgttgtgagaattgatgtaatttctgtttctgtttccatctaaacttctttataaaaagagggattagtttttttgttttggggtaagcacctaatttatccagtaaccaacaaccctaaccattggcatatatagtctttcactcagaaataaacaaaaactgtttggtatatctgtatcattgctaatcttgtgcactttactttttgggcagtaccatacatagtctgaggctattgacttaaaccaataactgtactttatgtaatgactcttaaatttggttacctgggttcacagcttgcttgaagagaaaggatgctagaataaagtaagcagctgaagagcgagcaaatcaagacaaaacacagtggtctcagatttttcgtagtgtgggaacagtggttttgctctataccactgaaaagcactataacataattgttgtccatgatactgaagcttttcccctcacttctaggttgtttacattcagagctctatcaataagaggaatacatattacagtgaattcgacaaccgcacaagttggcagtaggtatccccaacctaatttatcttggtaaattcaccctgtttcctagtgctgctggataaaagagtgtttactttttattgctcttagacagagtagtctagataagttttcaatttatcaacatagcctagacttctgtaagtggaatgttcattagtaactcatctttttgttgttataattggaaacagaaacgaggcttattgctattgcagaaatcccaaactggcaaaggccagtatatatggtattccataatataaccagcttttgaaatttatgtgtttggattagtgccttctggttaccagtattgactctgctagtttgcacctttccgttcttaacagaaaatttgtatttgttattcctcttaaattttgtcgtaactagtgaaggaagtaaaaaaaaaaaaaaaaacatgcattacattgacatactttatgtgcagcctttatttaggttcagtgaaaccaggtagttctgtatttgtgttgtagcctaaatgttgtttcttttatatccattaaaaacttaaagttacttatgttctgtgatcttaattttgttgtgtttccattgtaggttgataggtatatcgagaacaggtacgtgacaacagtttatattccatgatagaaagctaaagtccatagaaagcacaaaatcgtgttcacacattagtgtacccacacatagaaagcacaagactaatagtattctctgtatcccacaagtgccagtcataaaggccaccaggtatttgtctcagagttgctatgagcactacagtattgataagcccaagacaatgcggtatctaaactggtcctaatggtaagggacccaaaggaataatctcaataagtttgtaccacattgatggagggagagaatataaatgtcaagaatgccaaaattatatttgggggttactagctaaaatggggtttgagggctttttactgcaacttgaaactggagaaatagggacagatgtctaggtttttggtgggtggaacaggtgacatatttctgttttaagctgtagtgtgattggggttttttgtaaaaaatcttaaatcttttaggaaatattacctcttaacagtgcccccccaaacatgcagaaagtcatactttaacagggcaaatactacttgtctttgattttttttgtgtacgtttgtatgtgagagatgaagttacctttatttttttcctatacttgactgtgcttcattttaataaaggataatttgatctgagtgttctgagcatcagactaattctgaagcatatttgctagaggagctactttgcttttcacaatggggtggagaggattctttcacttgtcccattaaccctcttctagtctagatgagatgaaatctgttaatgtgtgtgtagaagaaaacgtatgttcttctactcagcattgcccttttccacctcctcacttcacctccgagtagcttgtttatcaagaatgaatgaatgtctttgtcttaaattttgcccatgtgttaaaagatgtaattctcagaatgggagagaaatgactacctttgttcctactcttttatataattatccttttagggaaagacttggtcaactctaatatatctagaaggaagactatatctggtgtagactaatatgagatgttttagaagagttaacctgaacactttgagggagagattattcagctagcaaaaagctagccaggaatgagcctaccacattatttgagaatatcaaacctcaggcctggggggatgaggggaagaagattaccagaagtgcaggaaagagaagtttgaggaacacccttggcttagcaacatgtgataatgcaaagctgttataacctgttaatcctacgtactatgtgttctgtacctttacatgtttttaaatttaagatagtttgtaagaactgtacaaaaaaatgcttctggagatttctttggcagaaatgcctttcatctataatttcatggagaactgctttaattagcctaggtgaaaagtagtcctagcagtgtaaatatgtataattagagttttctaatttcactgtgagatctctaacttttgagtggcaaacagatcaagtcttttgctcatagacttttctgtggggttattaaaatgcaaaagctttattttttttaataatgccatactccattagtgtcagatgatggtatggaatttgttcccttgctttcccccactgttactgcttcagtttatagattgccagcagagttcagaaatagagcagggatttacccgttctttgcttggacatcccattttcttttgtccagacccatgttggcaatcatgtatgaactgtgttatacttctcagtgctttcttttttctttttgataagatggatatcaaaaatagttgctgtgcaaaagttagtagtcttcttcaagaagaaaaccaattctttttctaataatatcctgtgaaattgcttcattcattcatttatttttaagccaaatgtcagcagagtgctgctgcttttatctagtaattttgatatgtaagtattaatgcatttttaaaagatgtctacattgaaacatgttcttcccagtgtcctgcttatgatgctttgttcagattttttgtaagagaccagttagtacactgggggtgtatattgtgtacatgtgtcattttagttaggcattgtaggccaaatgtgattataaatgaagttgatgaacattaattttgttattagtgagttttttgaattgtaaatggatttccagtttaccttctgttgtctacagcttttttaattttaaggtttgactaattgtatccatctcattgtacagtgttttagttgcaagcagaaagtagaatttggtataaagcaggttatttctatattgaaaggagtacagttgaaattgtagatttaagattgttaaaatcatgacaattctaacttgtctattctaacctattgtgtacaatctgattttttaaaattgtaaacatgtatgatcttggtttcatgtgtttttgaaagtgttattgtttaaaaaatgaaaaaagcatatctgctaaagagctgtcagttttcattactgactctgtaaaatacactgttctttgtgtactgtgtgttattttgccagctgctgcattagccttcaaaagtatttggaaacttaagatgaactacatttcttgcaaagtacattcctttctgtggtattttgtcctgtaactgaagtatagtaattattttatggaaatgttagcaattctgtaccaactttgaataaaatgaaaaattta

SEQ ID NO: 417497 - DNA, 940 bp, Homo sapiens
cggcgtctgcgcagctgccagcgcctttaagcccgggctcgcgctctcggaccgtgctttcgccgcctgggagccgtccggcgcagcagtttctaggtccccactgtccccgccgtcccgccccttcgcgtcccgggaaccggctggcttccgagccgcactcgccgatcctccaggcatgccccgctacgagctggctttaatcctgaaagccatgcagcggccagagactgctgctactttgaaacgtacgatagaggccctgatggacagaggagcaatagtgagggacttggaaaacctgggtgaacgagcgcttccttataggatctctgcccacagtcagcagcacaacagaggcgggtatttcttggtggatttttatgcacccaccgcagctgttgaaagcatggtggagcacttgtctcgagatatagatgtgattagagggaatattgtcaaacaccctctgacccaggaactaaaagaatgtgaagggattgtcccagtcccactcgcagaaaaattatattccacaaagaagaggaagaagtgagaagattcgccagattttagccttatatgtaattccttcacatttgggcagcatggacgagaaggaagaatttgcaagtttggcctttatataagcatgtgttgcaggtgctgtttgatttttctaaggtatttttagcccttgatcccctttgcttgcgagaggtggggaactgctcactgacagcttctctgtaacctgcagtaccagtggatcattcttgattttgttttcattagtgtcatttctttgtcattgaggacttttccccttacaacagtaacaccattttttgaagagcaaaacttataatacctcctgggattgtgagctagtcattcagcctgtgtaaccatgtggaaataaaaattgacgaccaatgta

SEQ ID NO: 417498 - DNA, 3215 bp, Homo sapiens
gcaatagcaatggtgctgtgtccttcggcctaaattcaatagatctcatctcctagggcttccttttcacttggctcaaaggatccattgtattttggcacaaagagcctggccagggtcatgtagccatagctcttagggatgatacctcaagaaattagctgggacccatcactctgtgaaacttcacattttaagaactgagttgagggggttgttatgcacttctgtaacttgaggctaagcaaggggttaactcttgtgagagccaatagagtgtgtctgtattcgcagtccatggctcattttctttatagtaggcatatggatcttcccctctgactttgaatatcatttggtgtggcctgtgggttattttcattctttaccaccaaataaagcggcttattagctactcagttacttgctactcaaaggttaggtcttccctgttcctgcttggcagtgttaaagcttacagggttaacttatgatgattctcctggctcattttcatcagaggcatgatgactggaaagggatcacatgggtcgttggtggtgacacctcactgtttcctaggtttggatagagagatgtatacaagacctttcctgttaaattacgtgactacagagacttgccaggacaaaattttcctaagaaatcagaaaaatgattaagtgagataagtacctgggtgacacagatattagcccgttggtaaaagacaacaaatattagcttaaaatctgcatatgtagaatcattttcattagatttagagcttgaagcaccttggctctcagctactttaaactcctccccatataaatcagggcaccaataaataagtttcagctttttaaaccctggtttgatgttaagcattataaagtacgaagtttgttaccacagtagagataatttagtagaaaaatgctttgaggcttcagtatttgtaagattttgcattagccagatgctaggttgttgaaggcatttcagtgttgataatagcctgagcagacttctttacaaatgggatctgtttctatatgtgtatatgcccacttaccattcagagagactggtctttctctttgtcttccttcacattgctgtgtcagttctacacctagtcttttcagcacttagcaaattcaaattttgatttttttgtcagcttagttcactttaaggcatattggcatggtgtgtgaaagtgatgttttgccccagtattgaggacttttagatccaaataatgactcattaaatataattatgttttaagtatactgaatttctgttagcttaaaatgttaattctcaggaatgattttctcacactttgtgttggctaataataaaagcactgttttattctcaaaactcctttttcaaaaattagggagagagcagtagtgatcatttatgtgagcccctttgaaatgatggtgtcagagtgcagagaaacaatggagttttgatgccaaaaaggtttttttgcagtaaaagtaaaaatttggaattagttggcatatagaggaacccttttgtactggaacgtatgaggctggattgtgaaaaggtaatctttcgattgctagacttggttaacttagggctgcaaatctttttcttctatcaaggtcacttaatatggaatgtttttgtcagactgtcctttgttggaatactttagctgttcagctactttgactcctaggagagaatttagttaaggttcaaagtaattaactggctttgccagtggtgagtcccacaccattattcacttagtagtcatataaatgtttttatttaaacttctctctcttcaatgctgagaataaggctttaaattactgattcacctttaaaggaatgttgtgagaattgatgtaatttctgtttctgtttccatctaaacttctttataaaaagagggattagtttttttgttttggggtaagcacctaatttatccagtaaccaacaaccctaaccattggcatatatagtctttcactcagaaataaacaaaaactgtttggtatatctgtatcattgctaatcttgtgcactttactttttgggcagtaccatacatagtctgaggctattgacttaaaccaataactgtactttatgtaatgactcttaaatttggttacctgggttcacagcttgcttgaagagaaaggatgctagaataaagtaagcagctgaagagcgagcaaatcaagacaaaacacagtggtctcagatttttcgtagtgtgggaacagtggttttgctctataccactgaaaagcactataacataattgttgtccatgatactgaagcttttcccctcacttctaggttgtttacattcagagctctatcaataagaggaatacatattacagtgaattcgacaaccgcacaagttggcagtaggtatccccagagactgctgctactttgaaacgtacgatagaggccctgatggacagaggagcaatagtgagggacttggaaaacctgggtgaacgagcgcttccttataggatctctgcccacagtcagcagcacaacagaggcgggtatttcttggtggatttttatgcacccaccgcagctgttgaaagcatggtggagcacttgtctcgagatatagatgtgattagagggaatattgtcaaacaccctctgacccaggaactaaaagaatgtgaagggattgtcccagtcccactcgcagaaaaattatattccacaaagaagaggaagaagtgagaagattcgccagattttagccttatatgtaattccttcacatttgggcagcatggacgagaaggaagaatttgcaagtttggcctttatataagcatgtgttgcaggtgctgtttgatttttctaaggtatttttagcccttgatcccctttgcttgcgagaggtggggaactgctcactgacagcttctctgtaacctgcagtaccagtggatcattcttgattttgttttcattagtgtcatttctttgtcattgaggacttttccccttacaacagtaacaccattttttgaagagcaaaacttataatacctcctgggattgtgagctagtcattcagcctgtgtaaccatgtggaaataaaaattgacgaccaatgtattatatggacaacttttgctttgagtaataaacttgattgg

SEQ ID NO: 417499 - DNA, 2843 bp, Homo sapiens
  misc_feature (92)..(92): n is a, c, g, or t
atgagagctgtactggacacagcagacattgccatagtggccctgtattttatcctggtcatgtgcattggtttttttgccatgtggaaatntaatagaagcaccgtgagtggatacttcctggcggggcgctctatgacctgggtaacaattggtgcctctctgtttgtgagcaatattgggagtgagcacttcattgggctggcaggatctggagctgcaagtggatttgcagtgggcgcatgggaattcaatgccttactgcttttacaacttctgggatgggttttcatcccaatttacatccggtcaggggtatataccatgcctgaatacttgtccaagcgatttggtggccataggattcaggtctattttgcagccttgtctctgattctctatattttcaccaagctctcggtggatctgtattcgggtgccctttttatccaggagtctttgggttggaatctttatgtgtctgtcatcctgctcattggcatgactgctttgctgactgtcaccggaggccttgttgcagtgatctacacagacactctgcaggctctgctcatgatcattggggcacttacacttatgattattagcataatggagattggcgggtttgaggaagttaagagaaggtacatgttggcctcacccgatgtcacttccatcttattgacatacaacctttccaacacaaattcttgtaatgtctcccctaagaaagaagccctgaaaatgctgcggaatccaacagatgaagatgttccttggcctggattcattcttgggcagaccccagcttcagtatggtactggtgtgctgaccaagtcatcgtgcagagggtccttgcagccaaaaacattgctcatgccaaaggctctactcttatggctggcttcttaaagctcctgccaatgtttatcatagttgtcccaggaatgatttccaggatactgtttactgatgatatagcttgcatcaacccagagcactgcatgctggtgtgtggaagcagagctggttgctccaatattgcttacccacgcctggtgatgaagctggttcctgtgggccttcggggtttaatgatggcagtgatgattgcagctctgatgagtgacttagactctatctttaacagtgccagtaccatattcaccctcgatgtgtacaaacttatccgcaagagcgcaagctcccgggagttaatgattgtggggaggatatttgtggcatttatggtggtgatcagcatagcatgggtgccaatcatcgtggagatgcaaggaggccagatgtacctttacattcaggaggtagcagattacctgacacccccagtggcagccttgttcctgctggcaattttctggaagcgctgcaatgaacaaggggctttctatggtggaatggctggctttgttcttggagcagtccgtttgatactggcctttgcctaccgtgccccagaatgtgaccaacctgataataggccgggcttcatcaaagacatccattatatgtatgtggccacaggattgttttgggtcacgggactcattactgtaattgtgagccttctcacaccacctcccacaaaggaacagattcgaaccaccaccttttggtctaagaagaacctggtggtgaaggagaactgctccccaaaagaggaaccataccaaatgcaagaaaagagcattctgagatgcagtgagaataatgagaccatcaaccacatcattcccaacgggaaatctgaagacagcattaagggccttcagcctgaagatgttaatctgttggtaacctgcagagaggagggcaacccagtggcatccttaggtcattcagaggcagaaacaccagttgacgcttactccaatgggcaagcagctctcatgggtgagaaagagagaaagaaagaaacggatgatggaggtcggtactggaagttcatagactggttttgtggctttaaaagtaagagcctcagcaagaggagtctcagagacctgatggaagaggaggctgtttgtttacagatgctagaagagactcggcaagttaaaccagagactgctgctactttgaaacgtacgatagaggccctgatggacagaggagcaatagtgagggacttggaaaacctgggtgaacgagcgcttccttataggatctctgcccacagtcagcagcacaacagaggcgggtatttcttggtggatttttatgcacccaccgcagctgttgaaagcatggtggagcacttgtctcgagatatagatgtgattagagggaatattgtcaaacaccctctgacccaggaactaaaagaatgtgaagggattgtcccagtcccactcgcagaaaaattatattccacaaagaagaggaagaagtgagaagattcgccagattttagccttatatgtaattccttcacatttgggcagcatggacgagaaggaagaatttgcaagtttggcctttatataagcatgtgttgcaggtgctgtttgatttttctaaggtatttttagcccttgatcccctttgcttgcgagaggtggggaactgctcactgacagcttctctgtaacctgcagtaccagtggatcattcttgattttgttttcattagtgtcatttctttgtcattgaggacttttccccttacaacagtaacaccattttttgaagagcaaaacttataatacctcctgggattgtgagctagtcattcagcctgtgtaaccatgtggaaataaaaattgacgaccaatgtattatatggacaacttttgctttgagtaataaacttgattgg

SEQ ID NO: 417500 - DNA, 887 bp, Homo sapiens
gaggagaaggaaggcatggaaagttccagccggttcgagagctaggttgtttacattcagagctctatcaataagaggaatacatattacagtgaattcgacaaccgcacaagttggcagtaggtatccccagagactgctgctactttgaaacgtacgatagaggccctgatggacagaggagcaatagtgagggacttggaaaacctgggtgaacgagcgcttccttataggatctctgcccacagtcagcagcacaacagaggcgggtatttcttggtggatttttatgcacccaccgcagctgttgaaagcatggtggagcacttgtctcgagatatagatgtgattagagggaatattgtcaaacaccctctgacccaggaactaaaagaatgtgaagggattgtcccagtcccactcgcagaaaaattatattccacaaagaagaggaagaagtgagaagattcgccagattttagccttatatgtaattccttcacatttgggcagcatggacgagaaggaagaatttgcaagtttggcctttatataagcatgtgttgcaggtgctgtttgatttttctaaggtatttttagcccttgatcccctttgcttgcgagaggtggggaactgctcactgacagcttctctgtaacctgcagtaccagtggatcattcttgattttgttttcattagtgtcatttctttgtcattgaggacttttccccttacaacagtaacaccattttttgaagagcaaaacttataatacctcctgggattgtgagctagtcattcagcctgtgtaaccatgtggaaataaaaattgacgaccaatgtattatatggacaacttttgctttgagtaataaacttgattgg

SEQ ID NO: 417501 - DNA, 975 bp, Homo sapiens
aaaagaaggctgctgggcttaaaatgtcatgagaccaagagacagtggagcaatgcatgtttgaaaagggaaagagaaaagaagctcagaaggaattccaatattcagatgtgacatatagaagaaagtgtcgacatgaaagaattatccgccagagaattcagaggaaaatcaagaatgcattatatcatgaaagtaaagaaaggataatgacccaccagagactgctgctactttgaaacgtacgatagaggccctgatggacagaggagcaatagtgagggacttggaaaacctgggtgaacgagcgcttccttataggatctctgcccacagtcagcagcacaacagaggcgggtatttcttggtggatttttatgcacccaccgcagctgttgaaagcatggtggagcacttgtctcgagatatagatgtgattagagggaatattgtcaaacaccctctgacccaggaactaaaagaatgtgaagggattgtcccagtcccactcgcagaaaaattatattccacaaagaagaggaagaagtgagaagattcgccagattttagccttatatgtaattccttcacatttgggcagcatggacgagaaggaagaatttgcaagtttggcctttatataagcatgtgttgcaggtgctgtttgatttttctaaggtatttttagcccttgatcccctttgcttgcgagaggtggggaactgctcactgacagcttctctgtaacctgcagtaccagtggatcattcttgattttgttttcattagtgtcatttctttgtcattgaggacttttccccttacaacagtaacaccattttttgaagagcaaaacttataatacctcctgggattgtgagctagtcattcagcctgtgtaaccatgtggaaataaaaattgacgaccaatgtattatatggacaacttttgctttgagtaataaacttgattgg

SEQ ID NO: 417502 - DNA, 1017 bp, Homo sapiens
tctgacccatgtactaaaagaatgtgaagggattgtccccgtcccactcgcagttatattatattccaccaagaagaggaagaagtgagaagattcgtcagattttagcctgatatgtaattccgtcacatttgggcagcatggacgagaaggaagaatttgcaagtttggcctttatataagcatgtgttgcaggtgctgtttgatttttctaaggtatttttagcccttgatcccctttgcttgcgagaggtggggaccagagactgctgctactttgaaacgtacgatagaggccctgatggacagaggagcaatagtgagggacttggaaaacctgggtgaacgagcgcttccttataggatctctgcccacagtcagcagcacaacagaggcgggtatttcttggtggatttttatgcacccaccgcagctgttgaaagcatggtggagcacttgtctcgagatatagatgtgattagagggaatattgtcaaacaccctctgacccaggaactaaaagaatgtgaagggattgtcccagtcccactcgcagaaaaattatattccacaaagaagaggaagaagtgagaagattcgccagattttagccttatatgtaattccttcacatttgggcagcatggacgagaaggaagaatttgcaagtttggcctttatataagcatgtgttgcaggtgctgtttgatttttctaaggtatttttagcccttgatcccctttgcttgcgagaggtggggaactgctcactgacagcttctctgtaacctgcagtaccagtggatcattcttgattttgttttcattagtgtcatttctttgtcattgaggacttttccccttacaacagtaacaccattttttgaagagcaaaacttataatacctcctgggattgtgagctagtcattcagcctgtgtaaccatgtggaaataaaaattgacgaccaatgtattatatggacaacttttgctttgagtaataaacttgattgg

SEQ ID NO: 417503 - DNA, 1039 bp, Homo sapiens
cggcgtctgcgcagctgccagcgcctttaagcccgggctcgcgctctcggaccgtgctttcgccgcctgggagccgtccggcgcagcagtttctaggtccccactgtccccgccgtcccgccccttcgcgtcccgggaaccggctggcttccgagccgcactcgccgatcctccaggcatgccccgctacgagctggctttaatcctgaaagccatgcagcggccagagactgctgctactttgaaacgtacgatagaggccctgatggacagaggagcaatagtgagggacttggaaaacctgggtgaacgagcgcttccttataggatctctgcccacagtcagcagcacaacagaggcgggtatttcttggtggatttttatgcacccaccgcagctgttgaaagcatggtggagcacttgtctcgagatatagatgtgattagagggaatattgtcaaacaccctctgacccaggaactaaaagaatgtgaagggattgtcccagtcccactcgcagaaaaattatattccacaaagaagaggaagaagtgagaagattcgccagattttagccttatatgtaattccttcacatttgggcagcatggacgagaaggaagaatttgcaagtttggcctttatataagcatgtgttgcaggtgctgtttgatttttctaaggtatttttagcccttgatcccctttgcttgcgagaggtggggaactgctcactgacagcttctctgtaacctgcagtaccagtggatcattcttgattttgttttcattagtgtcatttctttgtcattgaggacttttccccttacaacagtaacaccattttttgaagagcaaaacttataatacctcctgggattgtgagctagtcattcagcctgtgtaaccatgtggaaataaaaattgacgaccaatgtattatatggacaacttttgctttgagtaataaacttgattggaaaaaaaaaaaaaaaaaaaaaaaaaaaaaaaaaaaaaaaaaaaaaaaggggggggggg

SEQ ID NO: 417504 - DNA, 5857 bp, Homo sapiens
gcaatagcaatggtgctgtgtccttcggcctaaattcaatagatctcatctcctagggcttccttttcacttggctcaaaggatccattgtattttggcacaaagagcctggccagggtcatgtagccatagctcttagggatgatacctcaagaaattagctgggacccatcactctgtgaaacttcacattttaagaactgagttgagggggttgttatgcacttctgtaacttgaggctaagcaaggggttaactcttgtgagagccaatagagtgtgtctgtattcgcagtccatggctcattttctttatagtaggcatatggatcttcccctctgactttgaatatcatttggtgtggcctgtgggttattttcattctttaccaccaaataaagcggcttattagctactcagttacttgctactcaaaggttaggtcttccctgttcctgcttggcagtgttaaagcttacagggttaacttatgatgattctcctggctcattttcatcagaggcatgatgactggaaagggatcacatgggtcgttggtggtgacacctcactgtttcctaggtttggatagagagatgtatacaagacctttcctgttaaattacgtgactacagagacttgccaggacaaaattttcctaagaaatcagaaaaatgattaagtgagataagtacctgggtgacacagatattagcccgttggtaaaagacaacaaatattagcttaaaatctgcatatgtagaatcattttcattagatttagagcttgaagcaccttggctctcagctactttaaactcctccccatataaatcagggcaccaataaataagtttcagctttttaaaccctggtttgatgttaagcattataaagtacgaagtttgttaccacagtagagataatttagtagaaaaatgctttgaggcttcagtatttgtaagattttgcattagccagatgctaggttgttgaaggcatttcagtgttgataatagcctgagcagacttctttacaaatgggatctgtttctatatgtgtatatgcccacttaccattcagagagactggtctttctctttgtcttccttcacattgctgtgtcagttctacacctagtcttttcagcacttagcaaattcaaattttgatttttttgtcagcttagttcactttaaggcatattggcatggtgtgtgaaagtgatgttttgccccagtattgaggacttttagatccaaataatgactcattaaatataattatgttttaagtatactgaatttctgttagcttaaaatgttaattctcaggaatgattttctcacactttgtgttggctaataataaaagcactgttttattctcaaaactcctttttcaaaaattagggagagagcagtagtgatcatttatgtgagcccctttgaaatgatggtgtcagagtgcagagaaacaatggagttttgatgccaaaaaggtttttttgcagtaaaagtaaaaatttggaattagttggcatatagaggaacccttttgtactggaacgtatgaggctggattgtgaaaaggtaatctttcgattgctagacttggttaacttagggctgcaaatctttttcttctatcaaggtcacttaatatggaatgtttttgtcagactgtcctttgttggaatactttagctgttcagctactttgactcctaggagagaatttagttaaggttcaaagtaattaactggctttgccagtggtgagtcccacaccattattcacttagtagtcatataaatgtttttatttaaacttctctctcttcaatgctgagaataaggctttaaattactgattcacctttaaaggaatgttgtgagaattgatgtaatttctgtttctgtttccatctaaacttctttataaaaagagggattagtttttttgttttggggtaagcacctaatttatccagtaaccaacaaccctaaccattggcatatatagtctttcactcagaaataaacaaaaactgtttggtatatctgtatcattgctaatcttgtgcactttactttttgggcagtaccatacatagtctgaggctattgacttaaaccaataactgtactttatgtaatgactcttaaatttggttacctgggttcacagcttgcttgaagagaaaggatgctagaataaagtaagcagctgaagagcgagcaaatcaagacaaaacacagtggtctcagatttttcgtagtgtgggaacagtggttttgctctataccactgaaaagcactataacataattgttgtccatgatactgaagcttttcccctcacttctaggttgtttacattcagagctctatcaataagaggaatacatattacagtgaattcgacaaccgcacaagttggcagtaggtatccccaacctaatttatcttggtaaattcaccctgtttcctagtgctgctggataaaagagtgtttactttttattgctcttagacagagtagtctagataagttttcaatttatcaacatagcctagacttctgtaagtggaatgttcattagtaactcatctttttgttgttataattggaaacagaaacgaggcttattgctattgcagaaatcccaaactggcaaaggccagtatatatggtattccataatataaccagcttttgaaatttatgtgtttggattagtgccttctggttaccagtattgactctgctagtttgcacctttccgttcttaacagaaaatttgtatttgttattcctcttaaattttgtcgtaactagtgaaggaagtaaaaaaaaaaaaaaaaacatgcattacattgacatactttatgtgcagcctttatttaggttcagtgaaaccaggtagttctgtatttgtgttgtagcctaaatgttgtttcttttatatccattaaaaacttaaagttacttatgttctgtgatcttaattttgttgtgtttccattgtaggttgataggtatatcgagaacaggtacgtgacaacagtttatattccatgatagaaagctaaagtccatagaaagcacaaaatcgtgttcacacattagtgtacccacacatagaaagcacaagactaatagtattctctgtatcccacaagtgccagtcataaaggccaccaggtatttgtctcagagttgctatgagcactacagtattgataagcccaagacaatgcggtatctaaactggtcctaatggtaagggacccaaaggaataatctcaataagtttgtaccacattgatggagggagagaatataaatgtcaagaatgccaaaattatatttgggggttactagctaaaatggggtttgagggctttttactgcaacttgaaactggagaaatagggacagatgtctaggtttttggtgggtggaacaggtgacatatttctgttttaagctgtagtgtgattggggttttttgtaaaaaatcttaaatcttttaggaaatattacctcttaacagtgcccccccaaacatgcagaaagtcatactttaacagggcaaatactacttgtctttgattttttttgtgtacgtttgtatgtgagagatgaagttacctttatttttttcctatacttgactgtgcttcattttaataaaggataatttgatctgagtgttctgagcatcagactaattctgaagcatatttgctagaggagctactttgcttttcacaatggggtggagaggattctttcacttgtcccattaaccctcttctagtctagatgagatgaaatctgttaatgtgtgtgtagaagaaaacgtatgttcttctactcagcattgcccttttccacctcctcacttcacctccgagtagcttgtttatcaagaatgaatgaatgtctttgtcttaaattttgcccatgtgttaaaagatgtaattctcagaatgggagagaaatgactacctttgttcctactcttttatataattatccttttagggaaagacttggtcaactctaatatatctagaaggaagactatatctggtgtagactaatatgagatgttttagaagagttaacctgaacactttgagggagagattattcagctagcaaaaagctagccaggaatgagcctaccacattatttgagaatatcaaacctcaggcctggggggatgaggggaagaagattaccagaagtgcaggaaagagaagtttgaggaacacccttggcttagcaacatgtgataatgcaaagctgttataacctgttaatcctacgtactatgtgttctgtacctttacatgtttttaaatttaagatagtttgtaagaactgtacaaaaaaatgcttctggagatttctttggcagaaatgcctttcatctataatttcatggagaactgctttaattagcctaggtgaaaagtagtcctagcagtgtaaatatgtataattagagttttctaatttcactgtgagatctctaacttttgagtggcaaacagatcaagtcttttgctcatagacttttctgtggggttattaaaatgcaaaagctttattttttttaataatgccatactccattagtgtcagatgatggtatggaatttgttcccttgctttcccccactgttactgcttcagtttatagattgccagcagagttcagaaatagagcagggatttacccgttctttgcttggacatcccattttcttttgtccagacccatgttggcaatcatgtatgaactgtgttatacttctcagtgctttcttttttctttttgataagatggatatcaaaaatagttgctgtgcaaaagttagtagtcttcttcaagaagaaaaccaattctttttctaataatatcctgtgaaattgcttcattcattcatttatttttaagccaaatgtcagcagagtgctgctgcttttatctagtaattttgatatgtaagtattaatgcatttttaaaagatgtctacattgaaacatgttcttcccagtgtcctgcttatgatgctttgttcagattttttgtaagagaccagttagtacactgggggtgtatattgtgtacatgtgtcattttagttaggcattgtaggccaaatgtgattataaatgaagttgatgaacattaattttgttattagtgagttttttgaattgtaaatggatttccagtttaccttctgttgtctacagcttttttaattttaaggtttgactaattgtatccatctcattgtacagtgttttagttgcaagcagaaagtagaatttggtataaagcaggttatttctatattgaaaggagtacagttgaaattgtagatttaagattgttaaaatcatgacaattctaacttgtctattctaacctattgtgtacaatctgattttttaaaattgtaaacatgtatgatcttggtttcatgtgtttttgaaagtgttattgtttaaaaaatgaaaaaagcatatctgctaaagagctgtcagttttcattactgactctgtaaaatacactgttctttgtgtactgtgtgttattttgccagctgctgcattagccttcaaaagtatttggaaacttaagatgaactacatttcttgcaaagtacattcctttctgtggtattttgtcctgtaactgaagtatagtaattattttatggaaatgttagcaattctgtaccaactttgaataaaatgaaaaatttaaaaaaaaaaaaaaaaaaaaaaaaaaaaaaaaaaaaaaaaaaaaaaaaggggggggggg

SEQ ID NO: 417505 - DNA, 5745 bp, Homo sapiens
gcaatagcaatggtgctgtgtccttcggcctaaattcaatagatctcatctcctagggcttccttttcacttggctcaaaggatccattgtattttggcacaaagagcctggccagggtcatgtagccatagctcttagggatgatacctcaagaaattagctgggacccatcactctgtgaaacttcacattttaagaactgagttgagggggttgttatgcacttctgtaacttgaggctaagcaaggggttaactcttgtgagagccaatagagtgtgtctgtattcgcagtccatggctcattttctttatagtaggcatatggatcttcccctctgactttgaatatcatttggtgtggcctgtgggttattttcattctttaccaccaaataaagcggcttattagctactcagttacttgctactcaaaggttaggtcttccctgttcctgcttggcagtgttaaagcttacagggttaacttatgatgattctcctggctcattttcatcagaggcatgatgactggaaagggatcacatgggtcgttggtggtgacacctcactgtttcctaggtttggatagagagatgtatacaagacctttcctgttaaattacgtgactacagagacttgccaggacaaaattttcctaagaaatcagaaaaatgattaagtgagataagtacctgggtgacacagatattagcccgttggtaaaagacaacaaatattagcttaaaatctgcatatgtagaatcattttcattagatttagagcttgaagcaccttggctctcagctactttaaactcctccccatataaatcagggcaccaataaataagtttcagctttttaaaccctggtttgatgttaagcattataaagtacgaagtttgttaccacagtagagataatttagtagaaaaatgctttgaggcttcagtatttgtaagattttgcattagccagatgctaggttgttgaaggcatttcagtgttgataatagcctgagcagacttctttacaaatgggatctgtttctatatgtgtatatgcccacttaccattcagagagactggtctttctctttgtcttccttcacattgctgtgtcagttctacacctagtcttttcagcacttagcaaattcaaattttgatttttttgtcagcttagttcactttaaggcatattggcatggtgtgtgaaagtgatgttttgccccagtattgaggacttttagatccaaataatgactcattaaatataattatgttttaagtatactgaatttctgttagcttaaaatgttaattctcaggaatgattttctcacactttgtgttggctaataataaaagcactgttttattctcaaaactcctttttcaaaaattagggagagagcagtagtgatcatttatgtgagcccctttgaaatgatggtgtcagagtgcagagaaacaatggagttttgatgccaaaaaggtttttttgcagtaaaagtaaaaatttggaattagttggcatatagaggaacccttttgtactggaacgtatgaggctggattgtgaaaaggtaatctttcgattgctagacttggttaacttagggctgcaaatctttttcttctatcaaggtcacttaatatggaatgtttttgtcagactgtcctttgttggaatactttagctgttcagctactttgactcctaggagagaatttagttaaggttcaaagtaattaactggctttgccagtggtgagtcccacaccattattcacttagtagtcatataaatgtttttatttaaacttctctctcttcaatgctgagaataaggctttaaattactgattcacctttaaaggaatgttgtgagaattgatgtaatttctgtttctgtttccatctaaacttctttataaaaagagggattagtttttttgttttggggtaagcacctaatttatccagtaaccaacaaccctaaccattggcatatatagtctttcactcagaaataaacaaaaactgtttggtatatctgtatcattgctaatcttgtgcactttactttttgggcagtaccatacatagtctgaggctattgacttaaaccaataactgtactttatgtaatgactcttaaatttggttacctgggttcacagcttgcttgaagagaaaggatgctagaataaagtaagcagctgaagagcgagcaaatcaagacaaaacacagtggtctcagatttttcgtagtgtgggaacagtggttttgctctataccactgaaaagcactataacataattgttgtccatgatactgaagcttttcccctcacttctaggttgtttacattcagagctctatcaataagaggaatacatattacagtgaattcgacaaccgcacaagttggcagtaggtatccccaacctaatttatcttggtaaattcaccctgtttcctagtgctgctggataaaagagtgtttactttttattgctcttagacagagtagtctagataagttttcaatttatcaacatagcctagacttctgtaagtggaatgttcattagtaactcatctttttgttgttataattggaaacagaaacgaggcttattgctattgcagaaatcccaaactggcaaaggccagtatatatggtattccataatataaccagcttttgaaatttatgtgtttggattagtgccttctggttaccagtattgactctgctagtttgcacctttccgttcttaacagaaaatttgtatttgttattcctcttaaattttgtcgtaactagtgaaggaagtaaaaaaaaaaaaaaaaacatgcattacattgacatactttatgtgcagcctttatttaggttcagtgaaaccaggtagttctgtatttgtgttgtagcctaaatgttgtttcttttatatccattaaaaacttaaagttacttatgttctgtgatcttaattttgttgtgtttccattgtaggttgataggtatatcgagaacaggtacgtgacaacagtttatattccatgatagaaagctaaagtccatagaaagcacaaaatcgtgttcacacattagtgtacccacacatagaaagcacaagactaatagtattctctgtatcccacaagtgccagtcataaaggccaccaggtatttgtctcagagttgctatgagcactacagtattgataagcccaagacaatgcggtatctaaactggtcctaatggtaagggacccaaaggaataatctcaataagtttgtaccacattgatggagggagagaatataaatgtcaagaatgccaaaattatatttgggggttactagctaaaatggggtttgagggctttttactgcaacttgaaactggagaaatagggacagatgtctaggtttttggtgggtggaacaggtgacatatttctgttttaagctgtagtgtgattggggttttttgtaaaaaatcttaaatcttttaggaaatattacctcttaacagtgcccccccaaacatgcagaaagtcatactttaacagggcaaatactacttgtctttgattttttttgtgtacgtttgtatgtgagagatgaagttacctttatttttttcctatacttgactgtgcttcattttaataaaggataatttgatctgagtgttctgagcatcagactaattctgaagcatatttgctagaggagctactttgcttttcacaatggggtggagaggattctttcacttgtcccattaaccctcttctagtctagatgagatgaaatctgttaatgtgtgtgtagaagaaaacgtatgttcttctactcagcattgcccttttccacctcctcacttcacctccgagtagcttgtttatcaagaatgaatgaatgtctttgtcttaaattttgcccatgtgttaaaagatgtaattctcagaatgggagagaaatgactacctttgttcctactcttttatataattatccttttagggaaagacttggtcaactctaatatatctagaaggaagactatatctggtgtagactaatatgagatgttttagaagagttaacctgaacactttgagggagagattattcagctagcaaaaagctagccaggaatgagcctaccacattatttgagaatatcaaacctcaggcctggggggatgaggggaagaagattaccagaagtgcaggaaagagaagtttgaggaacacccttggcttagcaacatgtgataatgcaaagctgttataacctgttaatcctacgtactatgtgttctgtacctttacatgtttttaaatttaagatagtttgtaagaactgtacaaaaaaatgcttctggagatttctttggcagaaatgcctttcatctataatttcatggagaactgctttaattagcctaggtgaaaagtagtcctagcagtgtaaatatgtataattagagttttctaatttcactgtgagatctctaacttttgagtggcaaacagatcaagtcttttgctcatagacttttctgtggggttattaaaatgcaaaagctttattttttttaataatgccatactccattagtgtcagatgatggtatggaatttgttcccttgctttcccccactgttactgcttcagtttatagattgccagcagagttcagaaatagagcagggatttacccgttctttgcttggacatcccattttcttttgtccagacccatgttggcaatcatgtatgaactgtgttatacttctcagtgctttcttttttctttttgataagatggatatcaaaaatagttgctgtgcaaaagttagtagtcttcttcaagaagaaaaccaattctttttctaataatatcctgtgaaattgcttcattcattcatttatttttaagccaaatgtcagcagagtgctgctgcttttatctagtaattttgatatgtaagtattaatgcatttttaaaagatgtctacattgaaacatgttcttcccagtgtcctgcttatgatgctttgttcagattttttgtaagagaccagttagtacactgggggtgtatattgtgtacatgtgtcattttagttaggcattgtaggccaaatgtgattataaatgaagttgatgaacattaattttgttattagtgagttttttgaattgtaaatggatttccagtttaccttctgttgtctacagcttttttaattttaaggtttgactaattgtatccatctcattgtacagtgttttagttgcaagcagaaagtagaatttggtataaagcaggttatttctatattgaaaggagtacagttgaaattgtagatttaagattgttaattaaaattgtaaacatgtatgatcttggtttcatgtgtttttgaaagtgttattgtttaaaaaatgaaaaaagcatatctgctaaagagctgtcagttttcattactgactctgtaaaatacactgttctttgtgtactgtgtgttattttgccagctgctgcattagccttcaaaagtatttggaaacttaagatgaactacatttcttgcaaagtacattcctttctgtggtattttgtcctgtaactgaagtatagtaattattttatggaaatgttagcaattctgtaccaactttgaataaaatgaaaaattta

SEQ ID NO: 417506 - DNA, 3174 bp, Homo sapiens
gcaatagcaatggtgctgtgtccttcggcctaaattcaatagatctcatctcctagggcttccttttcacttggctcaaaggatccattgtattttggcacaaagagcctggccagggtcatgtagccatagctcttagggatgatacctcaagaaattagctgggacccatcactctgtgaaacttcacattttaagaactgagttgagggggttgttatgcacttctgtaacttgaggctaagcaaggggttaactcttgtgagagccaatagagtgtgtctgtattcgcagtccatggctcattttctttatagtaggcatatggatcttcccctctgactttgaatatcatttggtgtggcctgtgggttattttcattctttaccaccaaataaagcggcttattagctactcagttacttgctactcaaaggttaggtcttccctgttcctgcttggcagtgttaaagcttacagggttaacttatgatgattctcctggctcattttcatcagaggcatgatgactggaaagggatcacatgggtcgttggtggtgacacctcactgtttcctaggtttggatagagagatgtatacaagacctttcctgttaaattacgtgactacagagacttgccaggacaaaattttcctaagaaatcagaaaaatgattaagtgagataagtacctgggtgacacagatattagcccgttggtaaaagacaacaaatattagcttaaaatctgcatatgtagaatcattttcattagatttagagcttgaagcaccttggctctcagctactttaaactcctccccatataaatcagggcaccaataaataagtttcagctttttaaaccctggtttgatgttaagcattataaagtacgaagtttgttaccacagtagagataatttagtagaaaaatgctttgaggcttcagtatttgtaagattttgcattagccagatgctaggttgttgaaggcatttcagtgttgataatagcctgagcagacttctttacaaatgggatctgtttctatatgtgtatatgcccacttaccattcagagagactggtctttctctttgtcttccttcacattgctgtgtcagttctacacctagtcttttcagcacttagcaaattcaaattttgatttttttgtcagcttagttcactttaaggcatattggcatggtgtgtgaaagtgatgttttgccccagtattgaggacttttagatccaaataatgactcattaaatataattatgttttaagtatactgaatttctgttagcttaaaatgttaattctcaggaatgattttctcacactttgtgttggctaataataaaagcactgttttattctcaaaactcctttttcaaaaattagggagagagcagtagtgatcatttatgtgagcccctttgaaatgatggtgtcagagtgcagagaaacaatggagttttgatgccaaaaaggtttttttgcagtaaaagtaaaaatttggaattagttggcatatagaggaacccttttgtactggaacgtatgaggctggattgtgaaaaggtaatctttcgattgctagacttggttaacttagggctgcaaatctttttcttctatcaaggtcacttaatatggaatgtttttgtcagactgtcctttgttggaatactttagctgttcagctactttgactcctaggagagaatttagttaaggttcaaagtaattaactggctttgccagtggtgagtcccacaccattattcacttagtagtcatataaatgtttttatttaaacttctctctcttcaatgctgagaataaggctttaaattactgattcacctttaaaggaatgttgtgagaattgatgtaatttctgtttctgtttccatctaaacttctttataaaaagagggattagtttttttgttttggggtaagcacctaatttatccagtaaccaacaaccctaaccattggcatatatagtctttcactcagaaataaacaaaaactgtttggtatatctgtatcattgctaatcttgtgcactttactttttgggcagtaccatacatagtctgaggctattgacttaaaccaataactgtactttatgtaatgactcttaaatttggttacctgggttcacagcttgcttgaagagaaaggatgctagaataaagtaagcagctgaagagcgagcaaatcaagacaaaacacagtggtctcagatttttcgtagtgtgggaacagtggttttgctctataccactgaaaagcactataacataattgttgtccatgatactgaagcttttcccctcacttctaggttgtttacattcagagctctatcaataagaggaatacatattacagtgaattcgacaaccgcacaagttggcagtaggtatccccagagactgctgctactttgaaacgtacgatagaggccctgatggacagaggagcaatagtgagggacttggaaaacctgggtgaacgagcgcttccttataggatctctgcccacagtcagcagcacaacagaggcgggtatttcttggtggatttttatgcacccaccgcagctgttgaaagcatggtggagcacttgtctcgagatatagatgtgattagagggaatattgtcaaacaccctctgacccaggaactaaaagaatgtgaagggattgtcccagtcccactcgcagaaaaattatattccacaaagaagaggaagaagtgagaagattcgccagattttagccttatatgtaattccttcacatttgggcagcatggacgagaaggaagaatttgcaagtttggcctttatataagcatgtgttgcaggtgctgtttgatttttctaaggtatttttagcccttgatcccctttgcttgcgagaggtggggaactgctcactgacagcttctctgtaacctgcagtaccagtggatcattcttgattttgttttcattagtgtcatttctttgtcattgaggacttttccccttacaacagtaacaccattttttgaagagcaaaacttataatacctcctgggattgtgagctagtcattcagcctgtgtaaccatgtggaaataaaaattgacgaccaatgta

SEQ ID NO: 417507 - DNA, 329 bp, Homo sapiens
acgaccaatgtattatatggacaacttttgctttgagtaataaacttgattggtgtaggaatgtgggaggtgttttgtccctttacttacccagtgcagtgcacttccagggccccgcagctccagtctagctggcagtgcctggcagtgtcggggaggcattacccagtacccactgaggtccagagccggggtggggcaggggaggaggggtgtctgtctgttccttactgggcacgccacaaaatcagtgacttttccctgcacacctcacttgtcattgtggtttgtgctgctctttgtggtgggacgtgtgttctggtgcagtt

SEQ ID NO: 417508 - DNA, 2675 bp, Homo sapiens
  misc_feature (92)..(92): n is a, c, g, or t
atgagagctgtactggacacagcagacattgccatagtggccctgtattttatcctggtcatgtgcattggtttttttgccatgtggaaatntaatagaagcaccgtgagtggatacttcctggcggggcgctctatgacctgggtaacaattggtgcctctctgtttgtgagcaatattgggagtgagcacttcattgggctggcaggatctggagctgcaagtggatttgcagtgggcgcatgggaattcaatgccttactgcttttacaacttctgggatgggttttcatcccaatttacatccggtcaggggtatataccatgcctgaatacttgtccaagcgatttggtggccataggattcaggtctattttgcagccttgtctctgattctctatattttcaccaagctctcggtggatctgtattcgggtgccctttttatccaggagtctttgggttggaatctttatgtgtctgtcatcctgctcattggcatgactgctttgctgactgtcaccggaggccttgttgcagtgatctacacagacactctgcaggctctgctcatgatcattggggcacttacacttatgattattagcataatggagattggcgggtttgaggaagttaagagaaggtacatgttggcctcacccgatgtcacttccatcttattgacatacaacctttccaacacaaattcttgtaatgtctcccctaagaaagaagccctgaaaatgctgcggaatccaacagatgaagatgttccttggcctggattcattcttgggcagaccccagcttcagtatggtactggtgtgctgaccaagtcatcgtgcagagggtccttgcagccaaaaacattgctcatgccaaaggctctactcttatggctggcttcttaaagctcctgccaatgtttatcatagttgtcccaggaatgatttccaggatactgtttactgatgatatagcttgcatcaacccagagcactgcatgctggtgtgtggaagcagagctggttgctccaatattgcttacccacgcctggtgatgaagctggttcctgtgggccttcggggtttaatgatggcagtgatgattgcagctctgatgagtgacttagactctatctttaacagtgccagtaccatattcaccctcgatgtgtacaaacttatccgcaagagcgcaagctcccgggagttaatgattgtggggaggatatttgtggcatttatggtggtgatcagcatagcatgggtgccaatcatcgtggagatgcaaggaggccagatgtacctttacattcaggaggtagcagattacctgacacccccagtggcagccttgttcctgctggcaattttctggaagcgctgcaatgaacaaggggctttctatggtggaatggctggctttgttcttggagcagtccgtttgatactggcctttgcctaccgtgccccagaatgtgaccaacctgataataggccgggcttcatcaaagacatccattatatgtatgtggccacaggattgttttgggtcacgggactcattactgtaattgtgagccttctcacaccacctcccacaaaggaacagattcgaaccaccaccttttggtctaagaagaacctggtggtgaaggagaactgctccccaaaagaggaaccataccaaatgcaagaaaagagcattctgagatgcagtgagaataatgagaccatcaaccacatcattcccaacgggaaatctgaagacagcattaagggccttcagcctgaagatgttaatctgttggtaacctgcagagaggagggcaacccagtggcatccttaggtcattcagaggcagaaacaccagttgacgcttactccaatgggcaagcagctctcatgggtgagaaagagagaaagaaagaaacggatgatggaggtcggtactggaagttcatagactggttttgtggctttaaaagtaagagcctcagcaagaggagtctcagagacctgatggaagaggaggctgtttgtttacagatgctagaagagactcggcaagttaaagtaatactaaatattggactttttgctgtgtgttcacttggaattttcatgtttgtttatttctccttatgaacttaaggatatggtgagacactaacttaagacaatactgactggtctttggggaaaaaagttatgtaactgtgcatctctcaggcattgtttacgctgtaggttttagccaaattttacttagcagaaaatcatctaattacaagactttattttcccagagatggattaaagtaaatcttcaacttaagtgaagccaaacctaacagactgaattgtgcaaatgtggttttaaattttgcataccaaagtaagaagagaccaattattctcacagagcacttagagcagaatatatgttaagttaccatgaattaaggtatactgtctgcactgccaagtcttggcagaccttaccctgaagtagaagatttgctcatttctaaagttttttttctgtctctgtaatccctcctaccattaagaaaaacttatttcttagacattgtacaatcagttatgtactgaaaatcgaatgtgcttgtgtgatacttgtttcaggacaagttcatttgcca

SEQ ID NO: 417509 - DNA, 1037 bp, Homo sapiens
  misc_feature (1025)..(1028): n is a, c, g, or t
cggcgtctgcgcagctgccagcgcctttaagcccgggctcgcgctctcggaccgtgctttcgccgcctgggagccgtccggcgcagcagtttctaggtccccactgtccccgccgtcccgccccttcgcgtcccgggaaccggctggcttccgagccgcactcgccgatcctccaggcatgccccgctacgagctggctttaatcctgaaagccatgcagcggccagagactgctgctactttgaaacgtacgatagaggccctgatggacagaggagcaatagtgagggacttggaaaacctgggtgaacgagcgcttccttataggatctctgcccacagtcagcagcacaacagaggcgggtatttcttggtggatttttatgcacccaccgcagctgttgaaagcatggtggagcacttgtctcgagatatagatgtgattagagggaatattgtcaaacaccctctgacccaggaactaaaagaatgtgaagggattgtcccagtcccactcgcagaaaaattatattccacaaagaagaggaagaagtgagaagattcgccagattttagccttatatgtaattccttcacatttgggcagcatggacgagaaggaagaatttgcaagtttggcctttatataagcatgtgttgcaggtgctgtttgatttttctaaggtatttttagcccttgatcccctttgcttgcgagaggtggggaactgctcactgacagcttctctgtaacctgcagtaccagtggatcattcttgattttgttttcattagtgtcatttctttgtcattgaggacttttccccttacaacagtaacaccattttttgaagagcaaaacttataatacctcctgggattgtgagctagtcattcagcctgtgtaaccatgtggaaataaaaattgacgaccaatgtattatatggacaacttttgctttgagtaataaacttgattgggatggcctcgttggcctcagcggtggagctctgcggccggaaannnngtccccttt

SEQ ID NO: 417510 - DNA, 1065 bp, Homo sapiens
cggcgtctgcgcagctgccagcgcctttaagcccgggctcgcgctctcggaccgtgctttcgccgcctgggagccgtccggcgcagcagtttctaggtccccactgtccccgccgtcccgccccttcgcgtcccgggaaccggctggcttccgagccgcactcgccgatcctccaggcatgccccgctacgagctggctttaatcctgaaagccatgcagcgggttgtttacattcagagctctatcaataagaggaatacatattacagtgaattcgacaaccgcacaagttggcagtaggtatccccagagactgctgctactttgaaacgtacgatagaggccctgatggacagaggagcaatagtgagggacttggaaaacctgggtgaacgagcgcttccttataggatctctgcccacagtcagcagcacaacagaggcgggtatttcttggtggatttttatgcacccaccgcagctgttgaaagcatggtggagcacttgtctcgagatatagatgtgattagagggaatattgtcaaacaccctctgacccaggaactaaaagaatgtgaagggattgtcccagtcccactcgcagaaaaattatattccacaaagaagaggaagaagtgagaagattcgccagattttagccttatatgtaattccttcacatttgggcagcatggacgagaaggaagaatttgcaagtttggcctttatataagcatgtgttgcaggtgctgtttgatttttctaaggtatttttagcccttgatcccctttgcttgcgagaggtggggaactgctcactgacagcttctctgtaacctgcagtaccagtggatcattcttgattttgttttcattagtgtcatttctttgtcattgaggacttttccccttacaacagtaacaccattttttgaagagcaaaacttataatacctcctgggattgtgagctagtcattcagcctgtgtaaccatgtggaaataaaaattgacgaccaatgtattatatggacaacttttgctttgagtaataaacttgattgg

SEQ ID NO: 417511 - DNA, 434 bp, Homo sapiens
cttttctttgggaatgaaaatctagaatcctaagtttcttctaggtgctctgaagttaaacagccaaaacagaatgattcatggtagtttccaattgtaatcccagaatatttttagttattcagtcagctgaagacctgggcctctcagctcagaacaggataaataatgtctgtttggggaaggggggtctgccagtagatttgatgttaatgcagcttttaagatcacatttttacagtgaggaattcagcttttcttctatagtgttatcaagtgcctgaaattatcactatcttatttttgtaaatgcatattttaaatgtatatgtagggttttctttaaacaggcttcatagtagtttggattgactagaatgctccttttttgtatgcttctcagtgccaggaattaaatcaggaaaatgccttaa

SEQ ID NO: 417512 - DNA, 105 bp, Homo sapiens
gggcaacagagtgaggccctgactcaaaataaataaatagcttagttcagcattccctaaacaggagacacatcaatcctttaagatggtttgtgtctccctgct

SEQ ID NO: 417513 - DNA, 381 bp, Homo sapiens
cacctcacaggacctgtatccatctcttctggaggatagcagaggtatggagggagacctggcagggtctcctgccccacgggcagctgagactctgttgggggtgggggatggaaggtgtatggaagaagagtgagaactagaccacacttgcaccggggttccccacactcagcgcaggctctgttgttctgttaaacttcacttgcaaaacacaaattccaagacaaaaattaaaaatttcaagaggaccaccagagaacattaaaccccaagtactgaaaccttgtgagcaaaggtgctgtattactacactggtcacacacccatgagccaggcttgctaaatggttgttcaagactatccacaggctgggtgagg

SEQ ID NO: 417514 - DNA, 1808 bp, Homo sapiens
tgcgcgcgcaggggagaggccagcccaggcagccgttgtcgggttcgactggaggggcgggggagtcacctgcgagcggctgcgctggcggccagcccgcccaccgcgtctggatcgcgccggctgcgcggggctgcggacagcacacaccctggaaggccccggcggggaacgggcagagtccgcgccctgcgtccgcgaccaggaggatcggaccttcgccttcgctgtcgccgccgccgccgcccgcggccgtcggggctattagtgaaagatggtggatcgcttggcaaacagtgaagcaaatactagacgtataagtatagtggaaaactgttttggagcagctggtcaacctttaactatacctggacgagttcttattggagaaggagtattgactaagttgtgcaggaaaaagcccaaagcaaggcagtttttcttgtttaatgatattcttgtatatggcaatattgtcatccagaagaaaaaatataacaaacaacatattattcccctggaaaatgtcactattgattccatcaaagatgagggagacttaaggaatggatggctaatcaagacaccaactaaatcttttgcagtttatgctgccactgctacggagaaatcagaatggatgaatcatataaataaatgtgttactgatttactctccaaaagtgggaagacacccagtaatgaacatgctgctgtctgggttcctgactctgaggcaactgtatgtatgcgttgtcagaaagcaaaattcacacctgttaatcgtcgccaccattgccgcaaatgtggttttgttgtctgtgggccctgctctgaaaagagatttcttcttcccagccagtcctctaagcctgtgcggatttgtgacttctgctatgacctgctttctgctggggacatggccacatgccagcctgctagatcagactcttacagccagtcattgaagtctcctttaaatgatatgtctgatgatgatgacgatgatgatagcagtgactaaggacacatttgggagtatttaatcaggtgtggctatctgagaaatcaactttgggggaaatgtaagattctgagctctctctctgttttgttctagccatgaatttgcctgagaaacttgtaacctatgtgcctcaatatattccatagaaagtaggtccccctgccttctcccactcctcacactcttctacagggataggcttttgcaaatatatcagataaattttttgtttcttgtttatttttaggttattttcttggaaggttgggaaaagatgtttgttttaacaggtcatgtactacgttgttgttttcatttctgttataagtaaaactaaaagcacagaatggtgggaaaggggctataatgtggttcattaataatgttagcagcttttttctaaccatcctgtctaatggttaagacaccagtaacaaaaacacatgatttggaaatactttggctttttcatatacctagtggtgccttatcataatagcactgttacatgaaataagcccctaccttcttactttctggtttgttgaaaaaatacactggtgctctttgaagtgataaaatgagtgtttatgaatgggtgtaattaggaaatacttctcatctgacagctacaaataactaagtttggaggtattttcactctatatgaataaatatttttccataaaatagttgtgattatatttttgttttatataggtcccaaattataattgtcaaatatatattttaaattaataaaagttgtcattcttaggaa

SEQ ID NO: 417515 - DNA, 2902 bp, Homo sapiens
acgcgaaactttccgggcgcttcctcccgcggtcccggagccgtcgcagcgccgggaggtgtcgtcgtcgcgggcggtggcggccgacgccatgttggggtctgtgagaaacggggcgctcccggccgctcccctcgcgccggggccggcccgcgggccagttgccgccgccgtcccgccagcccgggagcgagccgcgcccgcccgtaggacgccgccgccgccgcggggggacgggggccgccgggctattagtgaaagatggtggatcgcttggcaaacagtgaagcaaatactagacgtataagtatagtggaaaactgttttggagcagctggtcaacctttaactatacctggacgagttcttattggagaaggagtattgactaagttgtgcaggaaaaagcccaaagcaaggcagtttttcttgtttaatgatattcttgtatatggcaatattgtcatccagaagaaaaaatataacaaacaacatattattcccctggaaaatgtcactattgattccatcaaagatgagggagacttaaggaatggatggctaatcaagacaccaactaaatcttttgcagtttatgctgccactgctacggagaaatcagaatggatgaatcatataaataaatgtgttactgatttactctccaaaagtgggaagacacccagtaatgaacatgctgctgtctgggttcctgactctgaggcaactgtatgtatgcgttgtcagaaagcaaaattcacacctgttaatcgtcgccaccattgccgcaaatgtggttttgttgtctgtgggccctgctctgaaaagagatttcttcttcccagccagtcctctaagcctgtgcggatttgtgacttctgctatgacctgctttctgctggggacatggccacatgccagcctgctagatcagactcttacagccagtcattgaagtctcctttaaatgatatgtctgatgatgatgacgatgatgatagcagtgactaaggacacatttgggagtatttaatcaggtgtggctatctgagaaatcaactttgggggaaatgtaagattctgagctctctctctgttttgttctagccatgaatttgcctgagaaacttgtaacctatgtgcctcaatatattccatagaaagtaggtccccctgccttctcccactcctcacactcttctacagggataggcttttgcaaatatatcagataaattttttgtttcttgtttatttttaggttattttcttggaaggttgggaaaagatgtttgttttaacaggtcatgtactacgttgttgttttcatttctgttataagtaaaactaaaagcacagaatggtgggaaaggggctataatgtggttcattaataatgttagcagcttttttctaaccatcctgtctaatggttaagacaccagtaacaaaaacacatgatttggaaatactttggctttttcatatacctagtggtgccttatcataatagcactgttacatgaaataagcccctaccttcttactttctggtttgttgaaaaaatacactggtgctctttgaagtgataaaatgagtgtttatgaatgggtgtaattaggaaatacttctcatctgacagctacaaataactaagtttggaggtattttcactctatatgaataaatatttttccataaaatagttgtgattatatttttgttttatataggtcccaaattataattgtcaaatatatattttaaattaataaaagttgtcattcttaggaatttggtttgaaatttatcagttatacagaattgtcatactgcattagcttctacctttagtaagacatattttttaggtataaattcttatgctttaacattatttctggattgaaaatcttataaaacccttgaaaataaacagtctcttttttacaaagcctgtgttagagcacagatttacctaggcttgaagatttggaagaaataatatgtaagaatggcctcaaggcagaccactttaagtttggctagacttcatatcgtggaagtattgtctatttcagtgtgaaactatcttgaatttgcaaatatagtgttatattttataaagttttgtaaaatcccaaacaatatttctatttttgtaaaacaattgtatgtataatctgtatttgaaatcattttgcaatctatggaaatagagtagcaattgctatttctaaattgtgaactttaagtcaatctagatttattttgagaagtaattgttcactctttacttttgaggcagccattaggttgaaagtatatatttatcatataaaacttgatgcgttttgcactactctttccatttatatgctgcaaacaactacagtctttgaaatatggaaaatcagcagtctaaagtttgttttaaattctaaatttaaaaaatcttcaaatctgaatataccgcaaatgtcatgagaagtttgattcagtaacttgtgatggaggattctttggtatcttactgtttggttaaggcactaattttacttacctattagattttgaaagtatctgagatatacaaatctccctgtaggaaatgtgaaagaaaagcacaacaaaactagggttttttgttcatttgcttgcttttatgattttttttggtttgttttaatatcaggtggatttttgtttctaagcaatatatacataaaatcaaccaacatatctgaaaaggatcatgaaacctgagaaatgctaatggagatttgctggtacataggaatctagcaaattcaggaaccaaggggaaatgttgtgagataacatttacattgtcaacctttattgactttgtttttacaataaaaaatattttacaactta

SEQ ID NO: 417516 - DNA, 2043 bp, Homo sapiens
  misc_feature (1926)..(1926): n is a, c, g, or t
  misc_feature (1949)..(1949): n is a, c, g, or t
  misc_feature (2019)..(2019): n is a, c, g, or t
tgcgcgcgcaggggagaggccagcccaggcagccgttgtcgggttcgactggaggggcgggggagtcacctgcgagcggctgcgctggcggccagcccgcccaccgcgtctggatcgcgccggctgcgcggggctgcggacagcacacaccctggaaggccccggcggggaacgggcagagtccgcgccctgcgtccgcgaccaggaggatcggaccttcgccttcgctgtcgccgccgccgccgcccgcggccgtcggggctattagtgaaagatggtggatcgcttggcaaacagtgaagcaaatactagacgtataagtatagtggaaaactgttttggagcagctggtcaacctttaactatacctggacgagttcttattggagaaggagtattgactaagttgtgcaggaaaaagcccaaagcaaggcagtttttcttgtttaatgatattcttgtatatggcaatattgtcatccagaagaaaaaatataacaaacaacatattattcccctggaaaatgtcactattgattccatcaaagatgagggagacttaaggaatggatggctaatcaagacaccaactaaatcttttgcagtttatgctgccactgctacggagaaatcagaatggatgaatcatataaataaatgtgttactgatttactctccaaaagtgggaagacacccagtaatgaacatgctgctgtctgggttcctgactctgaggcaactgtatgtatgcgttgtcagaaagcaaaattcacacctgttaatcgtcgccaccattgccgcaaatgtggttttgttgtctgtgggccctgctctgaaaagagatttcttcttcccagccagtcctctaagcctgtgcggatttgtgacttctgctatgacctgctttctgctggggacatggccacatgccagcctgctagatcagactcttacagccagtcattgaagtctcctttaaatgatatgtctgatgatgatgacgatgatgatagcagtgactaaggacacatttgggagtatttaatcaggtgtggctatctgagaaatcaactttgggggaaatgtaagattctgagctctctctctgttttgttctagccatgaatttgcctgagaaacttgtaacctatgtgcctcaatatattccatagaaagtaggtccccctgccttctcccactcctcacactcttctacagggataggcttttgcaaatatatcagataaattttttgtttcttgtttatttttaggttattttcttggaaggttgggaaaagatgtttgttttaacaggtcatgtactacgttgttgttttcatttctgttataagtaaaactaaaagcacagaatggtgggaaaggggctataatgtggttcattaataatgttagcagcttttttctaaccatcctgtctaatggttaagacaccagtaacaaaaacacatgatttggaaatactttggctttttcatatacctagtggtgccttatcataatagcactgttacatgaaataagcccctaccttcttactttctggtttgttgaaaaaatacactggtgctctttgaagtgataaaatgagtgtttatgaatgggtgtaattaggaaatacttctcatctgacagctacaaataactaagtttggaggtattttcactctatatgaataaatatttttccataaaatagttgtgattatatttttgttttatataggtcccaaattataattgtcaaatatatattttaaattaataaaagttgtcattcttaggaaaaaaaaaaaaaaaaaaaaaactcgagactagttcctcgtgccgggagtggagctgctctgagattttgagttcttctgcagagatgattaaatatatccaagagacattggaaaaccngctgaacattttacattggtctnctcagcacatggctggatgcggatatttctataattccagaaagtcacacagctcctctgtatgagaccngtgggcgccatttaaaagaacagg

SEQ ID NO: 417517 - DNA, 2915 bp, Homo sapiens
tgcgcgcgcaggggagaggccagcccaggcagccgttgtcgggttcgactggaggggcgggggagtcacctgcgagcggctgcgctggcggccagcccgcccaccgcgtctggatcgcgccggctgcgcggggctgcggacagcacacaccctggaaggccccggcggggaacgggcagagtccgcgccctgcgtccgcgaccaggaggatcggaccttcgccttcgctgtcgccgccgccgccgcccgcggccgtcggggctattagtgaaagatggtggatcgcttggcaaacagtgaagcaaatactagacgtataagtatagtggaaaactgttttggagcagctggtcaacctttaactatacctggacgagttcttattggagaaggagtattgactaagttgtgcaggaaaaagcccaaagcaaggcagtttttcttgtttaatgatattcttgtatatggcaatattgtcatccagaagaaaaaatataacaaacaacatattattcccctggaaaatgtcactattgattccatcaaagatgagggagacttaaggaatggatggctaatcaagacaccaactaaatcttttgcagtttatgctgccactgctacggagaaatcagaatggatgaatcatataaataaatgtgttactgatttactctccaaaagtgggaagacacccagtaatgaacatgctgctgtctgggttcctgactctgaggcaactgtatgtatgcgttgtcagaaagcaaaattcacacctgttaatcgtcgccaccattgccgcaaatgtggttttgttgtctgtgggccctgctctgaaaagagatttcttcttcccagccagtcctctaagcctgtgcggatttgtgacttctgctatgacctgctttctgctggggacatggccacatgccagcctgctagatcagactcttacagccagtcattgaagtctcctttaaatgatatgtctgatgatgatgacgatgatgatagcagtgactaaggacacatttgggagtatttaatcaggtgtggctatctgagaaatcaactttgggggaaatgtaagattctgagctctctctctgttttgttctagccatgaatttgcctgagaaacttgtaacctatgtgcctcaatatattccatagaaagtaggtccccctgccttctcccactcctcacactcttctacagggataggcttttgcaaatatatcagataaattttttgtttcttgtttatttttaggttattttcttggaaggttgggaaaagatgtttgttttaacaggtcatgtactacgttgttgttttcatttctgttataagtaaaactaaaagcacagaatggtgggaaaggggctataatgtggttcattaataatgttagcagcttttttctaaccatcctgtctaatggttaagacaccagtaacaaaaacacatgatttggaaatactttggctttttcatatacctagtggtgccttatcataatagcactgttacatgaaataagcccctaccttcttactttctggtttgttgaaaaaatacactggtgctctttgaagtgataaaatgagtgtttatgaatgggtgtaattaggaaatacttctcatctgacagctacaaataactaagtttggaggtattttcactctatatgaataaatatttttccataaaatagttgtgattatatttttgttttatataggtcccaaattataattgtcaaatatatattttaaattaataaaagttgtcattcttaggaatttggtttgaaatttatcagttatacagaattgtcatactgcattagcttctacctttagtaagacatattttttaggtataaattcttatgctttaacattatttctggattgaaaatcttataaaacccttgaaaataaacagtctcttttttacaaagcctgtgttagagcacagatttacctaggcttgaagatttggaagaaataatatgtaagaatggcctcaaggcagaccactttaagtttggctagacttcatatcgtggaagtattgtctatttcagtgtgaaactatcttgaatttgcaaatatagtgttatattttataaagttttgtaaaatcccaaacaatatttctatttttgtaaaacaattgtatgtataatctgtatttgaaatcattttgcaatctatggaaatagagtagcaattgctatttctaaattgtgaactttaagtcaatctagatttattttgagaagtaattgttcactctttacttttgaggcagccattaggttgaaagtatatatttatcatataaaacttgatgcgttttgcactactctttccatttatatgctgcaaacaactacagtctttgaaatatggaaaatcagcagtctaaagtttgttttaaattctaaatttaaaaaatcttcaaatctgaatataccgcaaatgtcatgagaagtttgattcagtaacttgtgatggaggattctttggtatcttactgtttggttaaggcactaattttacttacctattagattttgaaagtatctgagatatacaaatctccctgtaggaaatgtgaaagaaaagcacaacaaaactagggttttttgttcatttgcttgcttttatgattttttttggtttgttttaatatcaggtggatttttgtttctaagcaatatatacataaaatcaaccaacatatctgaaaaggatcatgaaacctgagaaatgctaatggagatttgctggtacataggaatctagcaaattcaggaaccaaggggaaatgttgtgagataacatttacattgtcaacctttattgactttgtttttacaataaaaaatattttacaactta

SEQ ID NO: 417518 - DNA, 2860 bp, Homo sapiens
tgcgcgcgcaggggagaggccagcccaggcagccgttgtcgggttcgactggaggggcgggggagtcacctgcgagcggctgcgctggcggccagcccgcccaccgcgtctggatcgcgccggctgcgcggggctgcggacagcacacaccctggaaggccccggcggggaacgggcagagtccgcgccctgcgtccgcgaccaggaggatcggaccttcgccttcgctgtcgccgccgccgccgcccgcggccgtcggggctattagtgaaagatggtggatcgcttggcaaacagtgaagcaaatactagacgtataagtatagtggaaaactgttttggagcagctggtcaacctttaactatacctggacgagttcttattggagaaggagtattgactaagttgtgcaggaaaaagcccaaagcaaggcagtttttcttgtttaatgatattcttgtatatggcaatattgtcatccagaagaaaaaatataacaaacaacatattattcccctggaaaatgtcactattgattccatcaaagatgagggagacttaaggaatggatggctaatcaagacaccaactaaatcttttgcagtttatgctgccactgctacggagaaatcagaatggatgaatcatataaataaatgtgttactgatttactctccaaaagtgggaagacacccagtaatgaacatgctgctgtctgggttcctgactctgaggcaactgtatgtatgcgttgtcagaaagcaaaattcacacctgttaatcgtcgccaccattgccgcaaatgtggttttgttgtctgtgggccctgctctgaaaagagatttcttcttcccagccagtcctctaagcctgtgcggatttgtgacttctgctatgacctgctttctgctggggacatggccacatgccagcctgctagatcagactcttacagccagtcattgaagtctcctttaaatgatatgtctgatgatgatgacgatgatgatagcagtgactaaggacacatttgggagtatttaatcaggtgtggctatctgagaaatcaactttgggggaaatgtaagattctgagctctctctctgttttgttctagccatgaatttgcctgagaaacttgtaacctatgtgcctcaatatattccatagaaagtaggtccccctgccttctcccactcctcacactcttctacagggataggcttttgcaaatatatcagataaattttttgtttcttgtttatttttaggttattttcttggaaggttgggaaaagatgtttgttttaacaggtcatgtactacgttgttgttttcatttctgttataagtaaaactaaaagcacagaatggtgggaaaggggctataatgtggttcattaataatgttagcagcttttttctaaccatcctgtctaatggttaagacaccagtaacaaaaacacatgatttggaaatactttggctttttcatatacctagtggtgccttatcataatagcactgttacatgaaataagcccctaccttcttactttctggtttgttgaaaaaatacactggtgctctttgaagtgataaaatgagtgtttatgaatgggtgtaattaggaaatacttctcatctgacagctacaaataactaagtttggaggtattttcactctatatgaataaatatttttccataaaatagttgtgattatatttttgttttatataggtcccaaattataattgtcaaatatatattttaaattaataaaagttgtcattcttaggaatttggtttgaaatttatcagttatacagaattgtcatactgcattagcttctacctttagtaagacatattttttaggtataaattcttatgctttaacattatttctggattgaaaatcttataaaacccttgaaaataaacagtctcttttttacaaagcctgtgttagagcacagatttacctaggcttgaagatttggaagaaataatatgtaagaatggcctcaaggcagaccactttaagtttggctagacttcatatcgtggaagtattgtctatttcagtgtgaaactatcttgaatttgcaaatatagtgttatattttataaagttttgtaaaatcccaaacaatatttctatttttgtaaaacaattgtatgtataatctgtatttgaaatcattttgcaatctatggaaatagagtagcaattgctatttctaaattgtgaactttaagtcaatctagatttattttgagaagtaattgttcactctttacttttgaggcagccattaggttgaaagtatatatttatcatataaaacttgatgcgttttgcactactctttccatttatatgctgcaaacaactacagtctttgaaatatggaaaatcagcagtctaaagtttgttttaaattctaaatttaaaaaatcttcaaatctgaatataccgcaaatgtcatgagaagtttgattcagtaacttgtgatggaggattctttggtatcttactgtttggttaaggcactaattttacttacctattagattttgaaagtatctgagatatacaaatctccttgcttttatgattttttttggtttgttttaatatcaggtggatttttgtttctaagcaatatatacataaaatcaaccaacatatctgaaaaggatcatgaaacctgagaaatgctaatggagatttgctggtacataggaatctagcaaattcaggaaccaaggggaaatgttgtgagataacatttacattgtcaacctttattgactttgtttttacaataaaaaatattttacaactta

SEQ ID NO: 417519 - DNA, 1254 bp, Homo sapiens
tgcgcgcgcaggggagaggccagcccaggcagccgttgtcgggttcgactggaggggcgggggagtcacctgcgagcggctgcgctggcggccagcccgcccaccgcgtctggatcgcgccggctgcgcggggctgcggacagcacacaccctggaaggccccggcggggaacgggcagagtccgcgccctgcgtccgcgaccaggaggatcggaccttcgccttcgctgtcgccgccgccgccgcccgcggccgtcggggctattagtgaaagatggtggatcgcttggcaaacagtgaagcaaatactagacgtataagtatagtggaaaactgttttggagcagctggtcaacctttaactatacctggacgagttcttattggagaaggagtattgactaagttgtgcaggaaaaagcccaaagcaaggcagtttttcttgtttaatgatattcttgtatatggcaatattgtcatccagaagaaaaaatataacaaacaacatattattcccctggaaaatgtcactattgattccatcaaagatgagggagacttaaggaatggatggctaatcaagacaccaactaaatcttttgcagtttatgctgccactgctacggagaaatcagaatggatgaatcatataaataaatgtgttactgatttactctccaaaagtgggaagacacccagtaatgaacatgctgctgtctgggttcctgactctgaggcaactgtatgtatgcgttgtcagaaagcaaaattcacacctgttaatcgtcgccaccattgccgcaaatgtggttttgttgtctgtgggccctgctctgaaaagagatttcttcttcccagccagtcctctaagcctgtgcggatttgtgacttctgctatgacctgctttctgctggggacatggccacatgccagcctgctagatcagactcttacagccagtcattgaagtctcctttaaatgatatgtctgatgatgatgacgatgatgatagcagtgactaaggacacatttgggagtatttaatcaggtgtggctatctgagaaatcaactttgggggaaatgtaagattctgagctctctctctgttttgttctagccatgaatttgcctgagaaacttgtaacctatgtgcctcaatatattccatagaaagtaggtccccctgccttctcccactcctcacactcttctacagggataggcttttgcaaatatatcagataaattttt

SEQ ID NO: 417520 - DNA, 348 bp, Homo sapiens
ctttgggaggctgaggcaggaggatccgtctcaaaaaaaaaaaaaaaaaggaatatagggagcaggggaagagtcaagggagccagggagttggtgcctggtcacccattttgcagatgggaaagctgcccccatgcatggggcctgccaagggtcacagcagggagacctcagagctgtggacggacctggacagaggctgtggacagggctgaggcctcctggctgttcctgtaacaagcgtgacacagccctgccccagggcctttgcacaggctgtgccctttgcctggagcatcttcccgcagaccctgtcattgcaggcccagttcaactggcccagcctct

SEQ ID NO: 417521 - DNA, 303 bp, Homo sapiens
aatacataatataacacctttaatttgatagaccagtcaagagcatttagtctatactgctctaggctaaaatttatcttaataaggatgtcaggtttctttgctttttgctgtcctagtcaaaatagcatcattgttccctaaactcagttgctaaactcctttttttttttttttctggatgagtgtttagtttctaaagttgctaaattcttaaagaaaatttattctagaaagataaagcatttctctattttggagctattgatcacacttgtaggggccaaggcttagtcctttctg

SEQ ID NO: 417522 - DNA, 926 bp, Homo sapiens
tgtcggtcgggttggtcttgaactcctggcctcaagtgatctgcctacctcgggctctccaagtgctgggattacaggcatgagccactgcccctggcccaactttctgttaatctttattggatactttttcactgtgctgaccccatgtgaatactattcaggaggtatgacagtaccattatggttatagctgtggacactattcttttatgctctgtactcatagctcttcacctttaggaactagagtagatgtaaagcatttaagaattttaaggtttgagctatttcatgatcaacctgaaagggccataacttgtaggtaatacgtatttttgttttgactgtcatgtggtagaagttacctgaaaaatgaagccaaccaactcttttgcatttcaactgttggtttattttttttgagacggaatttcactacgtggcccaggttggagtgcagtggtgtgatctaggttgactgcaacctctacttcccaggttcaggcaattctcctgcctcagcctcctgagtagctgggattacaggcccacaccaccaatcccagtgaacttttgtatttttagtagagacagggttttgccatcttggccaggctggtttcagactcctgacctcaagtgatccacctgcctcggcctcccaaagtgctggaattataggcgtgaacctccacgcctggcctcaactgtttaatttttcactttactgtttatatctcctaacatgagttattgttctgaagcactcaaaattttaatctctatttgattgtgttcgaaggtggatatcatatgttacactcttgatttgtggattctggattcattaagaatatcaagatttcttctgtaatttgtgtggttcttcctaaatacaataacttgatttacgaattcctgtt

SEQ ID NO: 417523 - DNA, 1549 bp, Homo sapiens
tattcattcttttggtcacctagggatcttctaagtgtgatattactttcagagaattcagacaagtgagaaacaataatgtaggagtcagcaaagcagaattcagagacttcagccaatcactgctgctctgagaggatccagttagagactcagtatcagcggtcagaacttatctcactcctgtgaactttcaggctggacttaaagctgccaagtttcccctgcagggaaggaaacactgcctcccttcagcaggtagctcattagaaagccaaacaggcaaacgatcctggcctctcccgccagctgaccgctcttcagcatccatgcggttgtagtcgtgactttctcagtcacgatcaagggtgattttttcttaaatatcaagctgttctttgaacagggaatgaacatgagtttttgtaacgtgactgaagttgagtttaagtaggaagcgcaggaagttcccaagtgccaggtgtgtgtagctcagagttccttttacagtgaggtgtctctcactgggggagcttccaggatcctgagcagactggacacaatcatctctcccttcctctatgtcaagcactgttacaaaagactgtgagcaaatttccatctaaatattaataattctgaagaagaggcaaaactgttgaatgcaagcgatacctattgttgaagaaacccacaaatttctgattctaagatcaggggatacaacaaaatctacaagtcatttcaaatagcacacaggaatcaaactttggtaaatcatttctgaggcacaattaaatatattgtagcactatgttaattaattatattaaatgtcgattcatcttgaatgtattctcaattgcctaccaaaaattggtatgattatcatttctgggtctactgatttttcatcatggcaacagaaattgtcattaaatagaattaagatacaactatatatcttattatttaaaaacattcatagacatattcataaagtttgaatttaaagttttatttttgcaattcagttgtatagaaatgttacataaattcctaaatgctcaattcaggtggcatgatttttagaatattatcttcttcaagatgaatacttaggtctacttcagctctgatattctatttttactttcttacttgaagtgagaaaagagaatggtgaattgtattatagcggtaatacattatttttattttagcttagatttacatttatcagtaaaacgtgtcagtgggctgggtgcagtggctcacatctgtaatctcagcagtttgggaggctgaggtgggcacgccacttgagcaccggagttccagacgagcctggacaacatggcgaaaccccaaaaccccatctctacaaaaaatacaaaaattagctgggtgtggtgggacacgcctgtagtcccagctacttaggaggctgaggtacgaggatctcttgagtccaggaggtgcaggttgcagtgagccaatattgccccactgcactccagcctgggaagcagagtgagaccttgcctca

SEQ ID NO: 417524 - DNA, 1534 bp, Homo sapiens
tattcattcttttggtcacctagggatcttctaagtgtgatattactttcagagaattcagacaagtgagaaacaataatgtaggagtcagcaaagcagaattcagagacttcagccaatcactgctgctctgagaggatccagttagagactcagtatcagcggtcagaacttatctcactcctgtgaactttcaggctggacttaaagctgccaagtttcccctgcagggaaggaaacactgcctcccttcagcaggtagctcattagaaagccaaacaggcaaacgatcctggcctctcccgccagctgaccgctcttcagcatccatgcggttgtagtcgtgactttctcagtcacgatcaagggtgattttttcttaaatatcaagctgttctttgaacagggaatgaacatgagtttttgtaacgtgactgaagttgagtttaagtaggaagcgcaggaagttcccaagtgccaggtgtgtgtagctcagagttccttttacagtgaggtgtctctcactgggggagcttccaggatcctgagcagactggacacaatcatctctcccttcctctatgtcaagcactgttacaaaagactgtgagcaaatttccatctaaatattaataattctgaagaagaggcaaaactgttgaatgcaagcgatacctattgttgaagaaacccacaaatttctgattctaagatcaggggatacaacaaaatctacaagtcatttcaaatagcacacaggaatcaaactttggtaaatcatttctgaggcacaattaaatatattgtagcactatgttaattaattatattaaatgtcgattcatcttgaatgtattctcaattgcctaccaaaaattggtatgattatcatttctgggtctactgatttttcatcatggcaacagaaattgtcattaaatagaattaagatacaactatatatcttattatttaaaaacattcatagacatattcataaagtttgaatttaaagttttatttttgcaattcagttgtatagaaatgttacataaattcctaaatgctcaattcaggtggcatgatttttagaatattatcttcttcaagatgaatacttaggtctacttcagctctgatattctatttttactttcttacttgaagtgagaaaagagaatggtgaattgtattatagcggtaatacattatttttattttagcttagatttacatttatcagtaaaacgtgtcagtgggctgggtgcagtggtcatcctcttatcccacccagatttctatctggttggttagggtagtccatgcctcaaggaaggcggtgcagcttaatttaacatattgttcagtaaagaatcccattgtgtatcataagaatcccttatccttttcgggccctccaccataccagactgaaaagtattccattgtccagaagtagctggtcttgagatttttattttcaagtgtattttctgtgatgttgtctcattgttatggaatagtttaggataat

SEQ ID NO: 417525 - DNA, 1370 bp, Homo sapiens
agcggctctagtcccagtaggaggtttgactaagatcaatcatgacgacttacagtgacaaaggggcaaagcctgagagaggccgattcctccacttccactctgtgaccttctgggttggcaacgccaagcaggccgcgtcattctactgcagcaagatgggctttgaacctctagcctacaggggcctggagaccggttcccgggaggtggtcagccatgtaatcaaacaagggaagattgtgtttgtcctctcctcagcgctcaacccctggaacaaagagatgggcgatcacctggtgaaacacggtgacggagtgaaggacattgcgttcgaggtggaagattgtgactacatcgtgcagaaagcacgggaacggggcgccaaaatcatgcgggagccctgggtagagcaagacaagtttgggaaggtgaagtttgctgtgctgcagacgtatggggacaccacacacaccctggtggagaagatgaactacatcggccaattcttgcctggatatgaggccccagcgttcatggaccccctacttcctaaactgcccaaatgcagtctggagatgatcgaccacattgtgggaaaccagcctgatcaggagatggtgtccgcctccgaatggtgcacacggaatatagctctctgcgatccattgtggtggccaactatgaagagtccatcaagatgcccatcaatgagccagcgcctggcaagaagaagtcccagatccaggaatatgtggactataacgggggcgctggggtccagcacatcgctctcaagaccgaagacatcatcacagcgattcgccacttgagagagagaggcctggagttcttatctgttccctccacgtactacaaacaactgcgggagaagctgaagacggccaagatcaaggtgaaggagaacattgatgccctggaggagctgaaaatcctggtggactacgacgagaaaggctacctcctgcagatcttcaccaaaccggtgcaggaccggcccacgctcttcctggaagtcatccagcgccacaaccaccagggttttggagccggcaacttcaactcactgttcaaggctttcgaggaggagcagaacctgcggggtaacctcaccaacatggagaccaatggggtggtgcccggcatgtaagccccgcccaccccacggaggccacagccacacagccacgccccctgattctggaactcgcccaacttccctactggctgctccccttgggtcccgcccaccagcggactcggcccccaaggctccgcccacactgaccacgcccctcggcggggccgccctctgctccagccctcccgattaaagcgtgccccggtcc

SEQ ID NO: 417526 - DNA, 1201 bp, Homo sapiens
  misc_feature (1065)..(1065): n is a, c, g, or t
  misc_feature (1090)..(1090): n is a, c, g, or t
  misc_feature (1151)..(1152): n is a, c, g, or t
agcggctctagtcccagtaggaggtttgactaagatcaatcatgacgacttacagtgacaaaggggcaaagcctgagagaggccgattcctccacttccactctgtgaccttctgggttggcaacgccaagcaggccgcgtcattctactgcagcaagatgggctttgaacctctagcctacaggggcctggagaccggttcccgggaggtggtcagccatgtaatcaaacaagggaagattgtgtttgtcctctcctcagcgctcaacccctggaacaaagagatgggcgatcacctggtgaaacacggtgacggagtgaaggacattgcgttcgaggtggaagattgtgactacatcgtgcagaaagcacgggaacggggcgccaaaatcatgcgggagccctgggtagagcaagacaagtttgggaaggtgaagtttgctgtgctgcagacgtatggggacaccacacacaccctggtggagaagatgaactacatcggccaattcttgcctggatatgaggccccagcgttcatggaccccctacttcctaaactgcccaaatgcagtctggagatgatcgaccacattgtgggaaaccagcctgatcaggagatggtgtccgcctccgaatggtgcacacggaatatagctctctgcgatccattgtggtggccaactatgaagagtccatcaagatgcccatcaatgagccagcgcctggcaagaagaagtcccagatccaggaatatgtggactataacgggggcgctggggtccagcacatcgctctcaagaccgaagacatcatcacagcgattcgccacttgagagagagaggcctggagttcttatctgttccctccacgtactacaaacaactgcgggagaagctgaagacggccaagatcaaggtgaaggagaacattgatgccctggaggagctgaaaatcctggtggactacgacgagaaaggctacctcctgcagatcttcaccaaaccggtgcaggaccggcccacgctcttcctggaagtcatccagcgccacaaccaccagggttntggagccggcacttcactcactgtnaaggctttgaagaggacagacctgcggggaactaccacatggacaagggggggggcccgcnntttattcccccccacccaacgggcgccagcacacacccgccctgttttg

SEQ ID NO: 417527 - DNA, 1422 bp, Homo sapiens
agcggctctagtcccagtaggaggtttgactaagatcaatcatgacgacttacagtgacaaaggggcaaagcctgagagaggccgattcctccacttccactctgtgaccttctgggttggcaacgccaagcaggccgcgtcattctactgcagcaagatgggctttgaacctctagcctacaggggcctggagaccggttcccgggaggtggtcagccatgtaatcaaacaagggaagattgtgtttgtcctctcctcagcgctcaacccctggaacaaagagatgggcgatcacctggtgaaacacggtgacggagtgaaggacattgcgttcgaggtggaagattgtgactacatcgtgcagaaagcacgggaacggggcgccaaaatcatgcgggagccctgggtagagcaagacaagtttgggaaggtgaagtttgctgtgctgcagacgtatggggacaccacacacaccctggtggagaagatgaactacatcggccaattcttgcctggatatgaggccccagcgttcatggaccccctacttcctaaactgcccaaatgcagtctggagatgatcgaccacattgtgggaaaccagcctgatcaggagatggtgtccgcctccgaatggtacctgaaaaacctgcagttccaccgcttctggtccgtggatgacacgcaggtgcacacggaatatagctctctgcgatccattgtggtggccaactatgaagagtccatcaagatgcccatcaatgagccagcgcctggcaagaagaagtcccagatccaggaatatgtggactataacgggggcgctggggtccagcacatcgctctcaagaccgaagacatcatcacagcgattcgccacttgagagagagaggcctggagttcttatctgttccctccacgtactacaaacaactgcgggagaagctgaagacggccaagatcaaggtgaaggagaacattgatgccctggaggagctgaaaatcctggtggactacgacgagaaaggctacctcctgcagatcttcaccaaaccggtgcaggaccggcccacgctcttcctggaagtcatccagcgccacaaccaccagggttttggagccggcaacttcaactcactgttcaaggctttcgaggaggagcagaacctgcggggtaacctcaccaacatggagaccaatggggtggtgcccggcatgtaagccccgcccaccccacggaggccacagccacacagccacgccccctgattctggaactcgcccaacttccctactggctgctccccttgggtcccgcccaccagcggactcggcccccaaggctccgcccacactgaccacgcccctcggcggggccgccctctgctccagccctcccgattaaagcgtgccccggtcc

SEQ ID NO: 417528 - DNA, 351 bp, Homo sapiens
tgaccattcatgagaaatccgttcccatgatctaatcatttcccaccaggcccctcgtccaacactggggattacagttcaacatgagatttgggcagggccacacatccaagctatagcacgtggctactgggaaattttaaattacatatgtcatttgtgttttggcccacattatatttccatggggcagctaatcaaggggcctctagcctcccttttggatgaggaccgtgtacagaatcgtattcatctcatcctcattctggatctagaagaccttgctgaatagaattttcctgtgaatatagtccttttgaacctctctttcttactctgctagaatctctg

SEQ ID NO: 417529 - DNA, 338 bp, Homo sapiens
cttcatagaaggttttccccaggcatggataactgagggagtggggtagcctgagacccagttgttcaggctgtttctgtgaaattgcaatgttttcttcatgactgcaaaacatgtgacctcaccatttcagaaatgagtaaggaggtgcatgagtttgagtcagatcaacaacaatgcaaacacagctatccacccagaaatacaattgttttagctcattattgaagtactagtaattgcagttttttaccattacttacaatggcagaaaccgcaattacttttgcaccaatctaatacatgctggctttcctttctactttaagagcttcgag

SEQ ID NO: 417530 - DNA, 265 bp, Homo sapiens
gaagtagaaaatattaaattgagttttaaaaaataacggcttattgagatatattcatatacccaaaaagtaccattttaaaatgaacaattcagtgactttactgtgttcacagaaatgtacagtcattaccactatttaattttttatacacacacatactttgtgttgtagaggaattttaggttcacagcaagattgaacagaaagtacagagattttcccctgtatcttctaccccacatgcaggaatagccttccccac

SEQ ID NO: 417531 - DNA, 440 bp, Homo sapiens
cggtcttggttctgctcaaatatgcccagaagtctgcctagttttcctttgactccagcctcctcataaacttccctcacggcagcaccgccaggttcctcctcgggttccattcctcctcctgggacaatccactggtctgggtaccggctgctactcaccagcagcacctcgtcctcctgctcgctccggaagcacaggcacgccgcccgcttcttgaagccctcgcggtcgtaggtccgcgtctggttgggcttgaacttcatcatagaggcgggctcctgctgctgctgctgctgctccggccgccgccgtgggggcccggccgccgccgacccgccggggagtgggggcgagggcgaatgggcgaggaacgcccgggagcgctagtcggtgcgggaggatgcgcgaggccggtcagtcccggggccggcggccgc

SEQ ID NO: 417532 - DNA, 314 bp, Homo sapiens
atagcaataggtcctagaagggaaatgaaagagaaatttcctcccaatggtatcaacttgcttttataaatgaatttttccaaatgtttttttctgattcaaataatttggaaatagtctttctaacaaaagatggacttcagtgcttttgaaataattatggaagttttcaggtgcatacggcatataaagatgagaaagcagcatctgcatatggctatggaggaaaatatgaacattaagatgtccacctaattgggaagattaattgtaattgtagaaattaaactataatttgggttccaggattatcc

SEQ ID NO: 417533 - DNA, 296 bp, Homo sapiens
aaactggtaacacttaatcaaactgttaccttctaattttagagctctcccaccttcctttttcctttttaattgtaaaaaaacacataatgtaaaatgcaccacctcaaccatttttaagtgtacaattcagtggcattcgtttactcgtgttattgtataaccataaccaccatccatctccagaagtcttcgtcttgcaaaactgaaactctgtaccaagtaaacaataagtcccatctcccctttctctgtagcccttggcaactaccattctatttcctgtctatgaattt

SEQ ID NO: 417534 - DNA, 286 bp, Homo sapiens
tgtagtcccagctactcaggaggctgaggcaggagaatcacttgaacccgggaggtggaggttgcagtgagccaagatcgtgccattgcactccagcctgggtgacagagcaagactctgtctcaaaaaaaaaaaaaaaaagatttttctttaatagcaaaccagctcttgtttcctgggagccaatatttatgtgcttggatagcaaaggttttaaagtctttacttcattagattcagttgcccaagattatgaagtcacatatatacttctgttttgattata

SEQ ID NO: 417535 - DNA, 508 bp, Homo sapiens
ttagagttgtttaagtatttgacgtaattttagtaaaacttcatgtctttggaattctcaagaactaaatagttcttcaggtagtctatagtagacttggaaaaagttcactaggcttatcggaactgtacttgaaacacaaacatgtcccaattgaaggaaaggacttttcttgatgacatgagcatctgagatttttttctttctttctctttagttttcaactttaaatcagtgagatttgcaacaacagtagtatgttggcattaaatattcatgtcaggccaggtgcagtcgttcacgcctgtaatcccaacactatgggaggccagaaaggtggatcacttaagctttggagtttgagaccagcctaggtaacatggcaaaactctgtctctacaaagaatacagaaattaaccagctgtggtggcatgctcatatagtcccagctacttgggtggtagaggcaggatgatccagcctggatgacagtgagaccccgtctca

SEQ ID NO: 417536 - DNA, 792 bp, Homo sapiens
gatactctggtttctcttcaaatcgtataaatctttcgccttttactaaagatttccgtggagagaaacgagtgtgagtctgaaaccaattttttgaggccttgcgtttcttagcagggcttattttaagtgttttaaaaacagatgcgattccgttaaatcgcgtgtggagctatgtaaagtgtattatagaacaaatgcgagttacggtttttcagcttttcgctttgttaagtatgtgatatcaattgtattgcatttctgagcagttataatattaagatgttggggtggcttactgcttttgaccaagaagtaggtttgttggttgattacaccatggtttttaaccccagccactgagtgatggagggttaccgactcacaagcgagcataacgcctgaggtccgcctgctgtcaggcagcaagcatcagatctcctaggagcgggaacctatgtgaactgcgtatacgaggtatctaggtgcgtgctccttttaagaatctaatggctgatgacgaggggcacagtttcaacctggaactgtccacaccccctacccaccttcccccgcccttggaaaaactgccttccatgaactgggtcccttgtgccagaaaggttggggaccgctggactatccgatcaaatgaagcagggactcggggcgagctcccccgctgctcccgccggcttctccgtgtagaatcgaagaaggcagtcccaagggctcttctgccccgtatccccgcctgaggagcgtgccaggcgcgcagctagtcctcccccg

SEQ ID NO: 417537 - DNA, 756 bp, Homo sapiens
  misc_feature (577)..(577): n is a, c, g, or t
  misc_feature (755)..(756): n is a, c, g, or t
tgcatgtgccattccccggatggaatatctttctctctctatgcccaccaactcctacacatccttcaaaacccaagcacattgctcctcctctattcagacttctccatcctccaggcagagcccaggctccagcttggaacgcctccagcctcaggtccctccctgattcctttacagtcctgacctcacctggcacccacctgcctgggaacccctctagggccaagagctgtggctcataaagagatggggtctcgccatattgccaggctggtctcaaactcctgagctcaagctgtcctcccaccttgggctcccacagtgctgggattccaggcgtgagccaccgcacccggccctggatttaacttagtatattaaaggccacagatggaacgaggtgccaggaaaagactgcgctttaaaattggccccgacttgccgggcgcggtggttcacacctgtcatcccagcactttgggaggccgaggcgggcagatcacgaagtcaggagttcgagaccagcctggccaacatggtgaaagcccgtctctactaaaaatacaaaaattanccgggcgtggtggcgggagcctgtaatcccagctactcgggaggctgaggcaggagaatcgcttgaacctggaaggcggaggttgtagtgagccgagatcgtgccactgcactccagcctgggcgacagagcgatgctccgtctcaaaaaaaataaaataaaataaaataaaattggnn

SEQ ID NO: 417538 - DNA, 365 bp, Homo sapiens
tgcatgtgccattccccggatggaatatctttctctctctatgcccaccaactcctacacatccttcaaaacccaagcacattgctcctcctctattcagacttctccatcctccaggcagagcccaggctccagcttggaacgcctccagcctcaggtccctccctgattcctttacagtcctgacctcacctggcacccacctgcctgggaacccctctagggccaagagctgtggctcataaaggtgagcccaccgatggccttgtgcttagagccaaaccaggtagcttcccctagcatccccttcacacattactgccccgtgccaggcacatggagggctgaggggcccccttgtgccc

SEQ ID NO: 417539 - DNA, 472 bp, Homo sapiens
cagcctcttccttgtccacctcctccggcgcatcggtccgcatcagccatgatgccggtggggcccttcagagcccaaagttgaagcctagctggttgctgtgttgaccctgacgccgaggcggggtcaccatcccttgtttgggatttcccgggaatctacagttagcctagagataaagaatctcgttggggccaggtttttccaataccggtatttactgtttatgttctgaaagcagaggaaatgcttacccacaagtcaaagctgggatgctcacatttcttccatcaaaataatgttgttatgaaaataaaaccaactcatttcaccaatgtggcattttggttgaaagcctggtagtttgcaattgatgaagtttccaaatagaaagtcaacagtgaaacctatgcatctatattgggtaatttctagccataataaagtgttcacactttgattttagttgagg

SEQ ID NO: 417540 - DNA, 204 bp, Homo sapiens
ccacaccgctcagaggaggggtgcggcagccacacactcaccaggtacacactcgcaatccagcacactcacagcgccctaatccactttttgcctagtgcttattatcagctgacacattaaatatttgttatgtttctgttggcctctcctcacacaaagaagacaggtttgttgactgctgtatctccagcatgcacagcc

SEQ ID NO: 417541 - DNA, 111 bp, Homo sapiens
acacctaactccacgatcatcagaccttactttaaggcctcagaaacagagaagaatagacatatttcttataccctcaaagtaggttccctgaagcctggatacgacaga

SEQ ID NO: 417542 - DNA, 259 bp, Homo sapiens
gaaccatcaggtccagaattacatactgctcccttttttgtgcttcaatgatgctacagaaggacaaccctagcaagagtgcctgaactatgtaacataataaaaagtaagatagaggcgatgccactgacaactctggggatgtctcagaagatagttgagatttatcattaggtaacgatccaactgacaggttaaaaacaaactcactcctgaaaacaaacacatcctttttgagacaggatctcgctttgtcaca

SEQ ID NO: 417543 - DNA, 412 bp, Homo sapiens
tcattgcttgtaccctaacagcatgtccgccccccgccagggcctttgcactgctatttgctctgcctggaatgttccttccccaggtatctcctaggcttgtatctttcctttctgcaaattcactcaaatgtcaccagatcaccaaagcttcttctcatcaccagctgaacaatgccactcccaccgcagacaccacctaactctcttccctcctggattcttctgtacggtgttcctgatcagccgccatggtatagacttcactcacttgcttttctgttgtctgtccccttacccgcatcccaacaaaatcttcactccaagaaggcagggggtctttctttaatctgctttgatcactgatgtatgcactgccagtaacaggatagtatctagcactacttctgaa

SEQ ID NO: 417544 - DNA, 485 bp, Homo sapiens
aactattttaattagcattatacagtggaatgccatggacgaagagtcagaagaattcagattctttaacaaccgaccatccttcaaatttctcatcttcagaaggggatcctacttttttcccttgtggggttctaacaagaaacaaaccggaaagtgctctgtaaagtgaagcaattcccgtgtccaaaagatctcctatcaactccctacccaggacagcctagaggggaaactgatgagaacgaggagttttgctttatccaccattaaaactgaaagggtttccccctaaagatctgccatcaagagctgagccactgacgccattcctagttccactgctactagaagccttcatcacttgcaataatagaggatgatgattcattacaataaaaacagtatctactcccctgtggaagataatcctagggaagttctggaagaagtattaaaaacagcagcagagcaaagagggggaa

SEQ ID NO: 417545 - DNA, 1219 bp, Homo sapiens
taaatttaaaaaatgtatctataaaccaagaacagagtctgatatgaaatagacaaactttaataaggaaaaatgcaaaatccggtagttaaaaagcatgatggcaaaactgaagggtagaaggaggcaggagtttttgcaaaataaccagggaattttaatttcaaattaaatataagccaatagtgcaatgcaaccgataaagggaaaaatcaaatacaactgatcaagttggaaaacagtgagctattgggcttcattaatccacaaaaggaaatatgtggtaaagttggaatcacacctggcctatttatacaactttcaggccacacattaaggggaacattggcaaactgatcttctgcctggatgttttatccattattaaaaggggaatattgaagtctaccactattattgtattgctgtcaatttctccattcagatatgtcaatatttgctttgtatatttaaatgctctagtattgaatatgtatatacttataattgttatatcttcttactgaattgatcattttgtcatatggtgacctttatctctagagacaattttcaattttaagtctgttttgcctgacataaatatagccatttctgctttctttttgttaccattttggaatgtctttttctatcttgtcactttcagcctatgtgtatctttacatctagggtgagtttcttgtagatagcaagtcactggatcttgttttcttcataattcagtcttgacgtattgttatattagttcattttcacagtgctataaagaaatacccaagactaggtaatttataaaggaaagaagtttaattgactcacagttccatatggctgtgctgggggaggtcaagtaacttacaatcatggcagaaagcaacggagaagtaagtaccttcttcacaaggcagcgggaaagataaaacgaagggagaagagcctcttataaaaatctccagatctcctgagaactcactcactatcaagagaaaagcctgggggaaatcacccttatgatctaatcacctcttacctagtccctgccgtgacaagtgtggattacagtcagagatgagatttgcgtggggacacagagccaaaccatactgcttgtatatttataagaattcatcaatttcttctatattatccaatttttggcacataattgtaaataaaagtcccttatgatctttta

SEQ ID NO: 417546 - DNA, 4136 bp, Homo sapiens
ggacaagaaacacaagcaaatataaaacattcaattctaagagaagttcatcagagacatccttcaggattgtgagctggattttcctctacgtgcttcagtcttctctacacaaagagctgcaaaccaggtctttgttttgcactcttatttcaagcagaatgagtgctcctaaactcctctctctgggctgtatcttcttccccttgctactttttcagcaggcccgggctcaattcccaagacagtgtgccactgttgaggctttgagaagtggtatgtgttgcccagacctgtcccctgtgtctgggcctgggacagaccgctgtggctcatcatcagggaggggcagatgtgaggcagtgactgcagactcccggccccacagccctcagtatccccatgatggcagagatgatcgggaggtctggcccttgcgcttcttcaataggacatgtcactgcaacggcaatttctcaggacacaactgtgggacgtgccgtcctggctggagaggagctgcctgtgaccagagggttctcatagtcaggagaaatcttctggacttaagtaaagaagaaaagaaccactttgtccgggccctggatatggcaaagcgcacaactcaccctttatttgtcattgccaccaggagatcagaagaaatactggggccagatggcaacacgccacaatttgagaacatttccatttataactactttgtttggacacactattactcagtcaaaaagactttccttggggtaggacaggaaagctttggtgaagtggatttctctcatgagggaccagcttttctcacatggcacaggtaccacctcctgcgtctggagaaagacatgcaggaaatgttgcaagagccttctttctcccttccttactggaattttgcaacggggaaaaatgtctgtgatatctgcacggatgacttgatgggatccagaagcaactttgattccactctaataagcccaaactctgtcttttctcaatggcgagtggtctgtgactccttggaagattatgataccctgggaacactttgtaacagcaccgaggatgggccaattaggagaaatccagctggaaatgtggccagaccaatggtgcaacgtcttcctgaaccacaggatgtcgctcagtgcttggaagttggtttatttgacacgcctcctttttattccaactctacaaacagtttccgaaacacagtggaaggttacagtgaccccacgggaaagtatgaccctgctgttcgaagtcttcacaatttggctcatctattcctgaatggaacagggggacaaacccatttgtctccaaatgatcctatttttgtcctcctgcacaccttcacagatgcagtctttgatgaatggctgaggagatacaatgctgatatatccacatttccattggaaaatgcccctattggacataatagacaatacaacatggtgccattctggcccccagtcaccaacacagaaatgtttgttactgctccagacaacctgggatacacttatgaaattcaatggccaagtcgggagtttagtgtacctgagataattgccatagcagtagttggcgctttgttactggttgcactcatttttgggactgcttcttatctgattcgtgccagacgcagtatggatgaagctaaccagcctctcctcactgatcagtatcaatgctatgctgaagaatatgaaaaactccagaatcctaatcagtctgtggtctaacaaatgccctactctcttatgcattagtatcacaaaaccacctggttgaatataatagattgagttattaactgtattttctttcactttattaccttctttctaatacaagcatatgttagaattaaagttctaggcatacttttcaaagctgggaagaccctttcagaatcttttcaatgggttttaattttcagttctatttaaaatggtgaatgacactaaactccatgatatttaaggatagtgtgaagatctttggcatgatttaaaggttgagtatgtgaagatataagtgaactaccatgctttgtttacgtgtaaaggaaaataatgtttgatagtaaatgtccacttaaaatacatgaatgggcatttctaaaatgttaaaacataaacacatttccattcatggatatttgtcaacagatttaaagaaaaccacagttattaattaaagaaaattatgtgtagttataaaccaatgaaattttgattaaccttttcaaattaatgttccagtttgaagaccaatcaaatatattatttagtcaacatatactatttagtctcaggttcaaggctacaacaaaaatcaccatctttgtcaaactttggagagggaaaatcttcactttcttaagcaacaatggatattgcctgtgtttgccactgtgtttccctgcctctcaattcgctgaaaaaggaactacctatccttacatttcacctactaatgtctcttctaacatcttagaggtccatggagaaggcatatggagaacatgttttatactgctctataaatagtattccaatcactgtgcttaatttaaatagcattatcttatcatttatcagccttttatgtattttccaagtaaaatattaacatattatttcattggtcttcttttttatctggttctatatgaatgctattttttcccttctcttctaacatgaaatatattttctctttttgatcttgtgctatgaaacaatcttccaaagaactgtataaggtggtcataagtgaatattttaattaaaattggtaaaaataaataataacagtaataatcatgcactatagaaaatggctaaactgagattctaaattctacaaacagaaacaagtttaagttatgtatccctgattggttactgggttttcctatattcaaaaatattaaggctatatatacacaagataaacaaataaaatatatcaaagagcatgcatataacaataggatgttttacactagcattattcaatttattctcttggaatacattgcgatttgttaaaatacagtatactcacagcttttcaaagaaattactgtgtaatgtaagatgcctttttatatagaacatcaatgaaactaaatacttcactttatatttttgtagacttactaattactcatttcagaaacatttattaagcacatactagatatcaagtatttcaaggcactatagatttagagagaagaaaataagaattgtaaaattgagaaggtcatgtttgacttgtacttcaaggactgccaatggatttaccaaatatagaagcagagaagggaattttattcaaaagtgacagcatggacaagggcacagaagtttaaaagagcatggaactttttaaaatataaaataggtcagtgtgattacagtatagtttttatggaggggagtaaaaagataaattggaaataaaaccagagtgtcctatatgcaattcttaatacttggaattaattccatgggaaataggaaacagggagagtcataatcaagctgtatatttataaatatagtagtgatggtgctgttcacaaataacgttgatgagaaataatttggaatggttaaaagcaaagaaactcattaatatggaatagattgtgggagagaggagaaagccttgtttcaaagcattaattctaaataatcataattataagataaagttgtacacatctataaataaataaatacagcttatattataaatactatataatattgaaattataagtataatataaatatagctttaagtaaatcattacaaaaatgtcagttaacaatggaagactgtgagagagaggattaaaacaagagcaaaacagaaaactattaacaaaatggcagttagtaagtcctcagcaatcagtaattattttaatgtaaatggcttaatatcccaaataagaatgcttaaagtagctgagtgaatcaaaaaacatgatccagtgacttgctgtctataagagactcactttagatttaaaaatacatataggctggaagtaaagagatggaaaaggatattatgaaaatggt

SEQ ID NO: 417547 - DNA, 2584 bp, Homo sapiens
ggacaagaaacacaagcaaatataaaacattcaattctaagagaagttcatcagagacatccttcaggattgtgagctggattttcctctacgtgcttcagtcttctctacacaaagagctgcaaaccaggtctttgttttgcactcttatttcaagcagaatgagtgctcctaaactcctctctctgggctgtatcttcttccccttgctactttttcagcaggcccgggctcaattcccaagacagtgtgccactgttgaggctttgagaagtggtatgtgttgcccagacctgtcccctgtgtctgggcctgggacagaccgctgtggctcatcatcagggaggggcagatgtgaggcagtgactgcagactcccggccccacagccctcagtatccccatgatggcagagatgatcgggaggtctggcccttgcgcttcttcaataggacatgtcactgcaacggcaatttctcaggacacaactgtgggacgtgccgtcctggctggagaggagctgcctgtgaccagagggttctcatagtcaggagaaatcttctggacttaagtaaagaagaaaagaaccactttgtccgggccctggatatggcaaagcgcacaactcaccctttatttgtcattgccaccaggagatcagaagaaatactggggccagatggcaacacgccacaatttgagaacatttccatttataactactttgtttggacacactattactcagtcaaaaagactttccttggggtaggacaggaaagctttggtgaagtggatttctctcatgagggaccagcttttctcacatggcacaggtaccacctcctgcgtctggagaaagacatgcaggaaatgttgcaagagccttctttctcccttccttactggaattttgcaacggggaaaaatgtctgtgatatctgcacggatgacttgatgggatccagaagcaactttgattccactctaataagcccaaactctgtcttttctcaatggcgagtggtctgtgactccttggaagattatgataccctgggaacactttgtaacagcaccgaggatgggccaattaggagaaatccagctggaaatgtggccagaccaatggtgcaacgtcttcctgaaccacaggatgtcgctcagtgcttggaagttggtttatttgacacgcctcctttttattccaactctacaaacagtttccgaaacacagtggaaggttacagtgaccccacgggaaagtatgaccctgctgttcgaagtcttcacaatttggctcatctattcctgaatggaacagggggacaaacccatttgtctccaaatgatcctatttttgtcctcctgcacaccttcacagatgcagtctttgatgaatggctgaggagatacaatgctgatatatccacatttccattggaaaatgcccctattggacataatagacaatacaacatggtgccattctggcccccagtcaccaacacagaaatgtttgttactgctccagacaacctgggatacacttatgaaattcaatggccaagtcgggagtttagtgtacctgagataattgccatagcagtagttggcgctttgttactggttgcactcatttttgggactgcttcttatctgattcgtgccagacgcagtatggatgaagctaaccagcctctcctcactgatcagtatcaatgctatgctgaagaatatgaaaaactccagaatcctaatcagtctgtggtctaacaaatgccctactctcttatgcattagtatcacaaaaccacctggttgaatataatagattgagttattaactgtattttctttcactttattaccttctttctaatacaagcatatgttagaattaaagttctaggcatacttttcaaaaaaaaaaaaaaaaaaaaaaaaaaaaaaaaaaaaaaaaaaaaaaaaaaaaaaaaaaaaaaaaaaaaaaaaaaaaaaaaaaaaaaaaaaaaaaaaaaaaaaaaaaaaaaaaaaaaaaaaaaaaaaaaaaaaaaaaaaagggggaggggggggggggtggcacagacgaaccgcgcggaggagcaggagagaggacagcgaggccggagcagaatgaaggagagataagagagggaacacgcggccgggaggacgacaggagcatggaacgcaggacggaaccaggctgcagctgagatagaaagaagagagagggaggcggagagacgaacaaagagacgaagcgacgagagagagaccaggaaagagaagagaacggtataagaagaagcaagaggcaggcacgagaccaaaacggaaagagcaagagatagccgacgcgaggagaaaaaagaaagagagaagaacgcagagaaagcaaaaaaaagcagaaaaataccaagagaggagagaaggcgaagctaggagcaacaaagagcaagaaaagaaagagacaaagacggagagagggagaaggagcggcagatagaagcagacaaaaacgaacatacgaacaaaataaacgagagcggacaagaagaagagacacaaaaaaaaacaaa

SEQ ID NO: 417548 - DNA, 3819 bp, Homo sapiens
ggacaagaaacacaagcaaatataaaacattcaattctaagagaagttcatcagagacatccttcaggattgtgagctggattttcctctacgtgcttcagtcttctctacacaaagagctgcaaaccaggtctttgttttgcactcttatttcaagcagaatgagtgctcctaaactcctctctctgggctgtatcttcttccccttgctactttttcagcaggcccgggctcaattcccaagacagtgtgccactgttgaggctttgagaagtggtatgtgttgcccagacctgtcccctgtgtctgggcctgggacagaccgctgtggctcatcatcagggaggggcagatgtgaggcagtgactgcagactcccggccccacagccctcagtatccccatgatggcagagatgatcgggaggtctggcccttgcgcttcttcaataggacatgtcactgcaacggcaatttctcaggacacaactgtgggacgtgccgtcctggctggagaggagctgcctgtgaccagagggttctcatagtcaggagaaatcttctggacttaagtaaagaagaaaagaaccactttgtccgggccctggatatggcaaagcgcacaactcaccctttatttgtcattgccaccaggagatcagaagaaatactggggccagatggcaacacgccacaatttgagaacatttccatttataactactttgtttggacacactattggacataatagacaatacaacatggtgccattctggcccccagtcaccaacacagaaatgtttgttactgctccagacaacctgggatacacttatgaaattcaatggccaagtcgggagtttagtgtacctgagataattgccatagcagtagttggcgctttgttactggttgcactcatttttgggactgcttcttatctgattcgtgccagacgcagtatggatgaagctaaccagcctctcctcactgatcagtatcaatgctatgctgaagaatatgaaaaactccagaatcctaatcagtctgtggtctaacaaatgccctactctcttatgcattagtatcacaaaaccacctggttgaatataatagattgagttattaactgtattttctttcactttattaccttctttctaatacaagcatatgttagaattaaagttctaggcatacttttcaaagctgggaagaccctttcagaatcttttcaatgggttttaattttcagttctatttaaaatggtgaatgacactaaactccatgatatttaaggatagtgtgaagatctttggcatgatttaaaggttgagtatgtgaagatataagtgaactaccatgctttgtttacgtgtaaaggaaaataatgtttgatagtaaatgtccacttaaaatacatgaatgggcatttctaaaatgttaaaacataaacacatttccattcatggatatttgtcaacagatttaaagaaaaccacagttattaattaaagaaaattatgtgtagttataaaccaatgaaattttgattaaccttttcaaattaatgttccagtttgaagaccaatcaaatatattatttagtcaacatatactatttagtctcaggttcaaggctacaacaaaaatcaccatctttgtcaaactttggagagggaaaatcttcactttcttaagcaacaatggatattgcctgtgtttgccactgtgtttccctgcctctcaattcgctgaaaaaggaactacctatccttacatttcacctactaatgtctcttctaacatcttagaggtccatggagaaggcatatggagaacatgttttatactgctctataaatagtattccaatcactgtgcttaatttaaatagcattatcttatcatttatcagccttttatgtattttccaagtaaaatattaacatattatttcattggtcttcttttttatctggttctatatgaatgctattttttcccttctcttctaacatgaaatatattttctctttttgatcttgtgctatgaaacaatcttccaaagaactgtataaggtggtcataagtgaatattttaattaaaattggtaaaaataaataataacagtaataatcatgcactatagaaaatggctaaactgagattctaaattctacaaacagaaacaagtttaagttatgtatccctgattggttactgggttttcctatattcaaaaatattaaggctatatatacacaagataaacaaataaaatatatcaaagagcatgcatataacaataggatgttttacactagcattattcaatttattctcttggaatacattgcgatttgttaaaatacagtatactcacagcttttcaaagaaattactgtgtaatgtaagatgcctttttatatagaacatcaatgaaactaaatacttcactttatatttttgtagacttactaattactcatttcagaaacatttattaagcacatactagatatcaagtatttcaaggcactatagatttagagagaagaaaataagaattgtaaaattgagaaggtcatgtttgacttgtacttcaaggactgccaatggatttaccaaatatagaagcagagaagggaattttattcaaaagtgacagcatggacaagggcacagaagtttaaaagagcatggaactttttaaaatataaaataggtcagtgtgattacagtatagtttttatggaggggagtaaaaagataaattggaaataaaaccagagtgtcctatatgcaattcttaatacttggaattaattccatgggaaataggaaacagggagagtcataatcaagctgtatatttataaatatagtagtgatggtgctgttcacaaataacgttgatgagaaataatttggaatggttaaaagcaaagaaactcattaatatggaatagattgtgggagagaggagaaagccttgtttcaaagcattaattctaaataatcataattataagataaagttgtacacatctataaataaataaatacagcttatattataaatactatataatattgaaattataagtataatataaatatagctttaagtaaatcattacaaaaatgtcagttaacaatggaagactgtgagagagaggattaaaacaagagcaaaacagaaaactattaacaaaatggcagttagtaagtcctcagcaatcagtaattattttaatgtaaatggcttaatatcccaaataagaatgcttaaagtagctgagtgaatcaagtcactggatcttgttttcttcataattcagtcttgacgtattgttatattagttcattttcacagtgctataaagaaatacccaagactaggtaatttataaaggaaagaagtttaattgactcacagttccatatggctgtgctgggggaggtcaagtaacttacaatcatggcagaaagcaacggagaagtaagtaccttcttcacaaggcagcgggaaagataaaacgaagggagaagagcctcttataaaaatctccagatctcctgagaactcactcactatcaagagaaaagcctgggggaaatcacccttatgatctaatcacctcttacctagtccctgccgtgacaagtgtggattacagtcagagatgagatttgcgtggggacacagagccaaaccatactgcttgtatatttataagaattcatcaatttcttctatattatccaatttttggcacataattgtaaataaaagtcccttatgatctttta

SEQ ID NO: 417549 - DNA, 3439 bp, Homo sapiens
aaatacatttaatgaattttattcaaattgctttatgtaatttttaaaaattattcaagatcaccataggtgatgaaatactaaaactcccctgcttttaaactctcttttttattaagtggtatattggtactgtattcaaagcattttctgttttatgtaatttctcatcctgctgtagtgaaacttcatatctttattcagtgtaaaataagaataaaattttttcaggttctccttgaatattggatgcctttagaactcaataatgataggaatattaattttattatgtttattaatacgttgtctttggaataatttagatatatccacatttccattggaaaatgcccctattggacataatagacaatacaacatggtgccattctggcccccagtcaccaacacagaaatgtttgttactgctccagacaacctgggatacacttatgaaattcaatggccaagtcgggagtttagtgtacctgagataattgccatagcagtagttggcgctttgttactggttgcactcatttttgggactgcttcttatctgattcgtgccagacgcagtatggatgaagctaaccagcctctcctcactgatcagtatcaatgctatgctgaagaatatgaaaaactccagaatcctaatcagtctgtggtctaacaaatgccctactctcttatgcattagtatcacaaaaccacctggttgaatataatagattgagttattaactgtattttctttcactttattaccttctttctaatacaagcatatgttagaattaaagttctaggcatacttttcaaagctgggaagaccctttcagaatcttttcaatgggttttaattttcagttctatttaaaatggtgaatgacactaaactccatgatatttaaggatagtgtgaagatctttggcatgatttaaaggttgagtatgtgaagatataagtgaactaccatgctttgtttacgtgtaaaggaaaataatgtttgatagtaaatgtccacttaaaatacatgaatgggcatttctaaaatgttaaaacataaacacatttccattcatggatatttgtcaacagatttaaagaaaaccacagttattaattaaagaaaattatgtgtagttataaaccaatgaaattttgattaaccttttcaaattaatgttccagtttgaagaccaatcaaatatattatttagtcaacatatactatttagtctcaggttcaaggctacaacaaaaatcaccatctttgtcaaactttggagagggaaaatcttcactttcttaagcaacaatggatattgcctgtgtttgccactgtgtttccctgcctctcaattcgctgaaaaaggaactacctatccttacatttcacctactaatgtctcttctaacatcttagaggtccatggagaaggcatatggagaacatgttttatactgctctataaatagtattccaatcactgtgcttaatttaaatagcattatcttatcatttatcagccttttatgtattttccaagtaaaatattaacatattatttcattggtcttcttttttatctggttctatatgaatgctattttttcccttctcttctaacatgaaatatattttctctttttgatcttgtgctatgaaacaatcttccaaagaactgtataaggtggtcataagtgaatattttaattaaaattggtaaaaataaataataacagtaataatcatgcactatagaaaatggctaaactgagattctaaattctacaaacagaaacaagtttaagttatgtatccctgattggttactgggttttcctatattcaaaaatattaaggctatatatacacaagataaacaaataaaatatatcaaagagcatgcatataacaataggatgttttacactagcattattcaatttattctcttggaatacattgcgatttgttaaaatacagtatactcacagcttttcaaagaaattactgtgtaatgtaagatgcctttttatatagaacatcaatgaaactaaatacttcactttatatttttgtagacttactaattactcatttcagaaacatttattaagcacatactagatatcaagtatttcaaggcactatagatttagagagaagaaaataagaattgtaaaattgagaaggtcatgtttgacttgtacttcaaggactgccaatggatttaccaaatatagaagcagagaagggaattttattcaaaagtgacagcatggacaagggcacagaagtttaaaagagcatggaactttttaaaatataaaataggtcagtgtgattacagtatagtttttatggaggggagtaaaaagataaattggaaataaaaccagagtgtcctatatgcaattcttaatacttggaattaattccatgggaaataggaaacagggagagtcataatcaagctgtatatttataaatatagtagtgatggtgctgttcacaaataacgttgatgagaaataatttggaatggttaaaagcaaagaaactcattaatatggaatagattgtgggagagaggagaaagccttgtttcaaagcattaattctaaataatcataattataagataaagttgtacacatctataaataaataaatacagcttatattataaatactatataatattgaaattataagtataatataaatatagctttaagtaaatcattacaaaaatgtcagttaacaatggaagactgtgagagagaggattaaaacaagagcaaaacagaaaactattaacaaaatggcagttagtaagtcctcagcaatcagtaattattttaatgtaaatggcttaatatcccaaataagaatgcttaaagtagctgagtgaatcaagtcactggatcttgttttcttcataattcagtcttgacgtattgttatattagttcattttcacagtgctataaagaaatacccaagactaggtaatttataaaggaaagaagtttaattgactcacagttccatatggctgtgctgggggaggtcaagtaacttacaatcatggcagaaagcaacggagaagtaagtaccttcttcacaaggcagcgggaaagataaaacgaagggagaagagcctcttataaaaatctccagatctcctgagaactcactcactatcaagagaaaagcctgggggaaatcacccttatgatctaatcacctcttacctagtccctgccgtgacaagtgtggattacagtcagagatgagatttgcgtggggacacagagccaaaccatactgcttgtatatttataagaattcatcaatttcttctatattatccaatttttggcacataattgtaaataaaagtcccttatgatctttta

SEQ ID NO: 417550 - DNA, 303 bp, Homo sapiens
cacaggtaccacctcctgcgtctggagaaagacatgcaggtatgtaagaagcatttcagtttgcagactctttacagacaagatgccttgtttgtaagtgattttaattcactagttttcagaatcatcagaacatttgatgaaaaagcaattttatgttactaacctgtctttggcatttcgttttctccttattttggttacttgttaattaatctttatcttggtgaagtgaaaataaagcaaaatcaataatgagcaaaatgagacatttgcaggaatgaattaaaagtttaaaaatat

SEQ ID NO: 417551 - DNA, 4535 bp, Homo sapiens
ggacaagaaacacaagcaaatataaaacattcaattctaagagaagttcatcagagacatccttcaggattgtgagctggattttcctctacgtgcttcagtcttctctacacaaagagctgcaaaccaggtctttgttttgcactcttatttcaagcagaatgagtgctcctaaactcctctctctgggctgtatcttcttccccttgctactttttcagcaggcccgggctcaattcccaagacagtgtgccactgttgaggctttgagaagtggtatgtgttgcccagacctgtcccctgtgtctgggcctgggacagaccgctgtggctcatcatcagggaggggcagatgtgaggcagtgactgcagactcccggccccacagccctcagtatccccatgatggcagagatgatcgggaggtctggcccttgcgcttcttcaataggacatgtcactgcaacggcaatttctcaggacacaactgtgggacgtgccgtcctggctggagaggagctgcctgtgaccagagggttctcatagtcaggagaaatcttctggacttaagtaaagaagaaaagaaccactttgtccgggccctggatatggcaaagcgcacaactcaccctttatttgtcattgccaccaggagatcagaagaaatactggggccagatggcaacacgccacaatttgagaacatttccatttataactactttgtttggacacactattactcagtcaaaaagactttccttggggtaggacaggaaagctttggtgaagtggatttctctcatgagggaccagcttttctcacatggcacaggtaccacctcctgcgtctggagaaagacatgcaggaaatgttgcaagagccttctttctcccttccttactggaattttgcaacggggaaaaatgtctgtgatatctgcacggatgacttgatgggatccagaagcaactttgattccactctaataagcccaaactctgtcttttctcaatggcgagtggtctgtgactccttggaagattatgataccctgggaacactttgtaacagcaccgaggatgggccaattaggagaaatccagctggaaatgtggccagaccaatggtgcaacgtcttcctgaaccacaggatgtcgctcagtgcttggaagttggtttatttgacacgcctcctttttattccaactctacaaacagtttccgaaacacagtggaaggttacagtgaccccacgggaaagtatgaccctgctgttcgaagtcttcacaatttggctcatctattcctgaatggaacagggggacaaacccatttgtctccaaatgatcctatttttgtcctcctgcacaccttcacagatgcagtctttgatgaatggctgaggagatacaatgctgatatatccacatttccattggaaaatgcccctattggacataatagacaatacaacatggtgccattctggcccccagtcaccaacacagaaatgtttgttactgctccagacaacctgggatacacttatgaaattcaatggccaagtcgggagtttagtgtacctgagataattgccatagcagtagttggcgctttgttactggttgcactcatttttgggactgcttcttatctgattcgtgccagacgcagtatggatgaagctaaccagcctctcctcactgatcagtatcaatgctatgctgaagaatatgaaaaactccagaatcctaatcagtctgtggtctaacaaatgccctactctcttatgcattagtatcacaaaaccacctggttgaatataatagattgagttattaactgtattttctttcactttattaccttctttctaatacaagcatatgttagaattaaagttctaggcatacttttcaaagctgggaagaccctttcagaatcttttcaatgggttttaattttcagttctatttaaaatggtgaatgacactaaactccatgatatttaaggatagtgtgaagatctttggcatgatttaaaggttgagtatgtgaagatataagtgaactaccatgctttgtttacgtgtaaaggaaaataatgtttgatagtaaatgtccacttaaaatacatgaatgggcatttctaaaatgttaaaacataaacacatttccattcatggatatttgtcaacagatttaaagaaaaccacagttattaattaaagaaaattatgtgtagttataaaccaatgaaattttgattaaccttttcaaattaatgttccagtttgaagaccaatcaaatatattatttagtcaacatatactatttagtctcaggttcaaggctacaacaaaaatcaccatctttgtcaaactttggagagggaaaatcttcactttcttaagcaacaatggatattgcctgtgtttgccactgtgtttccctgcctctcaattcgctgaaaaaggaactacctatccttacatttcacctactaatgtctcttctaacatcttagaggtccatggagaaggcatatggagaacatgttttatactgctctataaatagtattccaatcactgtgcttaatttaaatagcattatcttatcatttatcagccttttatgtattttccaagtaaaatattaacatattatttcattggtcttcttttttatctggttctatatgaatgctattttttcccttctcttctaacatgaaatatattttctctttttgatcttgtgctatgaaacaatcttccaaagaactgtataaggtggtcataagtgaatattttaattaaaattggtaaaaataaataataacagtaataatcatgcactatagaaaatggctaaactgagattctaaattctacaaacagaaacaagtttaagttatgtatccctgattggttactgggttttcctatattcaaaaatattaaggctatatatacacaagataaacaaataaaatatatcaaagagcatgcatataacaataggatgttttacactagcattattcaatttattctcttggaatacattgcgatttgttaaaatacagtatactcacagcttttcaaagaaattactgtgtaatgtaagatgcctttttatatagaacatcaatgaaactaaatacttcactttatatttttgtagacttactaattactcatttcagaaacatttattaagcacatactagatatcaagtatttcaaggcactatagatttagagagaagaaaataagaattgtaaaattgagaaggtcatgtttgacttgtacttcaaggactgccaatggatttaccaaatatagaagcagagaagggaattttattcaaaagtgacagcatggacaagggcacagaagtttaaaagagcatggaactttttaaaatataaaataggtcagtgtgattacagtatagtttttatggaggggagtaaaaagataaattggaaataaaaccagagtgtcctatatgcaattcttaatacttggaattaattccatgggaaataggaaacagggagagtcataatcaagctgtatatttataaatatagtagtgatggtgctgttcacaaataacgttgatgagaaataatttggaatggttaaaagcaaagaaactcattaatatggaatagattgtgggagagaggagaaagccttgtttcaaagcattaattctaaataatcataattataagataaagttgtacacatctataaataaataaatacagcttatattataaatactatataatattgaaattataagtataatataaatatagctttaagtaaatcattacaaaaatgtcagttaacaatggaagactgtgagagagaggattaaaacaagagcaaaacagaaaactattaacaaaatggcagttagtaagtcctcagcaatcagtaattattttaatgtaaatggcttaatatcccaaataagaatgcttaaagtagctgagtgaatcaagtcactggatcttgttttcttcataattcagtcttgacgtattgttatattagttcattttcacagtgctataaagaaatacccaagactaggtaatttataaaggaaagaagtttaattgactcacagttccatatggctgtgctgggggaggtcaagtaacttacaatcatggcagaaagcaacggagaagtaagtaccttcttcacaaggcagcgggaaagataaaacgaagggagaagagcctcttataaaaatctccagatctcctgagaactcactcactatcaagagaaaagcctgggggaaatcacccttatgatctaatcacctcttacctagtccctgccgtgacaagtgtggattacagtcagagatgagatttgcgtggggacacagagccaaaccatactgcttgtatatttataagaattcatcaatttcttctatattatccaatttttggcacataattgtaaataaaagtcccttatgatctttta

SEQ ID NO: 417552 - DNA, 4330 bp, Homo sapiens
ggacaagaaacacaagcaaatataaaacattcaattctaagagaagttcatcagagacatccttcaggattgtgagctggattttcctctacgtgcttcagtcttctctacacaaagagctgcaaaccaggtctttgttttgcactcttatttcaagcagaatgagtgctcctaaactcctctctctgggctgtatcttcttccccttgctactttttcagcaggcccgggctcaattcccaagacagtgtgccactgttgaggctttgagaagtggtatgtgttgcccagacctgtcccctgtgtctgggcctgggacagaccgctgtggctcatcatcagggaggggcagatgtgaggcagtgactgcagactcccggccccacagccctcagtatccccatgatggcagagatgatcgggaggtctggcccttgcgcttcttcaataggacatgtcactgcaacggcaatttctcaggacacaactgtgggacgtgccgtcctggctggagaggagctgcctgtgaccagagggttctcatagtcaggagaaatcttctggacttaagtaaagaagaaaagaaccactttgtccgggccctggatatggcaaagcgcacaactcaccctttatttgtcattgccaccaggagatcagaagaaatactggggccagatggcaacacgccacaatttgagaacatttccatttataactactttgtttggacacactattactcagtcaaaaagactttccttggggtaggacaggaaagctttggtgaagtggatttctctcatgagggaccagcttttctcacatggcacaggtaccacctcctgcgtctggagaaagacatgcaggcaccgaggatgggccaattaggagaaatccagctggaaatgtggccagaccaatggtgcaacgtcttcctgaaccacaggatgtcgctcagtgcttggaagttggtttatttgacacgcctcctttttattccaactctacaaacagtttccgaaacacagtggaaggttacagtgaccccacgggaaagtatgaccctgctgttcgaagtcttcacaatttggctcatctattcctgaatggaacagggggacaaacccatttgtctccaaatgatcctatttttgtcctcctgcacaccttcacagatgcagtctttgatgaatggctgaggagatacaatgctgatatatccacatttccattggaaaatgcccctattggacataatagacaatacaacatggtgccattctggcccccagtcaccaacacagaaatgtttgttactgctccagacaacctgggatacacttatgaaattcaatggccaagtcgggagtttagtgtacctgagataattgccatagcagtagttggcgctttgttactggttgcactcatttttgggactgcttcttatctgattcgtgccagacgcagtatggatgaagctaaccagcctctcctcactgatcagtatcaatgctatgctgaagaatatgaaaaactccagaatcctaatcagtctgtggtctaacaaatgccctactctcttatgcattagtatcacaaaaccacctggttgaatataatagattgagttattaactgtattttctttcactttattaccttctttctaatacaagcatatgttagaattaaagttctaggcatacttttcaaagctgggaagaccctttcagaatcttttcaatgggttttaattttcagttctatttaaaatggtgaatgacactaaactccatgatatttaaggatagtgtgaagatctttggcatgatttaaaggttgagtatgtgaagatataagtgaactaccatgctttgtttacgtgtaaaggaaaataatgtttgatagtaaatgtccacttaaaatacatgaatgggcatttctaaaatgttaaaacataaacacatttccattcatggatatttgtcaacagatttaaagaaaaccacagttattaattaaagaaaattatgtgtagttataaaccaatgaaattttgattaaccttttcaaattaatgttccagtttgaagaccaatcaaatatattatttagtcaacatatactatttagtctcaggttcaaggctacaacaaaaatcaccatctttgtcaaactttggagagggaaaatcttcactttcttaagcaacaatggatattgcctgtgtttgccactgtgtttccctgcctctcaattcgctgaaaaaggaactacctatccttacatttcacctactaatgtctcttctaacatcttagaggtccatggagaaggcatatggagaacatgttttatactgctctataaatagtattccaatcactgtgcttaatttaaatagcattatcttatcatttatcagccttttatgtattttccaagtaaaatattaacatattatttcattggtcttcttttttatctggttctatatgaatgctattttttcccttctcttctaacatgaaatatattttctctttttgatcttgtgctatgaaacaatcttccaaagaactgtataaggtggtcataagtgaatattttaattaaaattggtaaaaataaataataacagtaataatcatgcactatagaaaatggctaaactgagattctaaattctacaaacagaaacaagtttaagttatgtatccctgattggttactgggttttcctatattcaaaaatattaaggctatatatacacaagataaacaaataaaatatatcaaagagcatgcatataacaataggatgttttacactagcattattcaatttattctcttggaatacattgcgatttgttaaaatacagtatactcacagcttttcaaagaaattactgtgtaatgtaagatgcctttttatatagaacatcaatgaaactaaatacttcactttatatttttgtagacttactaattactcatttcagaaacatttattaagcacatactagatatcaagtatttcaaggcactatagatttagagagaagaaaataagaattgtaaaattgagaaggtcatgtttgacttgtacttcaaggactgccaatggatttaccaaatatagaagcagagaagggaattttattcaaaagtgacagcatggacaagggcacagaagtttaaaagagcatggaactttttaaaatataaaataggtcagtgtgattacagtatagtttttatggaggggagtaaaaagataaattggaaataaaaccagagtgtcctatatgcaattcttaatacttggaattaattccatgggaaataggaaacagggagagtcataatcaagctgtatatttataaatatagtagtgatggtgctgttcacaaataacgttgatgagaaataatttggaatggttaaaagcaaagaaactcattaatatggaatagattgtgggagagaggagaaagccttgtttcaaagcattaattctaaataatcataattataagataaagttgtacacatctataaataaataaatacagcttatattataaatactatataatattgaaattataagtataatataaatatagctttaagtaaatcattacaaaaatgtcagttaacaatggaagactgtgagagagaggattaaaacaagagcaaaacagaaaactattaacaaaatggcagttagtaagtcctcagcaatcagtaattattttaatgtaaatggcttaatatcccaaataagaatgcttaaagtagctgagtgaatcaagtcactggatcttgttttcttcataattcagtcttgacgtattgttatattagttcattttcacagtgctataaagaaatacccaagactaggtaatttataaaggaaagaagtttaattgactcacagttccatatggctgtgctgggggaggtcaagtaacttacaatcatggcagaaagcaacggagaagtaagtaccttcttcacaaggcagcgggaaagataaaacgaagggagaagagcctcttataaaaatctccagatctcctgagaactcactcactatcaagagaaaagcctgggggaaatcacccttatgatctaatcacctcttacctagtccctgccgtgacaagtgtggattacagtcagagatgagatttgcgtggggacacagagccaaaccatactgcttgtatatttataagaattcatcaatttcttctatattatccaatttttggcacataattgtaaataaaagtcccttatgatctttta

SEQ ID NO: 417553 - DNA, 4388 bp, Homo sapiens
ggacaagaaacacaagcaaatataaaacattcaattctaagagaagttcatcagagacatccttcaggattgtgagctggattttcctctacgtgcttcagtcttctctacacaaagagctgcaaaccaggtctttgttttgcactcttatttcaagcagaatgagtgctcctaaactcctctctctgggctgtatcttcttccccttgctactttttcagcaggcccgggctcaattcccaagacagtgtgccactgttgaggctttgagaagtggtatgtgttgcccagacctgtcccctgtgtctgggcctgggacagaccgctgtggctcatcatcagggaggggcagatgtgaggcagtgactgcagactcccggccccacagccctcagtatccccatgatggcagagatgatcgggaggtctggcccttgcgcttcttcaataggacatgtcactgcaacggcaatttctcaggacacaactgtgggacgtgccgtcctggctggagaggagctgcctgtgaccagagggttctcatagtcaggagaaatcttctggacttaagtaaagaagaaaagaaccactttgtccgggccctggatatggcaaagcgcacaactcaccctttatttgtcattgccaccaggagatcagaagaaatactggggccagatggcaacacgccacaatttgagaacatttccatttataactactttgtttggacacactattactcagtcaaaaagactttccttggggtaggacaggaaagctttggtgaagtggatttctctcatgagggaccagcttttctcacatggcacaggtaccacctcctgcgtctggagaaagacatgcaggaaatgttgcaagagccttctttctcccttccttactggaattttgcaacggggaaaaatgtctgtgatatctgcacggatgacttgatgggatccagaagcaactttgattccactctaataagcccaaactctgtcttttctcaatggcgagtggtctgtgactccttggaagattatgataccctgggaacactttgtaacagcaccgaggatgggccaattaggagaaatccagctggaaatgtggccagaccaatggtgcaacgtcttcctgaaccacaggatgtcgctcagtgcttggaagttggtttatttgacacgcctcctttttattccaactctacaaacagtttccgaaacacagtggaaggttacagtgaccccacgggaaagtatgaccctgctgttcgaagtcttcacaatttggctcatctattcctgaatggaacagggggacaaacccatttgtctccaaatgatcctatttttgtcctcctgcacaccttcacagatgcagtctttgatgaatggctgaggagatacaatgctggtcgggagtttagtgtacctgagataattgccatagcagtagttggcgctttgttactggttgcactcatttttgggactgcttcttatctgattcgtgccagacgcagtatggatgaagctaaccagcctctcctcactgatcagtatcaatgctatgctgaagaatatgaaaaactccagaatcctaatcagtctgtggtctaacaaatgccctactctcttatgcattagtatcacaaaaccacctggttgaatataatagattgagttattaactgtattttctttcactttattaccttctttctaatacaagcatatgttagaattaaagttctaggcatacttttcaaagctgggaagaccctttcagaatcttttcaatgggttttaattttcagttctatttaaaatggtgaatgacactaaactccatgatatttaaggatagtgtgaagatctttggcatgatttaaaggttgagtatgtgaagatataagtgaactaccatgctttgtttacgtgtaaaggaaaataatgtttgatagtaaatgtccacttaaaatacatgaatgggcatttctaaaatgttaaaacataaacacatttccattcatggatatttgtcaacagatttaaagaaaaccacagttattaattaaagaaaattatgtgtagttataaaccaatgaaattttgattaaccttttcaaattaatgttccagtttgaagaccaatcaaatatattatttagtcaacatatactatttagtctcaggttcaaggctacaacaaaaatcaccatctttgtcaaactttggagagggaaaatcttcactttcttaagcaacaatggatattgcctgtgtttgccactgtgtttccctgcctctcaattcgctgaaaaaggaactacctatccttacatttcacctactaatgtctcttctaacatcttagaggtccatggagaaggcatatggagaacatgttttatactgctctataaatagtattccaatcactgtgcttaatttaaatagcattatcttatcatttatcagccttttatgtattttccaagtaaaatattaacatattatttcattggtcttcttttttatctggttctatatgaatgctattttttcccttctcttctaacatgaaatatattttctctttttgatcttgtgctatgaaacaatcttccaaagaactgtataaggtggtcataagtgaatattttaattaaaattggtaaaaataaataataacagtaataatcatgcactatagaaaatggctaaactgagattctaaattctacaaacagaaacaagtttaagttatgtatccctgattggttactgggttttcctatattcaaaaatattaaggctatatatacacaagataaacaaataaaatatatcaaagagcatgcatataacaataggatgttttacactagcattattcaatttattctcttggaatacattgcgatttgttaaaatacagtatactcacagcttttcaaagaaattactgtgtaatgtaagatgcctttttatatagaacatcaatgaaactaaatacttcactttatatttttgtagacttactaattactcatttcagaaacatttattaagcacatactagatatcaagtatttcaaggcactatagatttagagagaagaaaataagaattgtaaaattgagaaggtcatgtttgacttgtacttcaaggactgccaatggatttaccaaatatagaagcagagaagggaattttattcaaaagtgacagcatggacaagggcacagaagtttaaaagagcatggaactttttaaaatataaaataggtcagtgtgattacagtatagtttttatggaggggagtaaaaagataaattggaaataaaaccagagtgtcctatatgcaattcttaatacttggaattaattccatgggaaataggaaacagggagagtcataatcaagctgtatatttataaatatagtagtgatggtgctgttcacaaataacgttgatgagaaataatttggaatggttaaaagcaaagaaactcattaatatggaatagattgtgggagagaggagaaagccttgtttcaaagcattaattctaaataatcataattataagataaagttgtacacatctataaataaataaatacagcttatattataaatactatataatattgaaattataagtataatataaatatagctttaagtaaatcattacaaaaatgtcagttaacaatggaagactgtgagagagaggattaaaacaagagcaaaacagaaaactattaacaaaatggcagttagtaagtcctcagcaatcagtaattattttaatgtaaatggcttaatatcccaaataagaatgcttaaagtagctgagtgaatcaagtcactggatcttgttttcttcataattcagtcttgacgtattgttatattagttcattttcacagtgctataaagaaatacccaagactaggtaatttataaaggaaagaagtttaattgactcacagttccatatggctgtgctgggggaggtcaagtaacttacaatcatggcagaaagcaacggagaagtaagtaccttcttcacaaggcagcgggaaagataaaacgaagggagaagagcctcttataaaaatctccagatctcctgagaactcactcactatcaagagaaaagcctgggggaaatcacccttatgatctaatcacctcttacctagtccctgccgtgacaagtgtggattacagtcagagatgagatttgcgtggggacacagagccaaaccatactgcttgtatatttataagaattcatcaatttcttctatattatccaatttttggcacataattgtaaataaaagtcccttatgatctttta

SEQ ID NO: 417554 - DNA, 3632 bp, Homo sapiens
ctccctcccaccatctctcttctttaaggctcctatcatattatctatccctagtatcacagttctttgtttgttactgcccttcacaaagtttcattatttctcacattaattgctgaaaaagttgaaaaatgtgtgttggttgacatatgtatcactttccaaagaaatgcaccgaggatgggccaattaggagaaatccagctggaaatgtggccagaccaatggtgcaacgtcttcctgaaccacaggatgtcgctcagtgcttggaagttggtttatttgacacgcctcctttttattccaactctacaaacagtttccgaaacacagtggaaggttacagtgaccccacgggaaagtatgaccctgctgttcgaagtcttcacaatttggctcatctattcctgaatggaacagggggacaaacccatttgtctccaaatgatcctatttttgtcctcctgcacaccttcacagatgcagtctttgatgaatggctgaggagatacaatgctgatatatccacatttccattggaaaatgcccctattggacataatagacaatacaacatggtgccattctggcccccagtcaccaacacagaaatgtttgttactgctccagacaacctgggatacacttatgaaattcaatggccaagtcgggagtttagtgtacctgagataattgccatagcagtagttggcgctttgttactggttgcactcatttttgggactgcttcttatctgattcgtgccagacgcagtatggatgaagctaaccagcctctcctcactgatcagtatcaatgctatgctgaagaatatgaaaaactccagaatcctaatcagtctgtggtctaacaaatgccctactctcttatgcattagtatcacaaaaccacctggttgaatataatagattgagttattaactgtattttctttcactttattaccttctttctaatacaagcatatgttagaattaaagttctaggcatacttttcaaagctgggaagaccctttcagaatcttttcaatgggttttaattttcagttctatttaaaatggtgaatgacactaaactccatgatatttaaggatagtgtgaagatctttggcatgatttaaaggttgagtatgtgaagatataagtgaactaccatgctttgtttacgtgtaaaggaaaataatgtttgatagtaaatgtccacttaaaatacatgaatgggcatttctaaaatgttaaaacataaacacatttccattcatggatatttgtcaacagatttaaagaaaaccacagttattaattaaagaaaattatgtgtagttataaaccaatgaaattttgattaaccttttcaaattaatgttccagtttgaagaccaatcaaatatattatttagtcaacatatactatttagtctcaggttcaaggctacaacaaaaatcaccatctttgtcaaactttggagagggaaaatcttcactttcttaagcaacaatggatattgcctgtgtttgccactgtgtttccctgcctctcaattcgctgaaaaaggaactacctatccttacatttcacctactaatgtctcttctaacatcttagaggtccatggagaaggcatatggagaacatgttttatactgctctataaatagtattccaatcactgtgcttaatttaaatagcattatcttatcatttatcagccttttatgtattttccaagtaaaatattaacatattatttcattggtcttcttttttatctggttctatatgaatgctattttttcccttctcttctaacatgaaatatattttctctttttgatcttgtgctatgaaacaatcttccaaagaactgtataaggtggtcataagtgaatattttaattaaaattggtaaaaataaataataacagtaataatcatgcactatagaaaatggctaaactgagattctaaattctacaaacagaaacaagtttaagttatgtatccctgattggttactgggttttcctatattcaaaaatattaaggctatatatacacaagataaacaaataaaatatatcaaagagcatgcatataacaataggatgttttacactagcattattcaatttattctcttggaatacattgcgatttgttaaaatacagtatactcacagcttttcaaagaaattactgtgtaatgtaagatgcctttttatatagaacatcaatgaaactaaatacttcactttatatttttgtagacttactaattactcatttcagaaacatttattaagcacatactagatatcaagtatttcaaggcactatagatttagagagaagaaaataagaattgtaaaattgagaaggtcatgtttgacttgtacttcaaggactgccaatggatttaccaaatatagaagcagagaagggaattttattcaaaagtgacagcatggacaagggcacagaagtttaaaagagcatggaactttttaaaatataaaataggtcagtgtgattacagtatagtttttatggaggggagtaaaaagataaattggaaataaaaccagagtgtcctatatgcaattcttaatacttggaattaattccatgggaaataggaaacagggagagtcataatcaagctgtatatttataaatatagtagtgatggtgctgttcacaaataacgttgatgagaaataatttggaatggttaaaagcaaagaaactcattaatatggaatagattgtgggagagaggagaaagccttgtttcaaagcattaattctaaataatcataattataagataaagttgtacacatctataaataaataaatacagcttatattataaatactatataatattgaaattataagtataatataaatatagctttaagtaaatcattacaaaaatgtcagttaacaatggaagactgtgagagagaggattaaaacaagagcaaaacagaaaactattaacaaaatggcagttagtaagtcctcagcaatcagtaattattttaatgtaaatggcttaatatcccaaataagaatgcttaaagtagctgagtgaatcaagtcactggatcttgttttcttcataattcagtcttgacgtattgttatattagttcattttcacagtgctataaagaaatacccaagactaggtaatttataaaggaaagaagtttaattgactcacagttccatatggctgtgctgggggaggtcaagtaacttacaatcatggcagaaagcaacggagaagtaagtaccttcttcacaaggcagcgggaaagataaaacgaagggagaagagcctcttataaaaatctccagatctcctgagaactcactcactatcaagagaaaagcctgggggaaatcacccttatgatctaatcacctcttacctagtccctgccgtgacaagtgtggattacagtcagagatgagatttgcgtggggacacagagccaaaccatactgcttgtatatttataagaattcatcaatttcttctatattatccaatttttggcacataattgtaaataaaagtcccttatgatctttta

SEQ ID NO: 417555 - DNA, 1478 bp, Homo sapiens
ggacaagaaacacaagcaaatataaaacattcaattctaagagaagttcatcagagacatccttcaggattgtgagctggattttcctctacgtgcttcagtcttctctacacaaagagctgcaaaccaggtctttgttttgcactcttatttcaagcagaatgagtgctcctaaactcctctctctgggctgtatcttcttccccttgctactttttcagcaggcccgggctcaattcccaagacagtgtgccactgttgaggctttgagaagtggtatgtgttgcccagacctgtcccctgtgtctgggcctgggacagaccgctgtggctcatcatcagggaggggcagatgtgaggcagtgactgcagactcccggccccacagccctcagtatccccatgatggcagagatgatcgggaggtctggcccttgcgcttcttcaataggacatgtcactgcaacggcaatttctcaggacacaactgtgggacgtgccgtcctggctggagaggagctgcctgtgaccagagggttctcatagtcaggagaaatcttctggacttaagtaaagaagaaaagaaccactttgtccgggccctggatatggcaaagcgcacaactcaccctttatttgtcattgccaccaggagatcagaagaaatactggggccagatggcaacacgccacaatttgagaacatttccatttataactactttgtttggacacactattactcagtcaaaaagactttccttggggtaggacaggaaagctttggtgaagtggatttctctcatgagggaccagcttttctcacatggcacaggtaccacctcctgcgtctggagaaagacatgcaggaaatgttgcaagagccttctttctcccttccttactggaattttgcaacggggaaaaatgtctgtgatatctgcacggatgacttgatgggatccagaagcaactttgattccactctaataagcccaaactctgtcttttctcaatggcgagtggtctgtgactccttggaagattatgataccctgggaacactttgtaacagtaagttccaaatgatagcttggagtcagaatttctttttagataaagagattaaatatgttgcctgaaaggcccttcattctactagagaattcagactaaaatctacttttattatagagtaacagtgtaccaggcattcattaaacacctagaatgttcaaggtactctagaagttgctccaggggaaacagaaagtgcctacacatttttacactgcctttcttgagtagtttggtcaatatcttgctaactttcttattttggaaatgtctagttgtataaactaatcctcttagttttcttagcactacttagaagtcatgtgtcttgtgttggaatttcacagaaaatgtttcctaagaaaatgtgaaaaataggcaaaaagttggaaatgccctgg

SEQ ID NO: 417556 - DNA, 344 bp, Homo sapiens
cgaaacgctgggctgatcgagccgtcggcgagcccaacgtgaaactgcagtacgacgttgatcagatctgacatgattccttcctgttctgaactgtggggtgtgcacatctctgcttgagtcaggtttgagtagaggcttagagacagttgggtgagaacaaccaaaatcttatcatggtctcagtcataatcattagggggaactctagccaaatggtttaacttctgcctgtggaactggggattgggtgggcaggaaaaggtgatatccattctttctgataactagatggtgctgagaagcttttgaataaaaactttgctaaatgagaaaaaaaaaaa

SEQ ID NO: 417557 - DNA, 4182 bp, Homo sapiens
ggcacgagggtggggtcgagagcgggatccgaggctggcgggttttggcagtagctgtggctgcggctgccgggcctggggacgcgggcggccgaggccgccgtcgcagcctcctcgtctcgccggctatggctgcgctcggccggcccttcagcggcctccctctgagcggcggctcggacttcctgcagccgccgcagccggccttccccggccgggccttcccgccgggggctgacggcgccgagttggccccgcggccgggacctcgcgcagtccctagcagtcccgctgggagtgcggcgcgcggacgtgtttctgttcactgtaaaaagaaacacaagcgagaggaggaggaggatgatgattgtccagtaagaaagaaaaggataactgaagcagagctctgtgctggtcctaatgactggattctttgtgcacatcaggatgtagaggggcatggagtaaatcccagtgttagtggcctttccatacctgggatattagatgttatttgtgaagaaatggatcagacaactggagaaccacagtgtgaagttgcccgaaggaagcttcaggagattgaggacaggataattgatgaagatgaagaagttgaagctgacagaaatgttaaccatctccccagtcttgtcctttctgataccatgaaaacaggtttgaagagggaatttgatgaagtttttacaaagaaaatgattgagtctatgagccgtccttccatggagcttgttctctggaaacccctccctgaactcctttctgataagccaaagccatcctctaatactaagaactatacaggagagagccaagctaagcatgtagctgctggcactgccttccctcagagaactgaactgttttcggaacctcggccaacagggatgtctctttataatagtttggagacagctactagcacagaagaagagatggaactctagaaaccaatttctacactaaagttgtcaaatgttagaagaatcctgtgttcagttatgagactctttgcatagtatagggacttgaaagttttatgagacgggtgtaataatatctccacctgtgatttgggggtgggactcttattttgggtagccatttattgacttcacctttttgccaaggacgtttgtctcaagggaaaagcagttttctgtggggcttattaaaggaatgttggtttacattgtcttcaaagacaagtatagaagctgtatgtgtaagggtgacttaaatcatatgtcacattgtctaaactattcagacacttggagaatattctccttgaattaaaaaagatgattaagaaggatgctcctacaactgtatcctgacagttaagtcacagcttaatgtgtagatatgagctgtttacagtggtgactatatataattggggagaagaagggaagagagcagcagtagcttaagcctgttgctaagaaatttaatttcttagcaacttgtaatttagttatcaattcaatatagctctgttgattaaatagccgatagtattgtggctctcctctttgactatgaaaatatagagaaagttttttctttaaggcttttttgccttgtgccactgttgctccttggtttcccttgcgtaattgataagcccagttattcagtaatgtttacaaattaattgactttgatagttaaaagattatgaggtaacccatctgcaatttgcctgtgggagaagcatcctttagttcatcttaaggaagtgctttatcagctaaacccaacattgataactttggtaatttttttaaaaaggcctcagctccccgccgccgccgccgccgccgccgccgagccggtttcctttttccggcgctccgggtgcgagagacaggtcgggccccctaggcagcgagccgcagcgcaatcccggcgctcgcccaaggaccctggaagctaccgttaccccgccgggcagcgtgggcgccatgagcagctcgggactgaattcggagaaggtagctgctctgatacagaaactgaattccgacccccagttcgtacttgcccagaatgtcgggaccacccacgacctgctggacatctgtctgaagcgggccacggtgcagcgcgcgcagcatgtgttccagcacgccgtgccccaggagggcaagccaatcaccaaccagaagagctcagggcgatgctggatcttttcttgtctgaatgttatgaggcttccattcatgaaaaagttaaatattgaagaatttgagtttagccaatcttacctgtttttttgggacaaggttgaacgctgttatttcttcttgagtgcttttgtggacacagcccagagaaaggagcctgaggatgggaggctggtgcagtttttgcttatgaaccctgcaaatgatggtggccaatgggatatgcttgttaatattgttgaaaaatatggtgttatccctaagaaatgcttccctgaatcttatacaacagaggcaaccagaaggatgaatgatattctgaatcacaagatgagagaattctgtatacgactgcggaacctggtacacagtggagcaaccaaaggagaaatctcggccacacaggacgtcatgatggaggagatattccgagtggtgtgcatctgtttgggtaatccaccagagacattcacctgggaatatcgagacaaagataaaaattatcagaaaattggccccataacacccttggagttttacagggaacatgtcaagccactcttcaatatggaagataagatttgtttagtgaatgaccctaggccccagcacaagtacaacaaactttacacagtggaatacttaagcaatatggttggagggagaaaaactctatacaacaaccagcccattgacttcctgaaaaagatggttgctgcctccatcaaagatggagaggctgtgtggtttggctgtgatgttggaaaacacttcaatagcaagctgggcctcagtgacatgaatctctatgaccatgagttagtgtttggtgtctccttgaagaacatgaataaagcggagaggctgacttttggtgagtcacttatgacccacgccatgaccttcactgctgtctcagagaaggatgatcaggatggtgctttcacaaaatggagagtggagaattcatggggtgaagaccatggccacaaaggttacctgtgcatgacagatgagtggttctctgagtatgtctacgaagtggtggtggacaggaagcatgtccctgaagaggtgctagctgtgttagagcaggaacccattatcctgccagcatgggaccccatgggagctttggctgagtgatactgccctccagctctttcctccttccatggaacctgacgtagctgcaaaggacagatccagggactgaagccaaagttatgcaagggactgtgtgttgccacaggacacagtcagatttccagtctccaccaggaacctcttcagaaagtgtgctttatgctgaaacagaatactgttaaaggaaaaaaaagaggggggaagatcaggtcatactatctactctcctcatctctaacagctcaggatctcttagcattttaattagatgtaattgtttgtctttaactgtcaaaaagtttggttctgtgtctgtgttttaataagacgagaggacgagcgattgaggtgtatggagagaaaacagacctaatgctccttgttcctagagtagagtggagggagggtggcctaagagttgagctctcggaactgcatgctgctggacagtatcactgtctttcctagatggcagtcactgaattccattttttcaaggtaatttcttgtgcctctaatagcccaagaatgggaggttgatcagatctgacatgattccttcctgttctgaactgtggggtgtgcacatctctgcttgagtcaggtttgagtagaggcttagagacagttgggtgagaacaaccaaaatcttatcatggtctcagtcataatcattagggggaactctagccaaatggtttaacttctgcctgtggaactggggattgggtgggcaggaaaaggtgatatccattctttctgataactagatggtgctgagaagcttttgaataaaaactttgctaaatgagaaaaaaaaaaa

SEQ ID NO: 417558 - DNA, 896 bp, Homo sapiens
ctgccctccaggctcccaatggggtcccatgctggcaggataatgggttcccatgggagctttggctgagtgatactgccctccagctctttcctccttccatggaacctgacgtagctgcaaaggacagatccagggactgaagccaaagttatgcaagggactgtgtgttgccacaggacacagtcagatttccagtctccaccaggaacctcttcagaaagtgtgctttatgctgaaacagaatactgttaaaggaaaaaaaagaggggggaagatcaggtcatactatctactctcctcatctctaacagctcaggatctcttagcattttaattagatgtaattgtttgtctttaactgtcaaaaagtttggttctgtgtctgtgttttaataagacgagaggacgagcgattgaggtgtatggagagaaaacagacctaatgctccttgttcctagagtagagtggagggagggtggcctaagagttgagctctcggaactgcatgctgctggacagtatcactgtctttcctagatggcagtcactgaattccattttttcaaggtaatttcttgtgcctctaatagcccaagaatgggaggttgatcagatctgacatgattccttcctgttctgaactgtggggtgtgcacatctctgcttgagtcaggtttgagtagaggcttagagacagttgggtgagaacaaccaaaatcttatcatggtctcagtcataatcattagggggaactctagccaaatggtttaacttctgcctgtggaactggggattgggtgggcaggaaaaggtgatatccattctttctgataactagatggtgctgagaagcttttgaataaaaactttgctaaatgagaaaaaaaaaaa

SEQ ID NO: 417559 - DNA, 478 bp, Homo sapiens
ctaaggatcccgtgatccccatacagagtacgagacccccctagagtagagtggagggagggtggcctaagagttgagctctcggaactgcatgctgctggacagtatcactgtctttcctagatggcagtcactgaattccattttttcaaggtaatttcttgtgcctctaatagcccaagaatgggaggttgatcagatctgacatgattccttcctgttctgaactgtggggtgtgcacatctctgcttgagtcaggtttgagtagaggcttagagacagttgggtgagaacaaccaaaatcttatcatggtctcagtcataatcattagggggaactctagccaaatggtttaacttctgcctgtggaactggggattgggtgggcaggaaaaggtgatatccattctttctgataactagatggtgctgagaagcttttgaataaaaactttgctaaatgagaaaaaaaaaaa

SEQ ID NO: 417560 - DNA, 1045 bp, Homo sapiens
aggtagatgcacctcctaattgtgtctcttacgcgaattagaataagcaaggacctctctcacatgtattttgccaccttgtgtttctttgttacttaacaatgtggctgtagtacttagcttgtaggcagagatgatgagcttgatggaaacatgaacctagaggagagctgtgtgttgcttgacattcctggttttgtgccctaattaatgtgttcttgatcttgatagatttgtttagtgaatgaccctaggccccagcacaagtacaacaaactttacacagtggaatacttaagcaatatggttggagggagaaaaactctatacaacaaccagcccattgacttcctgaaaaagatggttgctgcctccatcaaagatggagaggctgtgtggtttggctgtgatgttggaaaacacttcaatagcaagctgggcctcagtgacatgaatctgtgagtgcaggaaatttaaaatggaaagtcatttgtgggttgttgctgttggagtgtgctgttggtacaaaatgactctgccgaggttcatccaaagatgaaggttgacctaagggcgcgtctctttctttgcatcctttagagtttgaggactcatagcagaaactccacatacttaaacactctaacccaggacatcaaaatcccactttctatctgagtggaaatcgttgggcgttcctaaaaagccatcctctatgagaaagacactttaaaaaaataattgactattgcggaaatgtgttcagtgcatttgggagtgtaatgaaagattttccagagcccccgtttgctatgttactttggtaactttgtattttgtcattgtgacaagtgggactaatttgcatgcatactttatagcattcctcctggtcatttatgacaatgaaggttaatttgtaaactaaatcatataggattccttgactgttcaccattctctattttagggttacttataaatagttgttacttgtaggaagttgagtaaatatcttgatagagaaatctgctaaaaaaaagaa

SEQ ID NO: 417561 - DNA, 2428 bp, Homo sapiens
agccccgacggcgctgactcagcaacgcgaggggggagttttgtccctccgcggaccccgtttcgcctcagctccccgccgccgccgccgccgccgccgccgagccggtttcctttttccggcgctccgggtgcgagagacaggtcgggccccctaggcagcgagccgcagcgcaatcccggcgctcgcccaaggaccctggaagctaccgttaccccgccgggcagcgtgggcgccatgagcagctcgggactgaattcggagaaggtagctgctctgatacagaaactgaattccgacccccagttcgtacttgcccagaatgtcgggaccacccacgacctgctggacatctgtctgaagcgggccacggtgcagcgcgcgcagcatgtgttccagcacgccgtgccccaggagggcaagccaatcaccaaccagaagagctcagggcgatgctggatcttttcttgtctgaatgttatgaggcttccattcatgaaaaagttaaatattgaagaatttgagtttagccaatcttacctgtttttttgggacaaggttgaacgctgttatttcttcttgagtgcttttgtggacacagcccagagaaaggagcctgaggatgggaggctggtgcagtttttgcttatgaaccctgcaaatgatggtggccaatgggatatgcttgttaatattgttgaaaaatatggtgttatccctaagaaatgcttccctgaatcttatacaacagaggcaaccagaaggatgaatgatattctgaatcacaagatgagagaattctgtatacgactgcggaacctggtacacagtggagcaaccaaaggagaaatctcggccacacaggacgtcatgatggaggagatattccgagtggtgtgcatctgtttgggtaatccaccagagacattcacctgggaatatcgagacaaagataaaaattatcagaaaattggccccataacacccttggagttttacagggaacatgtcaagccactcttcaatatggaagataagatttgtttagtgaatgaccctaggccccagcacaagtacaacaaactttacacagtggaatacttaagcaatatggttggagggagaaaaactctatacaacaaccagcccattgacttcctgaaaaagatggttgctgcctccatcaaagatggagaggctgtgtggtttggctgtgatgttggaaaacacttcaatagcaagctgggcctcagtgacatgaatctctatgaccatgagttagtgtttggtgtctccttgaagaacatgaataaagcggagaggctgacttttggtgagtcacttatgacccacgccatgaccttcactgctgtctcagagaaggatgatcaggatggtgctttcacaaaatggagagtggagaattcatggggtgaagaccatggccacaaaggttacctgtgcatgacagatgagtggttctctgagtatgtctacgaagtggtggtggacaggaagcatgtccctgaagaggtgctagctgtgttagagcaggaacccattatcctgccagcatgggaccccatgggagctttggctgagtgatactgccctccagctctttcctccttccatggaacctgacgtagctgcaaaggacagatccagggactgaagccaaagttatgcaagggactgtgtgttgccacaggacacagtcagatttccagtctccaccaggaacctcttcagaaagtgtgctttatgctgaaacagaatactgttaaaggaaaaaaaagaggggggaagatcaggtcatactatctactctcctcatctctaacagctcaggatctcttagcattttaattagatgtaattgtttgtctttaactgtcaaaaagtttggttctgtgtctgtgttttaataagacgagaggacgagcgattgaggtgtatggagagaaaacagacctaatgctccttgttcctagagtagagtggagggagggtggcctaagagttgagctctcggaactgcatgctgctggacagtatcactgtctttcctagatggcagtcactgaattccattttttcaaggtaatttcttgtgcctctaatagcccaagaatgggaggttgatcagatctgacatgattccttcctgttctgaactgtggggtgtgcacatctctgcttgagtcaggtttgagtagaggcttagagacagttgggtgagaacaaccaaaatcttatcatggtctcagtcataatcattagggggaactctagccaaatggtttaacttctgcctgtggaactggggattgggtgggcaggaaaaggtgatatccattctttctgataactagatggtgctgagaagcttttgaataaaaactttgctaaatgagaaaaaaaaaaa

SEQ ID NO: 417562 - DNA, 4133 bp, Homo sapiens
ggcacgagggtggggtcgagagcgggatccgaggctggcgggttttggcagtagctgtggctgcggctgccgggcctggggacgcgggcggccgaggccgccgtcgcagcctcctcgtctcgccggctatggctgcgctcggccggcccttcagcggcctccctctgagcggcggctcggacttcctgcagccgccgcagccggccttccccggccgggccttcccgccgggggctgacggcgccgagttggccccgcggccgggacctcgcgcagtccctagcagtcccgctgggagtgcggcgcgcggacgtgtttctgttcactgtaaaaagaaacacaagcgagaggaggaggaggatgatgattgtccagtaagaaagaaaaggataactgaagcagagctctgtgctggtcctaatgactggattctttgtgcacatcaggatgtagaggggcatggagtaaatcccagtgttagtggcctttccatacctgggatattagatgttatttgtgaagaaatggatcagacaactggagaaccacagtgtgaagttgcccgaaggaagcttcaggagattgaggacaggataattgatgaagatgaagaagttgaagctgacagaaatgttaaccatctccccagtcttgtcctttctgataccatgaaaacaggtttgaagagggaatttgatgaagtttttacaaagaaaatgattgagtctatgagccgtccttccatggagcttgttctctggaaacccctccctgaactcctttctgataagccaaagccatcctctaatactaagaactatacaggagagagccaagctaagcatgtagctgctggcactgccttccctcagagaactgaactgttttcggaacctcggccaacagggatgtctctttataatagtttggagacagctactagcacagaagaagagatggaactctagaaaccaatttctacactaaagttgtcaaatgttagaagaatcctgtgttcagttatgagactctttgcatagtatagggacttgaaagttttatgagacgggtgtaataatatctccacctgtgatttgggggtgggactcttattttgggtagccatttattgacttcacctttttgccaaggacgtttgtctcaagggaaaagcagttttctgtggggcttattaaaggaatgttggtttacattgtcttcaaagacaagtatagaagctgtatgtgtaagggtgacttaaatcatatgtcacattgtctaaactattcagacacttggagaatattctccttgaattaaaaaagatgattaagaaggatgctcctacaactgtatcctgacagttaagtcacagcttaatgtgtagatatgagctgtttacagtggtgactatatataattggggagaagaagggaagagagcagcagtagcttaagcctgttgctaagaaatttaatttcttagcaacttgtaatttagttatcaattcaatatagctctgttgattaaatagccgatagtattgtggctctcctctttgactatgaaaatatagagaaagttttttctttaaggcttttttgccttgtgccactgttgctccttggtttcccttgcgtaattgataagcccagttattcagtaatgtttacaaattaattgactttgatagttaaaagattatgaggtaacccatctgcaatttgcctgtgggagaagcatcctttagttcatcttaaggaagtgctttatcagctaaacccaacattgataactttggtaatttttttaaaaaggcctcagctccccgccgccgccgccgccgccgccgccgagccggtttcctttttccggcgctccgggtgcgagagacaggtcgggccccctaggcagcgagccgcagcgcaatcccggcgctcgcccaaggaccctggaagctaccgttaccccgccgggcagcgtgggcgccatgagcagctcgggactgaattcggagaaggtagctgctctgatacagaaactgaattccgacccccagttcgtacttgcccagaatgtcgggaccacccacgacctgctggacatctgtctgaagcgggccacggtgcagcgcgcgcagcatgtgttccagcacgccgtgccccaggagggcaagccaatcaccaaccagaagagctcagggcgatgctggatcttttcttgtctgaatgttatgaggcttccattcatgaaaaagttaaagttgaacgctgttatttcttcttgagtgcttttgtggacacagcccagagaaaggagcctgaggatgggaggctggtgcagtttttgcttatgaaccctgcaaatgatggtggccaatgggatatgcttgttaatattgttgaaaaatatggtgttatccctaagaaatgcttccctgaatcttatacaacagaggcaaccagaaggatgaatgatattctgaatcacaagatgagagaattctgtatacgactgcggaacctggtacacagtggagcaaccaaaggagaaatctcggccacacaggacgtcatgatggaggagatattccgagtggtgtgcatctgtttgggtaatccaccagagacattcacctgggaatatcgagacaaagataaaaattatcagaaaattggccccataacacccttggagttttacagggaacatgtcaagccactcttcaatatggaagataagatttgtttagtgaatgaccctaggccccagcacaagtacaacaaactttacacagtggaatacttaagcaatatggttggagggagaaaaactctatacaacaaccagcccattgacttcctgaaaaagatggttgctgcctccatcaaagatggagaggctgtgtggtttggctgtgatgttggaaaacacttcaatagcaagctgggcctcagtgacatgaatctctatgaccatgagttagtgtttggtgtctccttgaagaacatgaataaagcggagaggctgacttttggtgagtcacttatgacccacgccatgaccttcactgctgtctcagagaaggatgatcaggatggtgctttcacaaaatggagagtggagaattcatggggtgaagaccatggccacaaaggttacctgtgcatgacagatgagtggttctctgagtatgtctacgaagtggtggtggacaggaagcatgtccctgaagaggtgctagctgtgttagagcaggaacccattatcctgccagcatgggaccccatgggagctttggctgagtgatactgccctccagctctttcctccttccatggaacctgacgtagctgcaaaggacagatccagggactgaagccaaagttatgcaagggactgtgtgttgccacaggacacagtcagatttccagtctccaccaggaacctcttcagaaagtgtgctttatgctgaaacagaatactgttaaaggaaaaaaaagaggggggaagatcaggtcatactatctactctcctcatctctaacagctcaggatctcttagcattttaattagatgtaattgtttgtctttaactgtcaaaaagtttggttctgtgtctgtgttttaataagacgagaggacgagcgattgaggtgtatggagagaaaacagacctaatgctccttgttcctagagtagagtggagggagggtggcctaagagttgagctctcggaactgcatgctgctggacagtatcactgtctttcctagatggcagtcactgaattccattttttcaaggtaatttcttgtgcctctaatagcccaagaatgggaggttgatcagatctgacatgattccttcctgttctgaactgtggggtgtgcacatctctgcttgagtcaggtttgagtagaggcttagagacagttgggtgagaacaaccaaaatcttatcatggtctcagtcataatcattagggggaactctagccaaatggtttaacttctgcctgtggaactggggattgggtgggcaggaaaaggtgatatccattctttctgataactagatggtgctgagaagcttttgaataaaaactttgctaaatgagaaaaaaaaaaa

SEQ ID NO: 417563 - DNA, 3683 bp, Homo sapiens
ggcacgagggtggggtcgagagcgggatccgaggctggcgggttttggcagtagctgtggctgcggctgccgggcctggggacgcgggcggccgaggccgccgtcgcagcctcctcgtctcgccggctatggctgcgctcggccggcccttcagcggcctccctctgagcggcggctcggacttcctgcagccgccgcagccggccttccccggccgggccttcccgccgggggctgacggcgccgagttggccccgcggccgggacctcgcgcagtccctagcagtcccgctgggagtgcggcgcgcggacgtgtttctgttcactgtaaaaagaaacacaagcgagaggaggaggaggatgatgattgtccagtaagaaagaaaaggataactgaagcagagctctgtgctggtcctaatgactggattctttgtgcacatcaggatgtagaggggcatggagtaaatcccagtgttagtggcctttccatacctgggatattagatgttatttgtgaagaaatggatcagacaactggagaaccacagtgtgaagttgcccgaaggaagcttcaggagattgaggacaggataattgatgaagatgaagaagttgaagctgacagaaatgttaaccatctccccagtcttgtcctttctgataccatgaaaacaggtttgaagagggaatttgatgaagtttttacaaagaaaatgattgagtctatgagccgtccttccatggagcttgttctctggaaacccctccctgaactcctttctgataagccaaagccatcctctaatactaagaactatacaggagagagccaagctaagcatgtagctgctggcactgccttccctcagagaactgaactgttttcggaacctcggccaacagggatgtctctttataatagtttggagacagctactagcacagaagaagagatggaactctagaaaccaatttctacactaaagttgtcaaatgttagaagaatcctgtgttcagttatgagactctttgcatagtatagggacttgaaagttttatgagacgggtgtaataatatctccacctgtgatttgggggtgggactcttattttgggtagccatttattgacttcacctttttgccaaggacgtttgtctcaagggaaaagcagttttctgtggggcttattaaaggaatgttggtttacattgtcttcaaagacaagtatagaagctgtatgtgtaagggtgacttaaatcatatgtcacattgtctaaactattcagacacttggagaatattctccttgaattaaaaaagatgattaagaaggatgctcctacaactgtatcctgacagttaagtcacagcttaatgtgtagatatgagctgtttacagtggtgactatatataattggggagaagaagggaagagagcagcagtagcttaagcctgttgctaagaaatttaatttcttagcaacttgtaatttagttatcaattcaatatagctctgttgattaaatagccgatagtattgtggctctcctctttgactatgaaaatatagagaaagttttttctttaaggcttttttgccttgtgccactgttgctccttggtttcccttgcgtaattgataagcccagttattcagtaatgtttacaaattaattgactttgatagttaaaagattatgaggtaacccatctgcaatttgcctgtgggagaagcatcctttagttcatcttaaggaagtgctttatcagctaaacccaacattgataactttggtaatttttttaaaaaggcctcagctccccgccgccgccgccgccgccgccgccgagccggtttcctttttccggcgctccgggtgcgagagacaggtcgggccccctaggcagcgagccgcagcgcaatcccggcgctcgcccaaggaccctggaagctaccgttaccccgccgggcagcgtgggcgccatgagcagctcggagaggcaaccagaaggatgaatgatattctgaatcacaagatgagagaattctgtatacgactgcggaacctggtacacagtggagcaaccaaaggagaaatctcggccacacaggacgtcatgatggaggagatattccgagtggtgtgcatctgtttgggtaatccaccagagacattcacctgggaatatcgagacaaagataaaaattatcagaaaattggccccataacacccttggagttttacagggaacatgtcaagccactcttcaatatggaagataagatttgtttagtgaatgaccctaggccccagcacaagtacaacaaactttacacagtggaatacttaagcaatatggttggagggagaaaaactctatacaacaaccagcccattgacttcctgaaaaagatggttgctgcctccatcaaagatggagaggctgtgtggtttggctgtgatgttggaaaacacttcaatagcaagctgggcctcagtgacatgaatctctatgaccatgagttagtgtttggtgtctccttgaagaacatgaataaagcggagaggctgacttttggtgagtcacttatgacccacgccatgaccttcactgctgtctcagagaaggatgatcaggatggtgctttcacaaaatggagagtggagaattcatggggtgaagaccatggccacaaaggttacctgtgcatgacagatgagtggttctctgagtatgtctacgaagtggtggtggacaggaagcatgtccctgaagaggtgctagctgtgttagagcaggaacccattatcctgccagcatgggaccccatgggagctttggctgagtgatactgccctccagctctttcctccttccatggaacctgacgtagctgcaaaggacagatccagggactgaagccaaagttatgcaagggactgtgtgttgccacaggacacagtcagatttccagtctccaccaggaacctcttcagaaagtgtgctttatgctgaaacagaatactgttaaaggaaaaaaaagaggggggaagatcaggtcatactatctactctcctcatctctaacagctcaggatctcttagcattttaattagatgtaattgtttgtctttaactgtcaaaaagtttggttctgtgtctgtgttttaataagacgagaggacgagcgattgaggtgtatggagagaaaacagacctaatgctccttgttcctagagtagagtggagggagggtggcctaagagttgagctctcggaactgcatgctgctggacagtatcactgtctttcctagatggcagtcactgaattccattttttcaaggtaatttcttgtgcctctaatagcccaagaatgggaggttgatcagatctgacatgattccttcctgttctgaactgtggggtgtgcacatctctgcttgagtcaggtttgagtagaggcttagagacagttgggtgagaacaaccaaaatcttatcatggtctcagtcataatcattagggggaactctagccaaatggtttaacttctgcctgtggaactggggattgggtgggcaggaaaaggtgatatccattctttctgataactagatggtgctgagaagcttttgaataaaaactttgctaaatgagaaaaaaaaaaa

SEQ ID NO: 417564 - DNA, 1919 bp, Homo sapiens
cgcctacacttcctaccctacaaccttccttactctactctaggaacaaggaagatcaggtcatactatctactctcctcatctctaacagctcaggatctcttagcattttaattagatgtaattgttgtcttaactgtcaaaaagtttggttctgtgtctgccaatgggatatgcttgttaatatgttgaaaaatatggtgttatccctaagaaatgcttccctgaatcttatacaacagaggcaaccagaaggatgaatgatattctgaatcacaagatgagagaattctgtatacgactgcggaacctggtacacagtggagcaaccaaaggagaaatctcggccacacaggacgtcatgatggaggagatattccgagtggtgtgcatctgtttgggtaatccaccagagacattcacctgggaatatcgagacaaagataaaaattatcagaaaattggccccataacacccttggagttttacagggaacatgtcaagccactcttcaatatggaagataagatttgtttagtgaatgaccctaggccccagcacaagtacaacaaactttacacagtggaatacttaagcaatatggttggagggagaaaaactctatacaacaaccagcccattgacttcctgaaaaagatggttgctgcctccatcaaagatggagaggctgtgtggtttggctgtgatgttggaaaacacttcaatagcaagctgggcctcagtgacatgaatctctatgaccatgagttagtgtttggtgtctccttgaagaacatgaataaagcggagaggctgacttttggtgagtcacttatgacccacgccatgaccttcactgctgtctcagagaaggatgatcaggatggtgctttcacaaaatggagagtggagaattcatggggtgaagaccatggccacaaaggttacctgtgcatgacagatgagtggttctctgagtatgtctacgaagtggtggtggacaggaagcatgtccctgaagaggtgctagctgtgttagagcaggaacccattatcctgccagcatgggaccccatgggagctttggctgagtgatactgccctccagctctttcctccttccatggaacctgacgtagctgcaaaggacagatccagggactgaagccaaagttatgcaagggactgtgtgttgccacaggacacagtcagatttccagtctccaccaggaacctcttcagaaagtgtgctttatgctgaaacagaatactgttaaaggaaaaaaaagaggggggaagatcaggtcatactatctactctcctcatctctaacagctcaggatctcttagcattttaattagatgtaattgtttgtctttaactgtcaaaaagtttggttctgtgtctgtgttttaataagacgagaggacgagcgattgaggtgtatggagagaaaacagacctaatgctccttgttcctagagtagagtggagggagggtggcctaagagttgagctctcggaactgcatgctgctggacagtatcactgtctttcctagatggcagtcactgaattccattttttcaaggtaatttcttgtgcctctaatagcccaagaatgggaggttgatcagatctgacatgattccttcctgttctgaactgtggggtgtgcacatctctgcttgagtcaggtttgagtagaggcttagagacagttgggtgagaacaaccaaaatcttatcatggtctcagtcataatcattagggggaactctagccaaatggtttaacttctgcctgtggaactggggattgggtgggcaggaaaaggtgatatccattctttctgataactagatggtgctgagaagcttttgaataaaaactttgctaaatgagaaaaaaaaaaa

SEQ ID NO: 417565 - DNA, 1621 bp, Homo sapiens
aggtagatgcacctcctaattgtgtctcttacgcgaattagaataagcaaggacctctctcacatgtattttgccaccttgtgtttctttgttacttaacaatgtggctgtagtacttagcttgtaggcagagatgatgagcttgatggaaacatgaacctagaggagagctgtgtgttgcttgacattcctggttttgtgccctaattaatgtgttcttgatcttgatagatttgtttagtgaatgaccctaggccccagcacaagtacaacaaactttacacagtggaatacttaagcaatatggttggagggagaaaaactctatacaacaaccagcccattgacttcctgaaaaagatggttgctgcctccatcaaagatggagaggctgtgtggtttggctgtgatgttggaaaacacttcaatagcaagctgggcctcagtgacatgaatctctatgaccatgagttagtgtttggtgtctccttgaagaacatgaataaagcggagaggctgacttttggtgagtcacttatgacccacgccatgaccttcactgctgtctcagagaaggatgatcaggatggtgctttcacaaaatggagagtggagaattcatggggtgaagaccatggccacaaaggttacctgtgcatgacagatgagtggttctctgagtatgtctacgaagtggtggtggacaggaagcatgtccctgaagaggtgctagctgtgttagagcaggaacccattatcctgccagcatgggaccccatgggagctttggctgagtgatactgccctccagctctttcctccttccatggaacctgacgtagctgcaaaggacagatccagggactgaagccaaagttatgcaagggactgtgtgttgccacaggacacagtcagatttccagtctccaccaggaacctcttcagaaagtgtgctttatgctgaaacagaatactgttaaaggaaaaaaaagaggggggaagatcaggtcatactatctactctcctcatctctaacagctcaggatctcttagcattttaattagatgtaattgtttgtctttaactgtcaaaaagtttggttctgtgtctgtgttttaataagacgagaggacgagcgattgaggtgtatggagagaaaacagacctaatgctccttgttcctagagtagagtggagggagggtggcctaagagttgagctctcggaactgcatgctgctggacagtatcactgtctttcctagatggcagtcactgaattccattttttcaaggtaatttcttgtgcctctaatagcccaagaatgggaggttgatcagatctgacatgattccttcctgttctgaactgtggggtgtgcacatctctgcttgagtcaggtttgagtagaggcttagagacagttgggtgagaacaaccaaaatcttatcatggtctcagtcataatcattagggggaactctagccaaatggtttaacttctgcctgtggaactggggattgggtgggcaggaaaaggtgatatccattctttctgataactagatggtgctgagaagcttttgaataaaaactttgctaaatgagaaaaaaaaaaa

SEQ ID NO: 417566 - DNA, 3222 bp, Homo sapiens
ggcacgagggtggggtcgagagcgggatccgaggctggcgggttttggcagtagctgtggctgcggctgccgggcctggggacgcgggcggccgaggccgccgtcgcagcctcctcgtctcgccggctatggctgcgctcggccggcccttcagcggcctccctctgagcggcggctcggacttcctgcagccgccgcagccggccttccccggccgggccttcccgccgggggctgacggcgccgagttggccccgcggccgggacctcgcgcagtccctagcagtcccgctgggagtgcggcgcgcggacgtgtttctgttcactgtaaaaagaaacacaagcgagaggaggaggaggatgatgattgtccagtaagaaagaaaaggataactgaagcagagctctgtgctggtcctaatgactggattctttgtgcacatcaggatgtagaggggcatggagtaaatcccagtgttagtggcctttccatacctgggatattagatgttatttgtgaagaaatggatcagacaactggagaaccacagtgtgaagttgcccgaaggaagcttcaggagattgaggacaggataattgatgaagatgaagaagttgaagctgacagaaatgttaaccatctccccagtcttgtcctttctgataccatgaaaacaggtttgaagagggaatttgatgaagtttttacaaagaaaatgattgagtctatgagccgtccttccatggagcttgttctctggaaacccctccctgaactcctttctgataagccaaagccatcctctaatactaagaactatacaggagagagccaagctaagcatgtagctgctggcactgccttccctcagagaactgaactgttttcggaacctcggccaacagggatgtctctttataatagtttggagacagctactagcacagaagaagagatggaactctagaaaccaatttctacactaaagttgtcaaatgttagaagaatcctgtgttcagttatgagactctttgcatagtatagggacttgaaagttttatgagacgggtgtaataatatctccacctgtgatttgggggtgggactcttattttgggtagccatttattgacttcacctttttgccaaggacgtttgtctcaagggaaaagcagttttctgtggggcttattaaaggaatgttggtttacattgtcttcaaagacaagtatagaagctgtatgtgtaagggtgacttaaatcatatgtcacattgtctaaactattcagacacttggagaatattctccttgaattaaaaaagatgattaagaaggatgctcctacaactgtatcctgacagttaagtcacagcttaatgtgtagatatgagctgtttacagtggtgactatatataattggggagaagaagggaagagagcagcagtagcttaagcctgttgctaagaaatttaatttcttagcaacttgtaatttagttatcaattcaatatagctctgttgattaaatagccgatagtattgtggctctcctctttgactatgaaaatatagagaaagttttttctttaaggcttttttgccttgtgccactgttgctccttggtttcccttgcgtaattgataagcccagttattcagtaatgtttacaaattaattgactttgatagttaaaagattatgaggtaacccatctgcaatttgcctgtgggagaagcatcctttagttcatcttaaggaagtgctttatcagctaaacccaacattgataactttggtaatttttttaaaaaggcctcagctccccgccgccgccgccgccgccgccgccgagccggtttcctttttccggcgctccgggtgcgagagacaggtcgggccccctaggcagcgagccgcagcgcaatcccggcgctcgcccaaggaccctggaagctaccgttaccccgccgggcagcgtgggcgccatgagcagctcgggactgaattcggagaaggtagctgctctgatacagaaactgaattccgacccccagttcgtacttgcccagaatgtcgggaccacccacgacctgctggacatctgtctgaagcgggccacggtgcagcgcgcgcagcatgtgttccagcacgccgtgccccaggagggcaagccaatcaccaaccagaagagctcagggcgatgctggatcttttcttgtctgaatgttatgaggcttccattcatgaaaaagttaaatattgaagaatttgagtttagccaatcttacctgtttttttgggacaaggttgaacgctgttatttcttcttgagtgcttttgtggacacagcccagagaaaggagcctgaggatgggaggctggtgcagtttttgcttatgaaccctgcaaatgatggtggccaatgggatatgcttgttaatattgttgaaaaatatggtgttatccctaagaaatgcttccctgaatcttatacaacagaggcaaccagaaggatgaatgatattctgaatcacaagatgagagaattctgtatacgactgcggaacctggtacacagtggagcaaccaaaggagaaatctcggccacacaggacgtcatgatggaggagatattccgagtggtgtgcatctgtttgggtaatccaccagagacattcacctgggaatatcgagacaaagataaaaattatcagaaaattggccccataacacccttggagttttacagggaacatgtcaagccactcttcaatatggaagataaggttggtgaatggcactggtagtcactggctgtttactttcaaatggctgttaaccacagggaattgtataagattcttggttagcatgtatgagtatcaaactagacagcaaacaaacatttttccccacttcctctgaagtattttatgcagctaatgaagttggtggtgccaggatttatcagcttttccacaatgttcctcttcagagactttttaaactgtaagccagcagtcattttaattcccacatgcgcccctgtataggaccagaatcattctcaagtgcaaaacaatgaaagtgtgttgggtatttcttatcgtggattcagagcacttttgcactgaggtcccctcggggaactctcctgttgaagggagtaatcttagtttttcctgttccctttaggtcttcctcatctgcctagta

SEQ ID NO: 417567 - DNA, 768 bp, Homo sapiens
gctcggtaccccttatgttctgacccaccaagggactgtgtgttgccacaggacacagtcagatttccagtctccaccaggaacctcttcagaaagtgtgctttatgctgaaacagaatactgttaaaggaaaaaaaagaggggggaagatcaggtcatactatctactctcctcatctctaacagctcaggatctcttagcattttaattagatgtaattgtttgtctttaactgtcaaaaagtttggttctgtgtctgtgttttaataagacgagaggacgagcgattgaggtgtatggagagaaaacagacctaatgctccttgttcctagagtagagtggagggagggtggcctaagagttgagctctcggaactgcatgctgctggacagtatcactgtctttcctagatggcagtcactgaattccattttttcaaggtaatttcttgtgcctctaatagcccaagaatgggaggttgatcagatctgacatgattccttcctgttctgaactgtggggtgtgcacatctctgcttgagtcaggtttgagtagaggcttagagacagttgggtgagaacaaccaaaatcttatcatggtctcagtcataatcattagggggaactctagccaaatggtttaacttctgcctgtggaactggggattgggtgggcaggaaaaggtgatatccattctttctgataactagatggtgctgagaagcttttgaataaaaactttgctaaatgagaaaaaaaaaaa

SEQ ID NO: 417568 - DNA, 820 bp, Homo sapiens
gggggccccgagggatccaggtcctgtggcaactgacgtagctgcaaaggacagatccagggactgaagccaaagttatgcaagggactgtgtgttgccacaggacacagtcagatttccagtctccaccaggaacctcttcagaaagtgtgctttatgctgaaacagaatactgttaaaggaaaaaaaagaggggggaagatcaggtcatactatctactctcctcatctctaacagctcaggatctcttagcattttaattagatgtaattgtttgtctttaactgtcaaaaagtttggttctgtgtctgtgttttaataagacgagaggacgagcgattgaggtgtatggagagaaaacagacctaatgctccttgttcctagagtagagtggagggagggtggcctaagagttgagctctcggaactgcatgctgctggacagtatcactgtctttcctagatggcagtcactgaattccattttttcaaggtaatttcttgtgcctctaatagcccaagaatgggaggttgatcagatctgacatgattccttcctgttctgaactgtggggtgtgcacatctctgcttgagtcaggtttgagtagaggcttagagacagttgggtgagaacaaccaaaatcttatcatggtctcagtcataatcattagggggaactctagccaaatggtttaacttctgcctgtggaactggggattgggtgggcaggaaaaggtgatatccattctttctgataactagatggtgctgagaagcttttgaataaaaactttgctaaatgagaaaaaaaaaaa

SEQ ID NO: 417569 - DNA, 976 bp, Homo sapiens
  misc_feature (286)..(286): n is a, c, g, or t
  misc_feature (319)..(319): n is a, c, g, or t
aactctgtcttccagggtaaaaataataaggttgaatcattttattaaaaatactttttaagaaaataactatgaacatctgaatattaaagatataaaaatgcacataattcatatttcaggtggtatttgcattcagtgccttactggtattctcagaacattttaatgatttctaacatttcttaacagtcatagatatatacattttcattttttgtacttgaatattctaaataaaactgacatttactcttgacaaataaaacatatatttactaaaaanaaaaaaaaaaaacctcgtgccgaattcgggagnctaggaatactgttaaaggaaaaaaaagaggggggaagatcaggtcatactatctactctcctcatctctaacagctcaggatctcttagcattttaattagatgtaattgtttgtctttaactgtcaaaaagtttggttctgtgtctgtgttttaataagacgagaggacgagcgattgaggtgtatggagagaaaacagacctaatgctccttgttcctagagtagagtggagggagggtggcctaagagttgagctctcggaactgcatgctgctggacagtatcactgtctttcctagatggcagtcactgaattccattttttcaaggtaatttcttgtgcctctaatagcccaagaatgggaggttgatcagatctgacatgattccttcctgttctgaactgtggggtgtgcacatctctgcttgagtcaggtttgagtagaggcttagagacagttgggtgagaacaaccaaaatcttatcatggtctcagtcataatcattagggggaactctagccaaatggtttaacttctgcctgtggaactggggattgggtgggcaggaaaaggtgatatccattctttctgataactagatggtgctgagaagcttttgaataaaaactttgctaaatgagaaaaaaaaaaa

SEQ ID NO: 417570 - DNA, 2728 bp, Homo sapiens
ggcacgagggtggggtcgagagcgggatccgaggctggcgggttttggcagtagctgtggctgcggctgccgggcctggggacgcgggcggccgaggccgccgtcgcagcctcctcgtctcgccggctatggctgcgctcggccggcccttcagcggcctccctctgagcggcggctcggacttcctgcagccgccgcagccggccttccccggccgggccttcccgccgggggctgacggcgccgagttggccccgcggccgggacctcgcgcagtccctagcagtcccgctgggagtgcggcgcgcggacgtgtttctgttcactgtaaaaagaaacacaagcgagaggaggaggaggatgatgattgtccagtaagaaagaaaaggataactgaagcagagctctgtgctggtcctaatgactggattctttgtgcacatcaggatgtagaggggcatggagtaaatcccagtgttagtggcctttccatacctgggatattagatgttatttgtgaagaaatggatcagacaactggagaaccacagtgtgaagttgcccgaaggaagcttcaggagattgaggacaggataattgatgaagatgaagaagttgaagctgacagaaatgttaaccatctccccagtcttgtcctttctgataccatgaaaacaggtttgaagagggaatttgatgaagtttttacaaagaaaatgattgagtctatgagccgtccttccatggagcttgttctctggaaacccctccctgaactcctttctgataagccaaagccatcctctaatactaagaactatacaggagagagccaagctaagcatgtagctgctggcactgccttccctcagagaactgaactgttttcggaacctcggccaacagggatgtctctttataatagtttggagacagctactagcacagaagaagagatggaactctagaaaccaatttctacactaaagttgtcaaatgttagaagaatcctgtgttcagttatgagactctttgcatagtatagggacttgaaagttttatgagacgggtgtaataatatctccacctgtgatttgggggtgggactcttattttgggtagccatttattgacttcacctttttgccaaggacgtttgtctcaagggaaaagcagttttctgtggggcttattaaaggaatgttggtttacattgtcttcaaagacaagtatagaagctgtatgtgtaagggtgacttaaatcatatgtcacattgtctaaactattcagacacttggagaatattctccttgaattaaaaaagatgattaagaaggatgctcctacaactgtatcctgacagttaagtcacagcttaatgtgtagatatgagctgtttacagtggtgactatatataattggggagaagaagggaagagagcagcagtagcttaagcctgttgctaagaaatttaatttcttagcaacttgtaatttagttatcaattcaatatagctctgttgattaaatagccgatagtattgtggctctcctctttgactatgaaaatatagagaaagttttttctttaaggcttttttgccttgtgccactgttgctccttggtttcccttgcgtaattgataagcccagttattcagtaatgtttacaaattaattgactttgatagttaaaagattatgaggtaacccatctgcaatttgcctgtgggagaagcatcctttagttcatcttaaggaagtgctttatcagctaaacccaacattgataactttggtaatttttttaaaaaggcctcagctccccgccgccgccgccgccgccgccgccgagccggtttcctttttccggcgctccgggtgcgagagacaggtcgggccccctaggcagcgagccgcagcgcaatcccggcgctcgcccaaggaccctggaagctaccgttaccccgccgggcagcgtgggcgccatgagcagctcgggactgaattcggagaaggtagctgctctgatacagaaactgaattccgacccccagttcgtacttgcccagaatgtcgggaccacccacgacctgctggacatctgtctgaagcgggccacggtgcagcgcgcgcagcatgtgttccagcacgccgtgccccaggagggcaagccaatcaccaaccagaagagctcagggcgatgctggatcttttcttgtctgaatgttatgaggcttccattcatgaaaaagttaaatattgaagaatttgagtttagccaatcttacctgtttttttgggacaaggttgaacgctgttatttcttcttgagtgcttttgtggacacagcccagagaaaggagcctgaggatgggaggctggtgcagtttttgcttatgaaccctgcaaatgatggtggccaatgggatatgcttgttaatattgttgaaaaatatggtgttatccctaagaaatgcttccctgaatcttatacaacagaggcaaccagaaggatgaatgatattctgaatcacaagatgaggagaattctgttacgactgcggactgctccctgggggccaccgacggggaactcggccccggcgtctgggcgcggaatcggtgggtgcctgttggtatccccggcttccctggggtccgccgtttttcgaaggcctaacctgggttcggctggcctatggaatttttgtgcccccctctg

SEQ ID NO: 417571 - DNA, 1904 bp, Homo sapiens
ggctaggtacgaggccggggttaatcggccgagggttgaacgctgttatttcttcttgagtgcttttgtggacacagcccagagaaaggagcctgaggatgggaggctggtgcagtttttgcttatgaaccctgcaaatgatggtggccaatgggatatgcttgttaatattgttgaaaaatatggtgttatccctaagaaatgcttccctgaatcttatacaacagaggcaaccagaaggatgaatgatattctgaatcacaagatgagagaattctgtatacgactgcggaacctggtacacagtggagcaaccaaaggagaaatctcggccacacaggacgtcatgatggaggagatattccgagtggtgtgcatctgtttgggtaatccaccagagacattcacctgggaatatcgagacaaagataaaaattatcagaaaattggccccataacacccttggagttttacagggaacatgtcaagccactcttcaatatggaagataagatttgtttagtgaatgaccctaggccccagcacaagtacaacaaactttacacagtggaatacttaagcaatatggttggagggagaaaaactctatacaacaaccagcccattgacttcctgaaaaagatggttgctgcctccatcaaagatggagaggctgtgtggtttggctgtgatgttggaaaacacttcaatagcaagctgggcctcagtgacatgaatctctatgaccatgagttagtgtttggtgtctccttgaagaacatgaataaagcggagaggctgacttttggtgagtcacttatgacccacgccatgaccttcactgctgtctcagagaaggatgatcaggatggtgctttcacaaaatggagagtggagaattcatggggtgaagaccatggccacaaaggttacctgtgcatgacagatgagtggttctctgagtatgtctacgaagtggtggtggacaggaagcatgtccctgaagaggtgctagctgtgttagagcaggaacccattatcctgccagcatgggaccccatgggagctttggctgagtgatactgccctccagctctttcctccttccatggaacctgacgtagctgcaaaggacagatccagggactgaagccaaagttatgcaagggactgtgtgttgccacaggacacagtcagatttccagtctccaccaggaacctcttcagaaagtgtgctttatgctgaaacagaatactgttaaaggaaaaaaaagaggggggaagatcaggtcatactatctactctcctcatctctaacagctcaggatctcttagcattttaattagatgtaattgtttgtctttaactgtcaaaaagtttggttctgtgtctgtgttttaataagacgagaggacgagcgattgaggtgtatggagagaaaacagacctaatgctccttgttcctagagtagagtggagggagggtggcctaagagttgagctctcggaactgcatgctgctggacagtatcactgtctttcctagatggcagtcactgaattccattttttcaaggtaatttcttgtgcctctaatagcccaagaatgggaggttgatcagatctgacatgattccttcctgttctgaactgtggggtgtgcacatctctgcttgagtcaggtttgagtagaggcttagagacagttgggtgagaacaaccaaaatcttatcatggtctcagtcataatcattagggggaactctagccaaatggtttaacttctgcctgtggaactggggattgggtgggcaggaaaaggtgatatccattctttctgataactagatggtgctgagaagcttttgaataaaaactttgctaaatgagaaaaaaaaaaa

SEQ ID NO: 417572 - DNA, 1843 bp, Homo sapiens
tgtaggacagcaatgaaatgcatacagctttttcttccctcgctcaaaaaaaagtttaaacacacaaacttacaatctcatcagcacacactctcttgtgacaaatgattcagacaaaaatatggtgttatccctaagaaatgcttccctgaatcttatacaacagaggcaaccagaaggatgaatgatattctgaatcacaagatgagagaattctgtatacgactgcggaacctggtacacagtggagcaaccaaaggagaaatctcggccacacaggacgtcatgatggaggagatattccgagtggtgtgcatctgtttgggtaatccaccagagacattcacctgggaatatcgagacaaagataaaaattatcagaaaattggccccataacacccttggagttttacagggaacatgtcaagccactcttcaatatggaagataagatttgtttagtgaatgaccctaggccccagcacaagtacaacaaactttacacagtggaatacttaagcaatatggttggagggagaaaaactctatacaacaaccagcccattgacttcctgaaaaagatggttgctgcctccatcaaagatggagaggctgtgtggtttggctgtgatgttggaaaacacttcaatagcaagctgggcctcagtgacatgaatctctatgaccatgagttagtgtttggtgtctccttgaagaacatgaataaagcggagaggctgacttttggtgagtcacttatgacccacgccatgaccttcactgctgtctcagagaaggatgatcaggatggtgctttcacaaaatggagagtggagaattcatggggtgaagaccatggccacaaaggttacctgtgcatgacagatgagtggttctctgagtatgtctacgaagtggtggtggacaggaagcatgtccctgaagaggtgctagctgtgttagagcaggaacccattatcctgccagcatgggaccccatgggagctttggctgagtgatactgccctccagctctttcctccttccatggaacctgacgtagctgcaaaggacagatccagggactgaagccaaagttatgcaagggactgtgtgttgccacaggacacagtcagatttccagtctccaccaggaacctcttcagaaagtgtgctttatgctgaaacagaatactgttaaaggaaaaaaaagaggggggaagatcaggtcatactatctactctcctcatctctaacagctcaggatctcttagcattttaattagatgtaattgtttgtctttaactgtcaaaaagtttggttctgtgtctgtgttttaataagacgagaggacgagcgattgaggtgtatggagagaaaacagacctaatgctccttgttcctagagtagagtggagggagggtggcctaagagttgagctctcggaactgcatgctgctggacagtatcactgtctttcctagatggcagtcactgaattccattttttcaaggtaatttcttgtgcctctaatagcccaagaatgggaggttgatcagatctgacatgattccttcctgttctgaactgtggggtgtgcacatctctgcttgagtcaggtttgagtagaggcttagagacagttgggtgagaacaaccaaaatcttatcatggtctcagtcataatcattagggggaactctagccaaatggtttaacttctgcctgtggaactggggattgggtgggcaggaaaaggtgatatccattctttctgataactagatggtgctgagaagcttttgaataaaaactttgctaaatgagaaaaaaaaaaa

SEQ ID NO: 417573 - DNA, 3606 bp, Homo sapiens
ggcacgagggtggggtcgagagcgggatccgaggctggcgggttttggcagtagctgtggctgcggctgccgggcctggggacgcgggcggccgaggccgccgtcgcagcctcctcgtctcgccggctatggctgcgctcggccggcccttcagcggcctccctctgagcggcggctcggacttcctgcagccgccgcagccggccttccccggccgggccttcccgccgggggctgacggcgccgagttggccccgcggccgggacctcgcgcagtccctagcagtcccgctgggagtgcggcgcgcggacgtgtttctgttcactgtaaaaagaaacacaagcgagaggaggaggaggatgatgattgtccagtaagaaagaaaaggataactgaagcagagctctgtgctggtcctaatgactggattctttgtgcacatcaggatgtagaggggcatggagtaaatcccagtgttagtggcctttccatacctgggatattagatgttatttgtgaagaaatggatcagacaactggagaaccacagtgtgaagttgcccgaaggaagcttcaggagattgaggacaggataattgatgaagatgaagaagttgaagctgacagaaatgttaaccatctccccagtcttgtcctttctgataccatgaaaacaggtttgaagagggaatttgatgaagtttttacaaagaaaatgattgagtctatgagccgtccttccatggagcttgttctctggaaacccctccctgaactcctttctgataagccaaagccatcctctaatactaagaactatacaggagagagccaagctaagcatgtagctgctggcactgccttccctcagagaactgaactgttttcggaacctcggccaacagggatgtctctttataatagtttggagacagctactagcacagaagaagagatggaactctagaaaccaatttctacactaaagttgtcaaatgttagaagaatcctgtgttcagttatgagactctttgcatagtatagggacttgaaagttttatgagacgggtgtaataatatctccacctgtgatttgggggtgggactcttattttgggtagccatttattgacttcacctttttgccaaggacgtttgtctcaagggaaaagcagttttctgtggggcttattaaaggaatgttggtttacattgtcttcaaagacaagtatagaagctgtatgtgtaagggtgacttaaatcatatgtcacattgtctaaactattcagacacttggagaatattctccttgaattaaaaaagatgattaagaaggatgctcctacaactgtatcctgacagttaagtcacagcttaatgtgtagatatgagctgtttacagtggtgactatatataattggggagaagaagggaagagagcagcagtagcttaagcctgttgctaagaaatttaatttcttagcaacttgtaatttagttatcaattcaatatagctctgttgattaaatagccgatagtattgtggctctcctctttgactatgaaaatatagagaaagttttttctttaaggcttttttgccttgtgccactgttgctccttggtttcccttgcgtaattgataagcccagttattcagtaatgtttacaaattaattgactttgatagttaaaagattatgaggtaacccatctgcaatttgcctgtgggagaagcatcctttagttcatcttaaggaagtgctttatcagctaaacccaacattgataactttggtaatttttttaaaaaggcctcagctccccgccgccgccgccgccgccgccgccgagccggtttcctttttccggcgctccgggtgcgagagacaggtcgggccccctaggcagcgagccgcagcgcaatcccggcgctcgcccaaggaccctggaagctaccgttaccccgccgggcagcgtgggcgccatgagcagctcgggactgaattcggagaaggtagctgctctgatacagaaactgaattccgacccccagttcgtacttgcccagaatgtcgggaccacccacgacctgctggacatctgtctgaagcgggccacggtgcagcgcgcgcagcatgtgttccagcacgccgtgccccaggagggcaagccaatcaccaaccagaagagctcagggcgatgctggatcttttcttgtctgaatgttatgaggcttccattcatgaaaaagttaaatattgaagaatttgagtttagccaatcttacctgtttttttgggacaaggttgaacgctgttatttcttcttgagtgcttttgtggacacagcccagagaaaggagcctgaggatgggaggctggtgcagtttttgcttatgaaccctgcaaatgatggtggccaatgggatatgcttgttaatattgttgaaaaatatggtgttatccctaagaaatgcttccctgaatcttatacaacagaggcaaccagaaggatgaatgatattctgaatcacaagatgagagaattctgtatacgactgcggaacctggtacacagtggagcaaccaaaggagaaatctcggccacacaggacgtcatgatggaggagatattccgagtggtgtgcatctgtttgggtaatccaccagagacattcacctgggaatatcgagacaaagataaaaattatcagaaaattggccccataacacccttggagttttacagggaacatgtcaagccactcttcaatatggaagataagatttgtttagtgaatgaccctaggccccagcacaagtacaacaaactttacacagtggaatacttaagcaatatggttggagggagaaaaactctatacaacaaccagcccattgacttcctgaaaaagatggttgctgcctccatcaaagatggagaggctgtgtggtttggctgtgatgttggaaaacacttcaatagcaagctgggcctcagtgacatgaatctgtgagtgcaggaaatttaaaatggaaagtcatttgtgggttgttgctgttggagtgtgctgttggtacaaaatgactctgccgaggttcatccaaagatgaaggttgacctaagggcgcgtctctttctttgcatcctttagagtttgaggactcatagcagaaactccacatacttaaacactctaacccaggacatcaaaatcccactttctatctgagtggaaatcgttgggcgttcctaaaaagccatcctctatgagaaagacactttaaaaaaataattgactattgcggaaatgtgttcagtgcatttgggagtgtaatgaaagattttccagagcccccgtttgctatgttactttggtaactttgtattttgtcattgtgacaagtgggactaatttgcatgcatactttatagcattcctcctggtcatttatgacaatgaaggttaatttgtaaactaaatcatataggattccttgactgttcaccattctctattttagggttacttataaatagttgttacttgtaggaagttgagtaaatatcttgatagagaaatctgctaaaaaaaagaa

SEQ ID NO: 417574 - DNA, 3003 bp, Homo sapiens
ggcacgagggtggggtcgagagcgggatccgaggctggcgggttttggcagtagctgtggctgcggctgccgggcctggggacgcgggcggccgaggccgccgtcgcagcctcctcgtctcgccggctatggctgcgctcggccggcccttcagcggcctccctctgagcggcggctcggacttcctgcagccgccgcagccggccttccccggccgggccttcccgccgggggctgacggcgccgagttggccccgcggccgggacctcgcgcagtccctagcagtcccgctgggagtgcggcgcgcggacgtgtttctgttcactgtaaaaagaaacacaagcgagaggaggaggaggatgatgattgtccagtaagaaagaaaaggataactgaagcagagctctgtgctggtcctaatgactggattctttgtgcacatcaggatgtagaggggcatggagtaaatcccagtgttagtggcctttccatacctgggatattagatgttatttgtgaagaaatggatcagacaactggagaaccacagtgtgaagttgcccgaaggaagcttcaggagattgaggacaggataattgatgaagatgaagaagttgaagctgacagaaatgttaaccatctccccagtcttgtcctttctgataccatgaaaacaggtttgaagagggaatttgatgaagtttttacaaagaaaatgattgagtctatgagccgtccttccatggagcttgttctctggaaacccctccctgaactcctttctgataagccaaagccatcctctaatactaagaactatacaggagagagccaagctaagcatgtagctgctggcactgccttccctcagagaactgaactgttttcggaacctcggccaacagggatgtctctttataatagtttggagacagctactagcacagaagaagagatggaactctagaaaccaatttctacactaaagttgtcaaatgttagaagaatcctgtgttcagttatgagactctttgcatagtatagggacttgaaagttttatgagacgggtgtaataatatctccacctgtgatttgggggtgggactcttattttgggtagccatttattgacttcacctttttgccaaggacgtttgtctcaagggaaaagcagttttctgtggggcttattaaaggaatgttggtttacattgtcttcaaagacaagtatagaagctgtatgtgtaagggtgacttaaatcatatgtcacattgtctaaactattcagacacttggagaatattctccttgaattaaaaaagatgattaagaaggatgctcctacaactgtatcctgacagttaagtcacagcttaatgtgtagatatgagctgtttacagtggtgactatatataattggggagaagaagggaagagagcagcagtagcttaagcctgttgctaagaaatttaatttcttagcaacttgtaatttagttatcaattcaatatagctctgttgattaaatagccgatagtattgtggctctcctctttgactatgaaaatatagagaaagttttttctttaaggcttttttgccttgtgccactgttgctccttggtttcccttgcgtaattgataagcccagttattcagtaatgtttacaaattaattgactttgatagttaaaagattatgaggtaacccatctgcaatttgcctgtgggagaagcatcctttagttcatcttaaggaagtgctttatcagctaaacccaacattgataactttggtaatttttttaaaaaggcctcagctccccgccgccgccgccgccgccgccgccgagccggtttcctttttccggcgctccgggtgcgagagacaggtcgggccccctaggcagcgagccgcagcgcaatcccggcgctcgcccaaggaccctggaagctaccgttaccccgccgggcagcgtgggcgccatgagcagctcgggactgaattcggagaaggtagctgctctgatacagaaactgaattccgacccccagttcgtacttgcccagaatgtcgggaccacccacgacctgctggacatctgtctgaagcgggccacggtgcagcgcgcgcagcatgtgttccagcacgccgtgccccaggagggcaagccaatcaccaaccagaagagctcagggcgatgctggatcttttcttgtctgaatgttatgaggcttccattcatgaaaaagttaaatattgaagaatttgagtttagccaatcttacctgtttttttgggacaaggttgaacgctgttatttcttcttgagtgcttttgtggacacagcccagagaaaggagcctgaggatgggaggctggtgcagtttttgcttatgaaccctgcaaatgatggtggccaatgggatatgcttgttaatattgttgaaaaatatggtgttatccctaagaaatgcttccctgaatcttatacaacagaggcaaccagaaggatgaatgatattctgaatcacaagatggagagaattctggtatacgactgcgcgaagcctgtgttccccagtgggtgccaacaagtggggaactctcgggccccaggggcggtcctgctgcgggccggatttccgagggggcgtgagccttgtgggcgtaatcccccgggcacttccctgtggcatattgggcgcagatttacattatctcgacaatggtccccgaaaaaacccctggggttatacgggggactgtctggcgacctttaatatgggagaacaaatttgtgtgaagttcaagagtgcaggcagatattacaaatatacgggagataagaaatatgggggagaggaagaatataaaccaaggttgttgtaagagcagccgcaataaaagaggatgtagagttggaaggaataaagagacgatcataatcatatgattgagactaaagatggaaggatctaaatggaagtaccaggt

SEQ ID NO: 417575 - DNA, 2683 bp, Homo sapiens
ggcacgagggtggggtcgagagcgggatccgaggctggcgggttttggcagtagctgtggctgcggctgccgggcctggggacgcgggcggccgaggccgccgtcgcagcctcctcgtctcgccggctatggctgcgctcggccggcccttcagcggcctccctctgagcggcggctcggacttcctgcagccgccgcagccggccttccccggccgggccttcccgccgggggctgacggcgccgagttggccccgcggccgggacctcgcgcagtccctagcagtcccgctgggagtgcggcgcgcggacgtgtttctgttcactgtaaaaagaaacacaagcgagaggaggaggaggatgatgattgtccagtaagaaagaaaaggataactgaagcagagctctgtgctggtcctaatgactggattctttgtgcacatcaggatgtagaggggcatggagtaaatcccagtgttagtggcctttccatacctgggatattagatgttatttgtgaagaaatggatcagacaactggagaaccacagtgtgaagttgcccgaaggaagcttcaggagattgaggacaggataattgatgaagatgaagaagttgaagctgacagaaatgttaaccatctccccagtcttgtcctttctgataccatgaaaacaggtttgaagagggaatttgatgaagtttttacaaagaaaatgattgagtctatgagccgtccttccatggagcttgttctctggaaacccctccctgaactcctttctgataagccaaagccatcctctaatactaagaactatacaggagagagccaagctaagcatgtagctgctggcactgccttccctcagagaactgaactgttttcggaacctcggccaacagggatgtctctttataatagtttggagacagctactagcacagaagaagagatggaactctagaaaccaatttctacactaaagttgtcaaatgttagaagaatcctgtgttcagttatgagactctttgcatagtatagggacttgaaagttttatgagacgggtgtaataatatctccacctgtgatttgggggtgggactcttattttgggtagccatttattgacttcacctttttgccaaggacgtttgtctcaagggaaaagcagttttctgtggggcttattaaaggaatgttggtttacattgtcttcaaagacaagtatagaagctgtatgtgtaagggtgacttaaatcatatgtcacattgtctaaactattcagacacttggagaatattctccttgaattaaaaaagatgattaagaaggatgctcctacaactgtatcctgacagttaagtcacagcttaatgtgtagatatgagctgtttacagtggtgactatatataattggggagaagaagggaagagagcagcagtagcttaagcctgttgctaagaaatttaatttcttagcaacttgtaatttagttatcaattcaatatagctctgttgattaaatagccgatagtattgtggctctcctctttgactatgaaaatatagagaaagttttttctttaaggcttttttgccttgtgccactgttgctccttggtttcccttgcgtaattgataagcccagttattcagtaatgtttacaaattaattgactttgatagttaaaagattatgaggtaacccatctgcaatttgcctgtgggagaagcatcctttagttcatcttaaggaagtgctttatcagctaaacccaacattgataactttggtaatttttttaaaaaggcctcagctccccgccgccgccgccgccgccgccgccgagccggtttcctttttccggcgctccgggtgcgagagacaggtcgggccccctaggcagcgagccgcagcgcaatcccggcgctcgcccaaggaccctggaagctaccgttaccccgccgggcagcgtgggcgccatgagcagctcgggactgaattcggagaaggtagctgctctgatacagaaactgaattccgacccccagttcgtacttgcccagaatgtcgggaccacccacgacctgctggacatctgtctgaagcgggccacggtgcagcgcgcgcagcatgtgttccagcacgccgtgccccaggagggcaagccaatcaccaaccagaagagctcagggcgatgctggatcttttcttgtctgaatgttatgaggcttccattcatgaaaaagttaaatattgaagaatttgagtttagccaatcttacctgtttttttgggacaaggttgaacgctgttatttcttcttgagtgcttttgtggacacagcccagagaaaggagcctgaggatgggaggctggtgcagtttttgcttatgaaccctgcaaatgatggtggccaatgggatatgcttgttaatattgttgaccacacctatggtgttatccctgaagaaatgcttcccctgagctcttatacgaccagaggccacccagaaggattgccatgactattctgaactcaccgcgatgcgccgcgcttctggttccggactgcggaaccctggtccccagtgggggcaccccacggggaaattctcgggcccccaggacgccgctgggggcgacttcccacggggggccctcttcggggacc

SEQ ID NO: 417576 - DNA, 2321 bp, Homo sapiens
aaaacactgactatgaaggaggaagacattgaagaaggaaagccatctatctctgtaagaggacaatgcaaaataaagcaaggctggaactggcagattatgaagcagaaaacttagcaagactccagagggcctttgcgaggaagtgggaattcatctttatgcaagcagaagcacaagtaaagattgaccggaaaaaagacaagacagaaaggaaaattttggatagtcaagaacgagccttttgggatgtccacaggcctgtgccaggctgtgtgaacacaacagaaatggatatccgaaaatgtcgacgtttgaagaatccacaaaaggttaaaaagtccgtgtatggcgtgactgaagagtcccaggcacagagcccggtgcatgtactcagccaaccaatcaggaaaacaacaaaagaggacatccggaaacagataacatttttgaacgcacagatcgacagacattgtttgaaaatgtccaaagtggctgaaagtttaattgcctacacggaacaatatgtggaatatgaccctttgataacaccagctgagccatccaacccttggatcagcgatgacgttgctttgtgggacatagagatgagcaaagagcccagccaacagcgagtaaaaagatggggcttctctttcgatgagatattgaaggaccaggtggggcgggaccagtttctacgattcctggagtccgaattcagttcagaaaacctcaggttctggctggctgtccaagatcttaagaaacaacccctacaggatgtggccaagagggtagaagaaatctggcaagagtttctggctccaggggctccaagtgcaatcaacctggattctcacagctatgagataaccagtcaaaatgtcaaagatggagggagatatacatttgaagacgcccaggagcacatctacaagctgatgaagagtgacagctatgcccgcttcctccggtcaaatgcttaccaggatttgctgctggccaagaagaagccagaaagtgagcaaggtcgtagaacttccctagaaaagttcactcgcagtgtgttgtattccaacactccactcgctaagaggccctgatcccagctcattcaggggagaacacgtcgtggggttcctgtcacgactatcacttgagattatattattatcctcactccctcgctgtctggagacggtcacaccttctggcaaattcaagaggcatgagtggaccgagagcacatccagcatttgcatcacctccctggcacctcccatagttacagccactacatccccaccgccgcctgtcatccctcacgtctctgtggccacccgggtgtcactgccagcaccaggcactgctttcacgtaaaatgtccaaatcacatcttcagcaagaaagcaacctcacggattgccccgcctcaaggtctttccaccctctttgagatcagcgttcggagaggtccccgccagcccggtggctgccctcaggtcccgtcacatgtctcaagggtccagcgttcgaggaagcactgttgtagatgacagagctttttgtttcacagctgcggggattctgctgaccatcttttagaaaattatttcataatttattctggctttgcccccttgctccttggtttattccctcatgttttactcaaaataaacatggccatgaactcaggggccattgggattctcccctctggcagccccaggtgggagctgggagggtccccagcccaggaggtggctggattgcagggctggcagcccccacgtggtggcatcctgacaggcacagtgagacccttgctgggtcaggtctcctttgtgtgtgaagctggggcagagtatgctacgaagggaccaggccaggccacagggctctcctcccagtctttatctgaaggcccagccaaagcacccctctaaaccggtcacctaggggaaatgcaaaaacctgcaaaagatccacctgtattccctgtgtgtgtgtgtcaaaatgaccatttgccaacctggctgtgaggtaatgtatgtaaagcaccgagtcaggtgcctgatacgcagtaggtgcttagcaaacggtagctaatactatcatcattgtcattgttattgtgacacccatgagcccacagacagagctgtattaagtaacctgttttgaatccagacattcactcccccacttgctatgactaccctcctttgatctatttttggtcataggtaaaaaaaaaaatctctcttgggagcatataaacaaaaaacatagaagcaaaaaagcgatcgctggta

SEQ ID NO: 417577 - DNA, 383 bp, Homo sapiens
gaaataaccattttcagttgtgatgccttaactaagaagccatcgaactataccgtgaaataaattggctcagaaccatagctcatcgaaaaaaaaaaaaaaaagccaaaatttccctctgtgaaccctggcagtcacgccggtgtgggtcgcgagctaatgttgctgtgtaggcggcttttgctgtgtgcagaaagcggccgtgctgcatgggtcctggcgatgtggcctagctggcgtgtgtgttagtcgcctctgcatgagtcccttccagcccccatcagcctcatgtgcacagtgtgatagggagaggagggaagtagctgaatccctgcggtgtcctgggtactccccgggggcaaggtcctaccggcctcctcagg

SEQ ID NO: 417578 - DNA, 2829 bp, Homo sapiens
agcggaagacatgacttgcacctccttgccttctgccatgattgtgaggcctccccagccacgtggaactgtactgacattgtgcagtggcttatgaagaacctttccattgaggacccagttgaagcaatacacttggggagccttatcgctgcccagggctacatctttccaatctcagaccatgttctcaccatgaaggatgatggcaccttttatcgtttccaggctccgtacttctggccttcgaactgctgggaacctgaaaacactgactatgaggaggaagacattgaagaaggaaagccatctatctctgtaagaggacaatgcaaaataaagcaaggctggaactggcagattatgaagcagaaaacttagcaagactccagagggcctttgcgaggaagtgggaattcatctttatgcaagcagaagcacaagtaaagattgaccggaaaaaagacaagacagaaaggaaaattttggatagtcaagaacgagccttttgggatgtccacaggcctgtgccaggctgtgtgaacacaacagaaatggatatccgaaaatgtcgacgtttgaagaatccacaaaaggttaaaaagtccgtgtatggcgtgactgaagagtcccaggcacagagcccggtgcatgtactcagccaaccaatcaggaaaacaacaaaagaggacatccggaaacagataacatttttgaacgcacagatcgacagacattgtttgaaaatgtccaaagtggctgaaagtttaattgcctacacggaacaatatgtggaatatgaccctttgataacaccagctgagccatccaacccttggatcagcgatgacgttgctttgtgggacatagagatgagcaaagagcccagccaacagcgagtaaaaagatggggcttctctttcgatgagatattgaaggaccaggtggggcgggaccagtttctacgattcctggagtccgaattcagttcagaaaacctcaggttctggctggctgtccaagatcttaagaaacaacccctacaggatgtggccaagagggtagaagaaatctggcaagagtttctggctccaggggctccaagtgcaatcaacctggattctcacagctatgagataaccagtcaaaatgtcaaagatggagggagatatacatttgaagacgcccaggagcacatctacaagctgatgaagagtgacagctatgcccgcttcctccggtcaaatgcttaccaggatttgctgctggccaagaagaagggaaagtcgctggcgggcaagcgcctcacgggcctgatgcagtcctcctgaccgttcctaccgcaggtccagggcctgggcccgcggaccccacaggcaggcggcggcgctccacatctgcggacagagtttccttacgaggagacttggtcactgtgaaggagaaagagtgagggcaatgaagggcgatggtggggagactcggtgggtgaatggggagaccagaaagaaagagtccacagagcctgggctgggcccggtggaggctcctgtttacagccctctcttctttgtacagttgtattccaacactccactcgctaagaggccctgatcccagctcattcaggggagaacacgtcgtggggttcctgtcacgactatcacttgagattatattattatcctcactccctcgctgtctggagacggtcacaccttctggcaaattcaagaggcatgagtggaccgagagcacatccagcatttgcatcacctccctggcacctcccatagttacagccactacatccccaccgccgcctgtcatccctcacgtctctgtggccacccgggtgtcactgccagcaccaggcactgctttcacgtaaaatgtccaaatcacatcttcagcaagaaagcaacctcacggattgccccgcctcaaggtctttccaccctctttgagatcagcgttcggagaggtccccgccagcccggtggctgccctcaggtcccgtcacatgtctcaagggtccagcgttcgaggaagcactgttgtagatgacagagctttttgtttcacagctgcggggattctgctgaccatcttttagaaaattatttcataatttattctggctttgcccccttgctccttggtttattccctcatgttttactcaaaataaacatggccatgaactcaggggccattgggattctcccctctggcagccccaggtgggagctgggagggtccccagcccaggaggtggctggattgcagggctggcagcccccacgtggtggcatcctgacaggcacagtgagacccttgctgggtcaggtctcctttgtgtgtgaagctggggcagagtatgctacgaagggaccaggccaggccacagggctctcctcccagtctttatctgaaggcccagccaaagcacccctctaaaccggtcacctaggggaaatgcaaaaacctgcaaaagatccacctgtattccctgtgtgtgtgtgtcaaaatgaccatttgccaacctggctgtgaggtaatgtatgtaaagcaccgagtcaggtgcctgatacgcagtaggtgcttagcaaacggtagctaatactatcatcattgtcattgttattgtgacacccatgagcccacagacagagctgtattaagtaacctgttttgaatccagacattcactcccccacttgctatgactaccctcctttgatctatttttggtcataggtaaaaaaaaaaatctctcttgggagcatataaacaaaaaacatagaagcaaaaaagcgatcgctggta

SEQ ID NO: 417579 - DNA, 1849 bp, Homo sapiens
agcggaagacatgacttgcacctccttgccttctgccatgattgtgaggcctccccagccacgtggaactgtactgacattgtgcagtggcttatgaagaacctttccattgaggacccagttgaagcaatacacttggggagccttatcgctgcccagggctacatctttccaatctcagaccatgttctcaccatgaaggatgatggcaccttttatcgtttccaggctccgtacttctggccttcgaactgctgggaacctgaaaacactgactatgaggaggaagacattgaagaaggaaagccatctatctctgtaagaggacaatgcaaaataaagcaaggctggaactggcagattatgaagcagaaaacttagcaagactccagagggcctttgcgaggaagtgggaattcatctttatgcaagcagaagcacaagtaaagattgaccggaaaaaagacaagacagaaaggaaaattttggatagtcaagaacgagccttttgggatgtccacaggcctgtgccaggctgtgtgaacacaacagaaatggatatccgaaaatgtcgacgtttgaagaatccacaaaaggttaaaaagtccgtgtatggcgtgactgaagagtcccaggcacagagcccggtgcatgtactcagccaaccaatcaggaaaacaacaaaagaggacatccggaaacagataacatttttgaacgcacagatcgacagacattgtttgaaaatgtccaaagtggctgaaagtttaattgcctacacggaacaatatgtggaatatgaccctttgataacaccagctgagccatccaacccttggatcagcgatgacgttgctttgtgggacatagagatgagcaaagagcccagccaacagcgagtaaaaagatggggcttctctttcgatgagatattgaaggaccaggtggggcgggaccagtttctacgattcctggagtccgaattcagttcagaaaacctcaggttctggctggctgtccaagatcttaagaaacaacccctacaggatgtggccaagagggtagaagaaatctggcaagagtttctggctccaggggctccaagtgcaatcaacctggattctcacagctatgagataaccagtcaaaatgtcaaagatggagggagatatacatttgaagacgcccaggagcacatctacaagctgatgaagagtgacagctatgcccgcttcctccggtcaaatgcttaccaggatttgctgctggccaagaagaagccagaaagtgagcaaggtcgtagaacttccctagaaaagttcactcgcagtgtgggatgaaaatgcaaaaaagagcaagcggctccctctgcagaaggtgcacccttgatcgcccagcctcaggcctgggcatttgatcatctgttcagggctttgaggaggagggaccctgctgccctcggggctgtgcggtttgtgcatcttctgcagcagctcagggagaagccatcgaactataccgtgaaataaattggctcagaaccatagctcatcgaaaaaaaaaaaaaaaagccaaaatttccctctgtgaaccctggcagtcacgccggtgtgggtcgcgagctaatgttgctgtgtaggcggcttttgctgtgtgcagaaagcggccgtgctgcatgggtcctggcgatgtggcctagctggcgtgtgtgttagtcgcctctgcatgagtcccttccagcccccatcagcctcatgtgcacagtgtgatagggagaggagggaagtagctgaatccctgcggtgtcctgggtactccccgggggcaaggtcctaccggcctcctcagg

SEQ ID NO: 417580 - DNA, 1480 bp, Homo sapiens
agcggaagacatgacttgcacctccttgccttctgccatgattgtgaggcctccccagccacgtggaactgtactgacattgtgcagtggcttatgaagaacctttccattgaggacccagttgaagcaatacacttggggagccttatcgctgcccagggctacatctttccaatctcagaccatgttctcaccatgaaggatgatggcaccttttatcgtttccaggctccgtacttctggccttcgaactgctgggaacctgaaaacactgactatgaggaggaagacattgaagaaggaaagccatctatctctgtaagaggacaatgcaaaataaagcaaggctggaactggcagattatgaagcagaaaacttagcaagactccagagggcctttgcgaggaagtgggaattcatctttatgcaagcagaagcacaagtaaagattgaccggaaaaaagacaagacagaaaggaaaattttggatagtcaagaacgagccttttgggatgtccacaggcctgtgccaggctgtgtgaacacaacagaaatggatatccgaaaatgtcgacgtttgaagaatccacaaaaggttaaaaagtccgtgtatggcgtgactgaagagtcccaggcacagagcccggtgcatgtactcagccaaccaatcaggaaaacaacaaaagaggacatccggaaacagataacatttttgaacgcacagatcgacagacattgtttgaaaatgtccaaagtggctgaaagtttaattgcctacacggaacaatatgtggaatatgaccctttgataacaccagctgagccatccaacccttggatcagcgatgacgttgctttgtgggacatagagatgagcaaagagcccagccaacagcgagtaaaaagatggggcttctctttcgatgagatattgaaggaccaggtggggcgggaccagtttctacgattcctggagtccgaattcagttcagaaaacctcaggttctggctggctgtccaagatcttaagaaacaacccctacaggatgtggccaagagggtagaagaaatctggcaagagtttctggctccaggggctccaagtgcaatcaacctggattctcacagctatgagataaccagtcaaaatgtcaaagatggagggagatatacatttgaagacgcccaggagcacatctacaagctgatgaagagtgacagctatgcccgcttcctccggtcaaatgcttaccaggatttgctgctggccaagaagaagccagaaagtgagcaaggtcgtagaacttccctagaaaagttcactcgcagtgtggtaagttcagtcggttttcttccctcagcttttcttttggttttggttttttctttcttcttcttttttttttttttccctttggttgttgtttcctttggggtgggagggagtccagtgctttctccctcgactcagcccttttc

SEQ ID NO: 417581 - DNA, 3124 bp, Homo sapiens
gactgtggaagcacgagcttacataagtggttaggcaagctggcgtgtggacttgtgtgggatgggtgcaggtctgcatataaatcatgttcctgggtttctgggtgtgaagcgcacaccgacggggacgagagcgcataggatggcgcttttagatacttccagtcttccgatgttgtgatcgcagtgtgagtgaagacactcaggatggctcaaggatccggggatcaaagagcagtgggggttgctgacccagaggagagttctccaaacatgatcgtttactgcaaaattgaagacatcattacaaagatgcaagatgacaagacagggggtgtgcccatcagaacagtcaagagctttctctccaaaatccccagtgtcgtcacaggtactgacattgtgcagtggcttatgaagaacctttccattgaggacccagttgaagcaatacacttggggagccttatcgctgcccagggctacatctttccaatctcagaccatgttctcaccatgaaggatgatggcaccttttatcgtttccaggctccgtacttctggccttcgaactgctgggaacctgaaaacactgactatgccatctatctctgtaagaggacaatgcaaaataaagcaaggctggaactggcagattatgaagcagaaaacttagcaagactccagagggcctttgcgaggaagtgggaattcatctttatgcaagcagaagcacaagtaaagattgaccggaaaaaagacaagacagaaaggaaaattttggatagtcaagaacgagccttttgggatgtccacaggcctgtgccaggctgtgtgaacacaacagaaatggatatccgaaaatgtcgacgtttgaagaatccacaaaaggttaaaaagtccgtgtatggcgtgactgaagagtcccaggcacagagcccggtgcatgtactcagccaaccaatcaggaaaacaacaaaagaggacatccggaaacagataacatttttgaacgcacagatcgacagacattgtttgaaaatgtccaaagtggctgaaagtttaattgcctacacggaacaatatgtggaatatgaccctttgataacaccagctgagccatccaacccttggatcagcgatgacgttgctttgtgggacatagagatgagcaaagagcccagccaacagcgagtaaaaagatggggcttctctttcgatgagatattgaaggaccaggtggggcgggaccagtttctacgattcctggagtccgaattcagttcagaaaacctcaggttctggctggctgtccaagatcttaagaaacaacccctacaggatgtggccaagagggtagaagaaatctggcaagagtttctggctccaggggctccaagtgcaatcaacctggattctcacagctatgagataaccagtcaaaatgtcaaagatggagggagatatacatttgaagacgcccaggagcacatctacaagctgatgaagagtgacagctatgcccgcttcctccggtcaaatgcttaccaggatttgctgctggccaagaagaagggaaagtcgctggcgggcaagcgcctcacgggcctgatgcagtcctcctgaccgttcctaccgcaggtccagggcctgggcccgcggaccccacaggcaggcggcggcgctccacatctgcggacagagtttccttacgaggagacttggtcactgtgaaggagaaagagtgagggcaatgaagggcgatggtggggagactcggtgggtgaatggggagaccagaaagaaagagtccacagagcctgggctgggcccggtggaggctcctgtttacagccctctcttctttgtacagttgtattccaacactccactcgctaagaggccctgatcccagctcattcaggggagaacacgtcgtggggttcctgtcacgactatcacttgagattatattattatcctcactccctcgctgtctggagacggtcacaccttctggcaaattcaagaggcatgagtggaccgagagcacatccagcatttgcatcacctccctggcacctcccatagttacagccactacatccccaccgccgcctgtcatccctcacgtctctgtggccacccgggtgtcactgccagcaccaggcactgctttcacgtaaaatgtccaaatcacatcttcagcaagaaagcaacctcacggattgccccgcctcaaggtctttccaccctctttgagatcagcgttcggagaggtccccgccagcccggtggctgccctcaggtcccgtcacatgtctcaagggtccagcgttcgaggaagcactgttgtagatgacagagctttttgtttcacagctgcggggattctgctgaccatcttttagaaaattatttcataatttattctggctttgcccccttgctccttggtttattccctcatgttttactcaaaataaacatggccatgaactcaggggccattgggattctcccctctggcagccccaggtgggagctgggagggtccccagcccaggaggtggctggattgcagggctggcagcccccacgtggtggcatcctgacaggcacagtgagacccttgctgggtcaggtctcctttgtgtgtgaagctggggcagagtatgctacgaagggaccaggccaggccacagggctctcctcccagtctttatctgaaggcccagccaaagcacccctctaaaccggtcacctaggggaaatgcaaaaacctgcaaaagatccacctgtattccctgtgtgtgtgtgtcaaaatgaccatttgccaacctggctgtgaggtaatgtatgtaaagcaccgagtcaggtgcctgatacgcagtaggtgcttagcaaacggtagctaatactatcatcattgtcattgttattgtgacacccatgagcccacagacagagctgtattaagtaacctgttttgaatccagacattcactcccccacttgctatgactaccctcctttgatctatttttggtcataggtaaaaaaaaaaatctctcttgggagcatataaacaaaaaacatagaagcaaaaaagcgatcgctggta

SEQ ID NO: 417582 - DNA, 629 bp, Homo sapiens
agcggaagacatgacttgcacctccttgccttctgccatgattgtgaggcctccccagccacgtggaactgtactgacattgtgcagtggcttatgaagaacctttccattgaggacccagttgaagcaatacacttggggagccttatcgctgcccagggctacatctttccaatctcagaccatgttctcaccatgaaggatgatggcaccttttatcgtttccaggctccgtacttctggccttcgaactgctgggaacctgaaaacactgactatgccatctatctctgtaagaggacaatgcaaaataaagcaaggctggaactggcagattatgaagcactccccactggaagaggagtcctgagaaatccagcctttggttttgctcctggagataccagcaggtggcaaagactcgttaattccccaataaccacagacaattttcccgattttcagcaacctttgaaacaagtgctgtgaaaacttagcaagactccagagggcctttgcgaggaagtgggaattcatctttatgcaagcagaagcacaagtaaagtaggtgaacttgatagagaccttttcagagaggaaaagactctggaatttggaaatggtgtgaa

SEQ ID NO: 417583 - DNA, 3178 bp, Homo sapiens
gactgtggaagcacgagcttacataagtggttaggcaagctggcgtgtggacttgtgtgggatgggtgcaggtctgcatataaatcatgttcctgggtttctgggtgtgaagcgcacaccgacggggacgagagcgcataggatggcgcttttagatacttccagtcttccgatgttgtgatcgcagtgtgagtgaagacactcaggatggctcaaggatccggggatcaaagagcagtgggggttgctgacccagaggagagttctccaaacatgatcgtttactgcaaaattgaagacatcattacaaagatgcaagatgacaagacagggggtgtgcccatcagaacagtcaagagctttctctccaaaatccccagtgtcgtcacaggtactgacattgtgcagtggcttatgaagaacctttccattgaggacccagttgaagcaatacacttggggagccttatcgctgcccagggctacatctttccaatctcagaccatgttctcaccatgaaggatgatggcaccttttatcgtttccaggctccgtacttctggccttcgaactgctgggaacctgaaaacactgactatgccatctatctctgtaagaggacaatgcaaaataaagcaaggctggaactggcagattatgaagcagaaaacttagcaagactccagagggcctttgcgaggaagtgggaattcatctttatgcaagcagaagcacaagtaaagattgaccggaaaaaagacaagacagaaaggaaaattttggatagtcaagaacgagccttttgggatgtccacaggcctgtgccaggctgtgtgaacacaacagaaatggatatccgaaaatgtcgacgtttgaagaatccacaaaaggttaaaaagtccgtgtatggcgtgactgaagagtcccaggcacagagcccggtgcatgtactcagccaaccaatcaggaaaacaacaaaagaggacatccggaaacagataacatttttgaacgcacagatcgacagacattgtttgaaaatgtccaaagtggctgaaagtttaattgcctacacggaacaatatgtggaatatgaccctttgataacaccagctgagccatccaacccttggatcagcgatgacgttgctttgtgggacatagagatgagcaaagagcccagccaacagcgagtaaaaagatggggcttctctttcgatgagatattgaaggaccaggtggggcgggaccagtttctacgattcctggagtccgaattcagttcagaaaacctcaggttctggctggctgtccaagatcttaagaaacaacccctacaggatgtggccaagagggtagaagaaatctggcaagagtttctggctccaggggctccaagtgcaatcaacctggattctcacagctatgagataaccagtcaaaatgtcaaagatggagggagatatacatttgaagacgcccaggagcacatctacaagctgatgaagagtgacagctatgcccgcttcctccggtcaaatgcttaccaggatttgctgctggccaagaagaagccagaaagtgagcaaggtcgtagaacttccctagaaaagttcactcgcagtgtgggaaagtcgctggcgggcaagcgcctcacgggcctgatgcagtcctcctgaccgttcctaccgcaggtccagggcctgggcccgcggaccccacaggcaggcggcggcgctccacatctgcggacagagtttccttacgaggagacttggtcactgtgaaggagaaagagtgagggcaatgaagggcgatggtggggagactcggtgggtgaatggggagaccagaaagaaagagtccacagagcctgggctgggcccggtggaggctcctgtttacagccctctcttctttgtacagttgtattccaacactccactcgctaagaggccctgatcccagctcattcaggggagaacacgtcgtggggttcctgtcacgactatcacttgagattatattattatcctcactccctcgctgtctggagacggtcacaccttctggcaaattcaagaggcatgagtggaccgagagcacatccagcatttgcatcacctccctggcacctcccatagttacagccactacatccccaccgccgcctgtcatccctcacgtctctgtggccacccgggtgtcactgccagcaccaggcactgctttcacgtaaaatgtccaaatcacatcttcagcaagaaagcaacctcacggattgccccgcctcaaggtctttccaccctctttgagatcagcgttcggagaggtccccgccagcccggtggctgccctcaggtcccgtcacatgtctcaagggtccagcgttcgaggaagcactgttgtagatgacagagctttttgtttcacagctgcggggattctgctgaccatcttttagaaaattatttcataatttattctggctttgcccccttgctccttggtttattccctcatgttttactcaaaataaacatggccatgaactcaggggccattgggattctcccctctggcagccccaggtgggagctgggagggtccccagcccaggaggtggctggattgcagggctggcagcccccacgtggtggcatcctgacaggcacagtgagacccttgctgggtcaggtctcctttgtgtgtgaagctggggcagagtatgctacgaagggaccaggccaggccacagggctctcctcccagtctttatctgaaggcccagccaaagcacccctctaaaccggtcacctaggggaaatgcaaaaacctgcaaaagatccacctgtattccctgtgtgtgtgtgtcaaaatgaccatttgccaacctggctgtgaggtaatgtatgtaaagcaccgagtcaggtgcctgatacgcagtaggtgcttagcaaacggtagctaatactatcatcattgtcattgttattgtgacacccatgagcccacagacagagctgtattaagtaacctgttttgaatccagacattcactcccccacttgctatgactaccctcctttgatctatttttggtcataggtaaaaaaaaaaatctctcttgggagcatataaacaaaaaacatagaagcaaaaaagcgatcgctggta

SEQ ID NO: 417584 - DNA, 1132 bp, Homo sapiens
agcggaagacatgacttgcacctccttgccttctgccatgattgtgaggcctccccagccacgtggaactgtactgacattgtgcagtggcttatgaagaacctttccattgaggacccagttgaagcaatacacttggggagccttatcgctgcccagggctacatctttccaatctcagaccatgttctcaccatgaaggatgatggcaccttttatcgtttccaggctccgtacttctggccttcgaactgctgggaacctgaaaacactgactatgaggaggaagacattgaagaaggaaagccatctatctctgtaagaggacaatgcaaaataaagcaaggctggaactggcagattatgaagcagaaaacttagcaagactccagagggcctttgcgaggaagtgggaattcatctttatgcaagcagaagcacaagtaaagattgaccggaaaaaagacaagacagaaaggaaaattttggatagtcaagaacgagccttttgggatgtccacaggcctgtgccaggctgtgtgaacacaacagaaatggatatccgaaaatgtcgacgtttgaagaatccacaaaaggttaaaaagtccgtgtatggcgtgactgaagagtcccaggcacagagcccggtgcatgtactcagccaaccaatcaggaaaacaacaaaagaggacatccggaaacaggtgaatgaattgacagcttgcactctcaggaggagacgtggccagtttaaaaaccctttcaaatgttcaactctgaagattgagcaagctttgagttcctggaaaccacagtggaacccagctgtgggtgattgaaccttttaagtgctgtgtgtgaacaagccacggaagcttgagagaaagaattctctacccagttcctccagcagttactagaaaagggcgtaaatgagtcatcccatgccttggggtaactgctgtaatggggtttcccacagtccgctgtgggagctggaggaaggagggggctcatgtcacacagtccttataattggaatgcaccagctcaggatggtctactttattgctgtgatttgaaaggaaagtttaagaataaataaagctctactcccaatgccatttcagca

SEQ ID NO: 417585 - DNA, 469 bp, Homo sapiens
taattgttgaaagacaacttgtggattatttggaatggccattgtgattctacttgtttttaattatactcttaccacattattagagggagcgtagcatagcaggtaagactacacactgaagggagacttccagggttagaacattggctctgctacttcacagctatgtgatgtggacagattagtctttgttcctcattttccatctgtaacatggggatgataactttacctacttcctagagttgatgtgaggaatacttgagcttatatatataaacagttatagcaatgccaagcatgtaataagtgaatataagagctggctgtttttatgtaatatatagctgtctcattatttagtctctctatggggggaaataggctactataattttaggcaaaataatttggctgtagagaaacaaaccaagttgttccactttactctttgaccatttatttg

SEQ ID NO: 417586 - DNA, 378 bp, Homo sapiens
ggacaggggcagctgctagacaggccctattctgggcctctctgaaaagaagagtccctgaaaagaaagggagcctcccgcttccgtggccccttagccatgccaaggggcagcaaccggctttctgctgatgctgatgagctgtggtgtgaactcacgaaggtcagctgattcacaggccctggatctctgctctccctctgctaagtgggactcgggccagcctgccatgaaggaggcggctgctgcagctctcaggaaggaacactgggcggctaaccccaccgggcggccaaccccaccgggtgtcaaccccaccgggcggccaaccccaccggacggccaaccccaccgggcgtcaaccccaccgggcggcca

SEQ ID NO: 417587 - DNA, 227 bp, Homo sapiens
tactgggctaaactccagacgctggccaccttcatagggtggagatgacagaacaggacaggagccatggggctcccggggcgggtaggggtgggtcatgttccttggcttgggggcagttacaagggtacagtggggcttgttgaagggcaaaagttctgtaagttcgtcccgacaggccaaagaaaccccagagccgtctttcgactgactacagcctggaagag

SEQ ID NO: 417588 - DNA, 255 bp, Homo sapiens
ggcaaaacagcctcttcctatctaaatgagctcattatttttcatctgtgctatttcttacagtggtgtctaaaaaacaatccaaaagtttgatccatttagtgaaatcttacatggagtatgacaatggatatttatctaatggatatttatactaataaaaaaatagtatatttgttactaactagtaagaatcagtcagcatgacattataacattggcagtgtgttgtattattacgccttgagcaattgt

SEQ ID NO: 417589 - DNA, 1804 bp, Homo sapiens
cacagttgttgcaaagtgctcagcactaagggagccagcgcacagcacagccaggaaggcgagcgagcccagccagcccagccagcccagccagcccggaggtaaggaaacggtgctcgggcagcagctctgctcggaaagaaggcacggcttctgctcttaagccaagtggtcttttcaaaggccttctttaaaatcgctcagatgggtgcttttgagtctgcgggtctggtttctgaaaacccaggctgcacgcagctgcattgcaaagtgcttttgctaattcggagggcttcacctttctcttcagaaagcaaagggcagttttcttaagtcacttgcagaaggaaatttccatgtgtatttaggaatctggtgtttatttgctgtgtggctatttaagctccagtaagcaggggaactttgcaagaacacagactatccattctgcctgaccaatttggcatggggattagcttggcacccactgtttacctgttttgcttctagtatatcagtttggaaacagataaaattggcagtaaatacgtaattccagaatgatgaacactttattaagaggcatccttaaatggagcagaaaactgctgagaatctttgtgagtccaagatgtatttgaattcagtactttgggggatttaccagagtctgtaagtccggaagctataaacgtgaatgttaaacacagcccggtcttctcttctcttgatggcacgcttgctaatctaatttgagtattgttctcttagaaggtgttaagtccaacttcaattggggttgggggaagcacacacacaaatctactattttgcaatttaaatatactcttcaggtaaaatgtggattttgttcaattttgttggcatgtgcaaagattcaaggagtgactgagagaactttggagtgaggtcagggatgggtggttagccaagacttgtaacttccagggagaatgagaagttgtaaaagtcagactggctgtctctctttctctcttcctctttctttctttctttctttccttttgctcacaacaggattacttagtgtttcaaaagtgggagagagcctccttaaatggtttacagccctttgaatgtatttggtgcagtgacatcccctgaaacttcagtctgcaaagtctcaacatggtaactttgttcttttcttttttaaaggcagatgctgcttttagtgtccctttatttattccaggaaaaatgtggacatcagctaggcacgcctagcaaagaaagtggaggctgctggtttctgtgctttaactttccatagattttaaatggataaactgcttgcccttctttcatcagaatatgagctttccccagatggaaagtcttttctaaagcaaagttgcacatgggagctctagcttggaaacaatttgctcttttttccccagtctctgccataaacacttgaatgtgcacacaactgcagagcttaatgccacaacctccaggagattggggggaggggaaagctgcccaggatgggggtgggaaagcgaaggaagatggagaaatggctgcagtttgctgcccatcagcttttctcttttaaggggcagacattgcagacgtagttttaaaaaagttccataaagcatcgccaaggcagcatgcctgtgcgacacacgcagggctttgggggtgtgttttccccgtattaacagcaagtcgttgaagcgttgagaaggtattatgatttctaatcaggcccagaacaggccaagtataggctttctgaatgaaaaaaaaa

SEQ ID NO: 417590 - DNA, 833 bp, Homo sapiens
gtgaccccggggccagaattctcgcaggcgcctgggccgggtgcccggccgtgcgtgagtgcggaacaagtctgggcgcggggaagggcgtgggtgcgggccgtgggtgggtgcggggcagggcgcggggctgtgggagggcgcgaggccgtgtgtgggtgcggggctgggtgcaggccgtgggtgggcgcggggccggggctggcggggcagggcgcaggctgctgcaaggcggcctcgtggattctggccccggacgcacgaagcgggttctactttttaaaaaaactgcgttgccttttccttcctctacgttagcatcctgtccggggtccccggcccatgtggcctttcttccagcgacagtacacttagctcagaacggattgacacccactctgtgtttccaccgggcgcgcaggctctgcaatgcggagcgcgttctctgaaggacaggccccggagtcacggctacagccacagaaagcggaaaccgagctgcagtccagaggggatccccgtacatttccagcgggctcagacacagggtcccccacaagaaagaaacaggacagaaaaagtcaggacacgtatgctgtggagagtcgaggtctcgcctagatcttgggtgtgggtagacgcagccgctggcagttttcctttccagcgtctctggggagcctggagatgtccttggtgccgatgtgacacgaagagtgattgcgccgccctgcagaggcggtggcgggacgctgcgctcgggctgggaaaggccggccccagggcgacccctccggaggcccccggagagcaggtgtgcacctcgcctcccg

SEQ ID NO: 417591 - DNA, 2031 bp, Homo sapiens
cacagttgttgcaaagtgctcagcactaagggagccagcgcacagcacagccaggaaggcgagcgagcccagccagcccagccagcccagccagcccggaggtcatttgattgcccgcctcagaacgatggatctgcatctcttcgactactcagagccagggaacttctcggacatcagctggccatgcaacagcagcgactgcatcgtggtggacacggtgatgtgtcccaacatgcccaacaaaagcgtcctgctctacacgctctccttcatttacattttcatcttcgtcatcggcatgattgccaactccgtggtggtctgggtgaatatccaggccaagaccacaggctatgacacgcactgctacatcttgaacctggccattgccgacctgtgggttgtcctcaccatcccagtctgggtggtcagtctcgtgcagcacaaccagtggcccatgggcgagctcacgtgcaaagtcacacacctcatcttctccatcaacctcttcggcagcattttcttcctcacgtgcatgagcgtggaccgctacctctccatcacctacttcaccaacacccccagcagcaggaagaagatggtacgccgtgtcgtctgcatcctggtgtggctgctggccttctgcgtgtctctgcctgacacctactacctgaagaccgtcacgtctgcgtccaacaatgagacctactgccggtccttctaccccgagcacagcatcaaggagtggctgatcggcatggagctggtctccgttgtcttgggctttgccgttcccttctccattatcgctgtcttctacttcctgctggccagagccatctcggcgtccagtgaccaggagaagcacagcagccggaagatcatcttctcctacgtggtggtcttccttgtctgctggctgccctaccacgtggcggtgctgctggacatcttctccatcctgcactacatccctttcacctgccggctggagcacgccctcttcacggccctgcatgtcacacagtgcctgtcgctggtgcactgctgcgtcaaccctgtcctctacagcttcatcaatcgcaactacaggtacgagctgatgaaggccttcatcttcaagtactcggccaaaacagggctcaccaagctcatcgatgcctccagagtctcagagacggagtactctgccttggagcagagcaccaaatgatctgccctggagaggctctgggacgggtttacttgtttttgaacagggtgatgggccctatggttttctagagcaaagcaaagtagcttcgggtcttgatgcttgagtagagtgaagaggggagcacgtgccccctgcatccattctctctttctcttgatgacgcagctgtcatttggctgtgcgtgctgacagttttgcaacaggcagagctgtgtcgcacagcagtgctgtgcgtcagagccagctgaggacaggcttgcctggacttctgtaagataggattttctgtgtttcctgaattttttatatggtgatttgtatttaaattttaagactttattttctcactattggtgtaccttataaatgtatttgaaagttaaatatattttaaatattgtttgggaggcatagtgctgacatatattcagagtgttgtagttttaaggttagcgtgacttcagttttgactaaggatgacactaattgttagctgttttgaaattatatatatataaatatatataaatatataaatatatgccagtcttggctgaaatgttttatttaccatagttttatatctgtgtggtgttttgtaccggcacgggatatggaacgaaaactgctttgtaatgcagtttgtgacattaatagtattgtaaagttacattttaaaataaacaaaaaactgttctggactgcaaatctgcacacacaacgaacagttgcatttcagagagttctctcaatttgtaagttatttttttttaataaagatttttgtttcctaaaaatgcatcaagtctcag

SEQ ID NO: 417592 - DNA, 2321 bp, Homo sapiens
ggcattggtaaactgtcatggtgctggcaggaatggctaagggtgatgggcagcgagaacaaccagaggcgctttttgtgtctttttctagttttggcctgttctcaatctggtctgggagacgaatcctgctgacctcctacctctgctggcaaaactcgagtggggtctgggaacttgaaggaaggagttttacagcttcagatctgggtatttatccaaaagacttgaaactggggtcctgaggagatacaaacacttctcagttcattaaagcactattcacagtatccaagaagtgaagtgttcaaccactgagtatgatgttggctctaagtattcatatgaggcctacgtcaaattcatacatgtcgaatatcaaattggggaagtcatttgattgcccgcctcagaacgatggatctgcatctcttcgactactcagagccagggaacttctcggacatcagctggccatgcaacagcagcgactgcatcgtggtggacacggtgatgtgtcccaacatgcccaacaaaagcgtcctgctctacacgctctccttcatttacattttcatcttcgtcatcggcatgattgccaactccgtggtggtctgggtgaatatccaggccaagaccacaggctatgacacgcactgctacatcttgaacctggccattgccgacctgtgggttgtcctcaccatcccagtctgggtggtcagtctcgtgcagcacaaccagtggcccatgggcgagctcacgtgcaaagtcacacacctcatcttctccatcaacctcttcggcagcattttcttcctcacgtgcatgagcgtggaccgctacctctccatcacctacttcaccaacacccccagcagcaggaagaagatggtacgccgtgtcgtctgcatcctggtgtggctgctggccttctgcgtgtctctgcctgacacctactacctgaagaccgtcacgtctgcgtccaacaatgagacctactgccggtccttctaccccgagcacagcatcaaggagtggctgatcggcatggagctggtctccgttgtcttgggctttgccgttcccttctccattatcgctgtcttctacttcctgctggccagagccatctcggcgtccagtgaccaggagaagcacagcagccggaagatcatcttctcctacgtggtggtcttccttgtctgctggctgccctaccacgtggcggtgctgctggacatcttctccatcctgcactacatccctttcacctgccggctggagcacgccctcttcacggccctgcatgtcacacagtgcctgtcgctggtgcactgctgcgtcaaccctgtcctctacagcttcatcaatcgcaactacaggtacgagctgatgaaggccttcatcttcaagtactcggccaaaacagggctcaccaagctcatcgatgcctccagagtctcagagacggagtactctgccttggagcagagcaccaaatgatctgccctggagaggctctgggacgggtttacttgtttttgaacagggtgatgggccctatggttttctagagcaaagcaaagtagcttcgggtcttgatgcttgagtagagtgaagaggggagcacgtgccccctgcatccattctctctttctcttgatgacgcagctgtcatttggctgtgcgtgctgacagttttgcaacaggcagagctgtgtcgcacagcagtgctgtgcgtcagagccagctgaggacaggcttgcctggacttctgtaagataggattttctgtgtttcctgaattttttatatggtgatttgtatttaaattttaagactttattttctcactattggtgtaccttataaatgtatttgaaagttaaatatattttaaatattgtttgggaggcatagtgctgacatatattcagagtgttgtagttttaaggttagcgtgacttcagttttgactaaggatgacactaattgttagctgttttgaaattatatatatataaatatatataaatatataaatatatgccagtcttggctgaaatgttttatttaccatagttttatatctgtgtggtgttttgtaccggcacgggatatggaacgaaaactgctttgtaatgcagtttgtgacattaatagtattgtaaagttacattttaaaataaacaaaaaactgttctggactgcaaatctgcacacacaacgaacagttgcatttcagagagttctctcaatttgtaagttatttttttttaataaagatttttgtttcctaaaaatgcatcaagtctcag

SEQ ID NO: 417593 - DNA, 1977 bp, Homo sapiens
cacagttgttgcaaagtgctcagcactaagggagccagcgcacagcacagccaggaaggcgagcgagcccagccagcccagccagcccagccagcccggaggtcatttgattgcccgcctcagaacgatggatctgcatctcttcgactactcagagccagggaacttctcggacatcagctggccatgcaacagcagcgactgcatcgtggtggacacggtgatgtgtcccaacatgcccaacggcatgattgccaactccgtggtggtctgggtgaatatccaggccaagaccacaggctatgacacgcactgctacatcttgaacctggccattgccgacctgtgggttgtcctcaccatcccagtctgggtggtcagtctcgtgcagcacaaccagtggcccatgggcgagctcacgtgcaaagtcacacacctcatcttctccatcaacctcttcggcagcattttcttcctcacgtgcatgagcgtggaccgctacctctccatcacctacttcaccaacacccccagcagcaggaagaagatggtacgccgtgtcgtctgcatcctggtgtggctgctggccttctgcgtgtctctgcctgacacctactacctgaagaccgtcacgtctgcgtccaacaatgagacctactgccggtccttctaccccgagcacagcatcaaggagtggctgatcggcatggagctggtctccgttgtcttgggctttgccgttcccttctccattatcgctgtcttctacttcctgctggccagagccatctcggcgtccagtgaccaggagaagcacagcagccggaagatcatcttctcctacgtggtggtcttccttgtctgctggctgccctaccacgtggcggtgctgctggacatcttctccatcctgcactacatccctttcacctgccggctggagcacgccctcttcacggccctgcatgtcacacagtgcctgtcgctggtgcactgctgcgtcaaccctgtcctctacagcttcatcaatcgcaactacaggtacgagctgatgaaggccttcatcttcaagtactcggccaaaacagggctcaccaagctcatcgatgcctccagagtctcagagacggagtactctgccttggagcagagcaccaaatgatctgccctggagaggctctgggacgggtttacttgtttttgaacagggtgatgggccctatggttttctagagcaaagcaaagtagcttcgggtcttgatgcttgagtagagtgaagaggggagcacgtgccccctgcatccattctctctttctcttgatgacgcagctgtcatttggctgtgcgtgctgacagttttgcaacaggcagagctgtgtcgcacagcagtgctgtgcgtcagagccagctgaggacaggcttgcctggacttctgtaagataggattttctgtgtttcctgaattttttatatggtgatttgtatttaaattttaagactttattttctcactattggtgtaccttataaatgtatttgaaagttaaatatattttaaatattgtttgggaggcatagtgctgacatatattcagagtgttgtagttttaaggttagcgtgacttcagttttgactaaggatgacactaattgttagctgttttgaaattatatatatataaatatatataaatatataaatatatgccagtcttggctgaaatgttttatttaccatagttttatatctgtgtggtgttttgtaccggcacgggatatggaacgaaaactgctttgtaatgcagtttgtgacattaatagtattgtaaagttacattttaaaataaacaaaaaactgttctggactgcaaatctgcacacacaacgaacagttgcatttcagagagttctctcaatttgtaagttatttttttttaataaagatttttgtttcctaaaaatgcatcaagtctcag

SEQ ID NO: 417594 - DNA, 1984 bp, Homo sapiens
gtgaccccggggccagaattctcgcaggcgcctgggccgggtgcccggccgtgcgtcatttgattgcccgcctcagaacgatggatctgcatctcttcgactactcagagccagggaacttctcggacatcagctggccatgcaacagcagcgactgcatcgtggtggacacggtgatgtgtcccaacatgcccaacaaaagcgtcctgctctacacgctctccttcatttacattttcatcttcgtcatcggcatgattgccaactccgtggtggtctgggtgaatatccaggccaagaccacaggctatgacacgcactgctacatcttgaacctggccattgccgacctgtgggttgtcctcaccatcccagtctgggtggtcagtctcgtgcagcacaaccagtggcccatgggcgagctcacgtgcaaagtcacacacctcatcttctccatcaacctcttcggcagcattttcttcctcacgtgcatgagcgtggaccgctacctctccatcacctacttcaccaacacccccagcagcaggaagaagatggtacgccgtgtcgtctgcatcctggtgtggctgctggccttctgcgtgtctctgcctgacacctactacctgaagaccgtcacgtctgcgtccaacaatgagacctactgccggtccttctaccccgagcacagcatcaaggagtggctgatcggcatggagctggtctccgttgtcttgggctttgccgttcccttctccattatcgctgtcttctacttcctgctggccagagccatctcggcgtccagtgaccaggagaagcacagcagccggaagatcatcttctcctacgtggtggtcttccttgtctgctggctgccctaccacgtggcggtgctgctggacatcttctccatcctgcactacatccctttcacctgccggctggagcacgccctcttcacggccctgcatgtcacacagtgcctgtcgctggtgcactgctgcgtcaaccctgtcctctacagcttcatcaatcgcaactacaggtacgagctgatgaaggccttcatcttcaagtactcggccaaaacagggctcaccaagctcatcgatgcctccagagtctcagagacggagtactctgccttggagcagagcaccaaatgatctgccctggagaggctctgggacgggtttacttgtttttgaacagggtgatgggccctatggttttctagagcaaagcaaagtagcttcgggtcttgatgcttgagtagagtgaagaggggagcacgtgccccctgcatccattctctctttctcttgatgacgcagctgtcatttggctgtgcgtgctgacagttttgcaacaggcagagctgtgtcgcacagcagtgctgtgcgtcagagccagctgaggacaggcttgcctggacttctgtaagataggattttctgtgtttcctgaattttttatatggtgatttgtatttaaattttaagactttattttctcactattggtgtaccttataaatgtatttgaaagttaaatatattttaaatattgtttgggaggcatagtgctgacatatattcagagtgttgtagttttaaggttagcgtgacttcagttttgactaaggatgacactaattgttagctgttttgaaattatatatatataaatatatataaatatataaatatatgccagtcttggctgaaatgttttatttaccatagttttatatctgtgtggtgttttgtaccggcacgggatatggaacgaaaactgctttgtaatgcagtttgtgacattaatagtattgtaaagttacattttaaaataaacaaaaaactgttctggactgcaaatctgcacacacaacgaacagttgcatttcagagagttctctcaatttgtaagttatttttttttaataaagatttttgtttcctaaaaatgcatcaagtctcag

SEQ ID NO: 417595 - DNA, 2240 bp, Homo sapiens
tgatttcacacactgggcacagccatgctggcggtgtcttgagaacacagccatgaaaagatggagaaagcaaacacagtttctgtcttggagcaccacatggatttagattcagagtatgatttattttgttttggagagttttattatgaattttttttctcccttctttgcaaagacattacagagctaaacccaaacagctgagcctatcagggccttggaaaagcatttttgcctgaaacttgagtttttcctaatgaagtgactttcctcttccatcttttttgtttgcttggttttctcataggtcatttgattgcccgcctcagaacgatggatctgcatctcttcgactactcagagccagggaacttctcggacatcagctggccatgcaacagcagcgactgcatcgtggtggacacggtgatgtgtcccaacatgcccaacaaaagcgtcctgctctacacgctctccttcatttacattttcatcttcgtcatcggcatgattgccaactccgtggtggtctgggtgaatatccaggccaagaccacaggctatgacacgcactgctacatcttgaacctggccattgccgacctgtgggttgtcctcaccatcccagtctgggtggtcagtctcgtgcagcacaaccagtggcccatgggcgagctcacgtgcaaagtcacacacctcatcttctccatcaacctcttcggcagcattttcttcctcacgtgcatgagcgtggaccgctacctctccatcacctacttcaccaacacccccagcagcaggaagaagatggtacgccgtgtcgtctgcatcctggtgtggctgctggccttctgcgtgtctctgcctgacacctactacctgaagaccgtcacgtctgcgtccaacaatgagacctactgccggtccttctaccccgagcacagcatcaaggagtggctgatcggcatggagctggtctccgttgtcttgggctttgccgttcccttctccattatcgctgtcttctacttcctgctggccagagccatctcggcgtccagtgaccaggagaagcacagcagccggaagatcatcttctcctacgtggtggtcttccttgtctgctggctgccctaccacgtggcggtgctgctggacatcttctccatcctgcactacatccctttcacctgccggctggagcacgccctcttcacggccctgcatgtcacacagtgcctgtcgctggtgcactgctgcgtcaaccctgtcctctacagcttcatcaatcgcaactacaggtacgagctgatgaaggccttcatcttcaagtactcggccaaaacagggctcaccaagctcatcgatgcctccagagtctcagagacggagtactctgccttggagcagagcaccaaatgatctgccctggagaggctctgggacgggtttacttgtttttgaacagggtgatgggccctatggttttctagagcaaagcaaagtagcttcgggtcttgatgcttgagtagagtgaagaggggagcacgtgccccctgcatccattctctctttctcttgatgacgcagctgtcatttggctgtgcgtgctgacagttttgcaacaggcagagctgtgtcgcacagcagtgctgtgcgtcagagccagctgaggacaggcttgcctggacttctgtaagataggattttctgtgtttcctgaattttttatatggtgatttgtatttaaattttaagactttattttctcactattggtgtaccttataaatgtatttgaaagttaaatatattttaaatattgtttgggaggcatagtgctgacatatattcagagtgttgtagttttaaggttagcgtgacttcagttttgactaaggatgacactaattgttagctgttttgaaattatatatatataaatatatataaatatataaatatatgccagtcttggctgaaatgttttatttaccatagttttatatctgtgtggtgttttgtaccggcacgggatatggaacgaaaactgctttgtaatgcagtttgtgacattaatagtattgtaaagttacattttaaaataaacaaaaaactgttctggactgcaaatctgcacacacaacgaacagttgcatttcagagagttctctcaatttgtaagttatttttttttaataaagatttttgtttcctaaaaatgcatcaagtctcag

SEQ ID NO: 417596 - DNA, 4350 bp, Homo sapiens
ggtttgtctttgtgtgtttgttctgaaggttcaagaagacgtggaagctgcgggctctgaaggaaggcaagacaagcatgcatccgccgtactctttggggcagctggtcccggagaggcctcgacccaccccagtgcttgttcctctcatctccccaccggtgtcccccagcagcctggggtctgacaatacctcgagccacaaccgaccagatgccagggacccacggagcccttatgacatcagcaatacagactacttcttccccagatagctggctgggtggcaccagcagcctggaccctgtggatgacaaaacacaaacgggctcagcaaaagatgcttctcactgccatgccagcttatctcaggggtgtgcggcctttggcttcacggaagagccttgcggaaggttctacgccaggggaaaatcagcctgctccagctgttcagctggttgaggtttcaaacctccctttccaaatgcccagcttaaaggggttagagtgaacttgggccactgtgaagagaaccatatcaagactctttggacactcacacggacactcaaaagctgggcaggttggtgggggcctcggtgtggagaagcggctggcagcccacccctcaacacctctgcacaagctgcaccctcaggcaggtgggatggatttccagccaaagcctcctccagccgccatgctcctggcccactgcatcgtttcatcttccaactcaaactcttaaaacccaagtgccttagcaaattctgtttttctaggcctggggacggcttttacttaaaccgccaaggctgggggaagaagctctctcctccctttcttccctacagttgaaaaacagctgagggtgagtgggtgaataatacagtatctcagggcctggtcgttttcaacagaattataattagttcctcattagcattttgctaaatgtgaatgatgatcctaggcatttgctgaatacagaggcaactgcattggctttgggttgcaggacctcaggtgagaagcagaggaaggagaggagaggggcacagggtctctaccatcccctgtagagtgggagctgagtgggggatcacagcctctgaaaaccaatgttctctcttctccacctcccacaaaggagagctagcagcagggagggcttctgccatttctgagatcaaaacggttttactgcagctttgtttgttgtcagctgaacctgggtaactagggaagataatattaaggaagacaatgtgaaaagaaaaatgagcctggcaagaatgcgtttaaacttggtttttaaaaaactgctgactgttttctcttgagagggtggaatatccaatattcgctgtgtcagcatagaagtaacttacttaggtgtgggggaagcaccataactttgtttagcccaaaaccaagtcaagtgaaaaaggaggaagagaaaaaatattttcctgccaggcatggtggcccacgcacttcgggaggtcgaggcaggaggatcacttgagtccagaagtttgagatcagcctgggcaatgtgataaaaccccatctctacaaaaagcataaaaattagccaagtgtggtagagtgtgcctgaagtcccagatacttggggggctgaggtgggaggatctcttgagcctgggaggtcaaggctgcagtgagccgagattgcaccactgcactccagcctgggtgacagagcaagtgagaccctgtctcaaaaaaagaaaaagaaaaagaaaaaatattttccctattagagaagagattgtggtttcattctgtattttgtttttgtcttaaaaagtggaaaaatagcctgcctcttctctactctagggaaaaaccagcgtgtgactactcccccaggtggttatggagagggtgtccggtccctgtcccagtgccgagaaggaagcctcccacgactgcccggcagggtcctagaaattccccaccctgaaagccctgagctttctgctatcaaagaggttttaaaaaaatcccatttaaaaaaaatcccttacctcggtgccttcctctttttatttagttccttgagttgattcagctctgcaagaattgaagcaggactaaatgtctagttgtaacaccatgattaaccacttcagctgacttttctgtccgagctttgaaaattcagtggtgttagtggttacccagttagctctcaagttatcagggtattccagagtggggatatgatttaaatcagccgtgtaaccatggacccaaaatttaccagaccacaaaacttttctaatactctaccctcttagaaaaaccaccaccatcaccagacaggtgcgaaaggatgaaagtgaccatgttttgtttacggttttccaggtttaagctgttactgtcttcagtaagccgtgattttcattgctgggcttgtctgtagattttagaccctattgctgcttgaggcaactcatcttaggttggcaaaaaggcaggatggccgggcgcggtggctcacgcctgtaatcctagcactttgggaggccaaggtgggaggattgcttgagctcaggagtttgagaccaacctgggtaacatagtgagacaccatctctattatgaacaataacagttaagaaaaaaaaaggcaggcaggcggttatggtggttccctcccatcccaccacataaagtttctgagacttgagaacagcaaaatgctgttaaagggaaatattaagaatgagaatctgcagtaagggtgattctgtgcccacagttcttcaattctttataccgttttacccacatgtggtgttaccaaagccgggcagaaccatgctagcggaagatgtgaaatccagatagctcattattgccaagagctaggcagctttgatctccaaattgttattgctttcatttttattgtaatggaattgctttgttttgtttttttgtttttgtattgaagagggttgttttccctttatttttcataagctaatgtaaatgaagaaaaaatgtcttctctgggctgtaggcctggctcagcgtacacaggtatacatcctaagctctctatgttctctaatctgtggtgactgaacatgtgtctcaatgcacggggcatttctacctgtgtttctgcagcacccccactgccttgagtccccagcagtgctgttatttgcctaacacctgtagccatctgccacgcagccagacgtgaaacgctgagacagagaccatttaggttaaatacgacagcttatcctgctgggtggggaaagtaaaaaatatgctggttcaaggcctaaagtaaaatgatcaataatgtttgtagcattaatgaaatattttcaagaaatgtgtccaggggtagcactggctatgttgacgaggcctttggtaactcagagagctcttggccctgatggggacttgcccttacgctttctttatcaggctctgagttcacacggagcctctggcacttccctgctgtcttgggagaaaggaaactggttgccgcggcaggttgtggaatctgttgctggaaccaggctggaagcccacctggtagtgaacagggcccagtggggcaggctgggcatgttgtggtctatgggtttgtttcctggagaatgttcaggaattgtcttcccagctgctttggtgctgagctctattatctcacagcacgtccagaaggctaacccaggtggggaggatgctgacaccagctccaggtggagttggtggtcttaatttggagatgcaggggcaacctgtgaccctttgaggcaagagccctgcacccagctgtcccgtgcagccgtgggcaggggctgcacacggaggggcaggcgggccagttcagggtccgtgccaggccctcctcagtgccctgtgaaggcctcctgtcctccgtgcggctgggcaccagcaccagggagtttctatggcaaccttagtgattattaaggaacactgtcagttttatgaacatatgctcaaatgaaattctactttaggaggaaaggattggaacagcatgtcacaaggctgttaattaacagagagaccttattggatggagatcacatctgttaaatagaatacctcaactctacgttgttttcttggagataaataatagtttcaagtttttgtttgtttgttttacctaattacctgaaagcaaataccaaaggctgatgtctgtatatggggcaaagggtcagtatatttttcagtgttttttttctaccagctattttgcatttaaagtgaacattgtgtttggaataaatactcttaaaaaataaaatt

SEQ ID NO: 417597 - DNA, 387 bp, Homo sapiens
ttttattggcaatctggtgtttttgtttgctttttttctgaatgagaaacaaaagaaatgaagagctagccatgtgttctctactctgtctcagtttgtatggctacttttccatccagagctcttgccttttggttctcaatttggttgcattcccatgaagaaaacctagtgtggcaggcagaaggatggcctcccacagatgtccacatcctgatccccagaacctctgactatgacactgtctgtggccagggaatcaagattgccaaacagctgacattaaaatagggaggtgattatagaactattcatgtggccaaaagtaaccacagaggcacttgtaagtggaagagggaggcagaacagactgtccgagctacgact

SEQ ID NO: 417598 - DNA, 374 bp, Homo sapiens
tgattaaaataatagagtttagtaatatggatgaatataagataaatatttaaaaagcagttgtatttttatagcccagcaagataaagttcaaatatgtattttttataaagatggatttacaataacatcaaaaattaaaatgcaccttgaaataataaagacatgtaaacccttttatgaagacagattttttaaagcatttttaaaaattctttttcattgacaaataattatccatatttatggggtacacagtaatgtttcaatacatataataaatagtgatcagatcagaataatcagcttatccatcatttcaaacacttatcatttctttgtgttaggaacattcaacatcctgcttctagcta

SEQ ID NO: 417599 - DNA, 522 bp, Homo sapiens
aatttccatggctaactagatttaaccagaatcccgccttccaggctcctgttcccttttattagctgctgaattttattcccttttcccaactccaggtccctcagttgtcttatatctaaatcctttgccaggtccccacaatcccagcacctgcctctgtgagctgcccccaggccctcaccttggccctggccagcctcctgtgctcctgctgtctgaaggactggcccctcccccactgctgaagccacacgtacagatcctaagcaacagggccttttgctgggacgtatgcctggattatggccaaccgggaagagagagatgtatcttaaaaagtggaggtggacttctcctacagctctgacggtaacttaaattgttgccagcttgaggcaagacaagggaatcatctagttaggggtaaccattaatttattttataaagaaaggaaatgctgaaagtcgtattagtactgagtttagttggagaatttagataagtaagtatcttttagg

SEQ ID NO: 417600 - DNA, 716 bp, Homo sapiens
  misc_feature (630)..(630): n is a, c, g, or t
  misc_feature (662)..(662): n is a, c, g, or t
  misc_feature (689)..(689): n is a, c, g, or t
tgtaaccagctgggagtcagcctgcaggacgctgtgagttggcgtgctagtgggatggcagatgaggaagaagaccccacgtttgaggaagaaaatgaagaaattggaggaggtgcagaaggtggacagggtaaaagaaagagacttttttctaaagaattgcgatgtatgatgtatggctttggggatgaccagaatccttatactgagtcagtggatattcttgaagatcttgtcatagagtttatcactgaaatgactcacaaggcaatgtcaattggaagacaaggtcgagtacaagttgaagatatcgtcttcttgattcgaaaggacccaaggaagtttgccagggttaaagacttgcttactatgaatgaagaattgaaacgagctagaaaagcatttgatgaagcaaattatggatcttgacactttttgtagtttccgaaaattaccatctggggaaaccatatataataattgtatattttctaaagtaagattctgatatctagccatgtaaatgaaagatggagaaacacaaagttttcagcctttatttttatgcctttgattttagggtgatattggtgcactccagcctgggcaatagagtgtgactctcaaaanaacaaagataatgaactggttggcatttcttntaaagagatgatagaggaaaatatagntttttggtaagaatggttatctctctt

SEQ ID NO: 417601 - DNA, 957 bp, Homo sapiens
  misc_feature (796)..(796): n is a, c, g, or t
  misc_feature (798)..(799): n is a, c, g, or t
  misc_feature (878)..(878): n is a, c, g, or t
  misc_feature (882)..(882): n is a, c, g, or t
  misc_feature (890)..(891): n is a, c, g, or t
  misc_feature (905)..(905): n is a, c, g, or t
  misc_feature (917)..(917): n is a, c, g, or t
  misc_feature (919)..(919): n is a, c, g, or t
  misc_feature (923)..(923): n is a, c, g, or t
tgtaaccagctgggagtcagcctgcaggacgctgtgagttggcgtgctagtgggatggcagatgaggaagaagaccccacgtttgaggaagaaaatgaagaaattggaggaggtgcagaaggtggacagggtaaaagaaagagacttttttctaaagaattgcgatgtatgatgtatggctttggggatgaccagaatccttatactgagtcagtggatattcttgaagatcttgtcatagagtttatcactgaaatgactcacaaggcaatgtcaattggaagacaaggtcgagtacaagttgaagatatcgtcttcttgattcgaaaggacccaaggaagtttgccagggttaaagacttgcttactatgaatgaagaattgaaacgagctagaaaagcatttgatgaagcaaattatggatcttgacactttttgtagtttccgaaaattaccatctggggaaaccatatataataattgtatattttctaaagtaagattctgatatctagccatgtaaatgaaagatggagaaacacaaagttttcagcctttatttttatgcctttgattttagggtgatattggtgcatgtaattgcctgcctttatattaccatacttgaattacttactgggttttaatgaccacacataagtcaaagtaccttgcaaaccatgccgttgttctgacttttgactatttaaaggataaagtagtatttaatgtgttaggtatgtttatgcccttgtaagctatactgtagctttttttttttttttttttgagatgnannctcactccagcctgggcgacagagcgagactccgtctcaaaaaaaaaaaagaaagcaagtttcacatgaataatgtgtntggnaaggcttnngattaaaatctttnggattataacancnggtnaagtttaggagaaccgtttcccagagagatcaag

SEQ ID NO: 417602 - DNA, 1329 bp, Homo sapiens
gggtcattaaaacccagtaagtaattcaagtatggtaatataaagacttgcttactatgaatgaagaattgaaacgagctagaaaagcatttgatgaagcaaattatggatcttgacactttttgtagtttccgaaaattaccatctggggaaaccatatataataattgtatattttctaaagtaagattctgatatctagccatgtaaatgaaagatggagaaacacaaagttttcagcctttatttttatgcctttgattttagggtgatattggtgcatgtaattgcctgcctttatattaccatacttgaattacttactgggttttaatgaccacacataagtcaaagtaccttgcaaaccatgccgttgttctgacttttgactatttaaaggataaagtagtatttaatgtgttaggtatgtttatgcccttgtaagctatactgtagctttttttttttttttttttgggaaaggggtctccattggcccccaagcgggggaaaagggggggcttttaaaaaacaaaagatatctggacagtgtgtgggattctttttaaaaggaggttggttagagggacacatattgcgtttgggaacaagtgtaaatctcttaaaagagatactccttaaattgttgagagaataacagggtatcatatctttaaaaaaacgaatacaaggggcagggaggacgggaccacagcccggtaaacaacgcaacttgggacgcccacagggggcgaacgaggaggcaggaaagaaacctcgtggaacggggaacccggtccattaaaataaaaatagcggcgggggagaggcccgtatcccaactgggggtgagcaacaggtaccgtagcgactaaagagaaacgcactctgcctgggaagaggcaaaaaaagccctatcacgtggggacactatctctcttccctctctctccccatgtagtcgatttattctttgttccccgaacgaacgacactcatactaaaccactcgcagacaagctaaagtaacaggagaaagaagaggaaagaagagaagcagagaaaggagaaaggggaagaaagagaaaaagaagagaggaaaagaagaaaagggaggaggcaggggagagacaaaaaaggagaaagaggagaaagaacgagcagggagaaaaagagaaagaacggaagactaaagaagaggaggaacgagcagagaagaaggagagagggaacgggaggagaggaagggaaagaaaggaagaaagaaaaaagagaagagaaggaaagagagagagagagagaaaaaagagagaaaggaaagacgagaga

SEQ ID NO: 417603 - DNA, 685 bp, Homo sapiens
  misc_feature (524)..(524): n is a, c, g, or t
  misc_feature (526)..(527): n is a, c, g, or t
  misc_feature (606)..(606): n is a, c, g, or t
  misc_feature (610)..(610): n is a, c, g, or t
  misc_feature (618)..(619): n is a, c, g, or t
  misc_feature (633)..(633): n is a, c, g, or t
  misc_feature (645)..(645): n is a, c, g, or t
  misc_feature (647)..(647): n is a, c, g, or t
  misc_feature (651)..(651): n is a, c, g, or t
tgtaaccagctgggagtcagcctgcaggacgctgtgagttggcgtgctagtgggatggcagatgaggaagaagaccccacgtttgaggaagaaaatgaagaaattggaggaggtgcagaaggtggacagggtaaaagaaagagacttttttctaaagaattgcgatgtatgatgtatggctttggggatgaccagaatccttatactgagtcagtggatattcttgaagatcttgtcatagagtttatcactgaaatgactcacaaggcaatgtcaattggaagacaaggtcgagtacaagttgaagatatcgtcttcttgattcgaaaggacccaaggaagtttgccagggttaaagacttgcttactatgaatgaagaattgaaacgagctagaaaagcatttgatgaagcaaattatggatcttgacactttttgtagtttccgaaaattaccatctggggaaaccatatataataattgtatattttctaaagtaagattctgatatctagccgagatgnannctcactccagcctgggcgacagagcgagactccgtctcaaaaaaaaaaaagaaagcaagtttcacatgaataatgtgtntggnaaggcttnngattaaaatctttnggattataacancnggtnaagtttaggagaaccgtttcccagagagatcaag

SEQ ID NO: 417604 - DNA, 1642 bp, Homo sapiens
tgtaaccagctgggagtcagcctgcaggacgctgtgagttggcgtgctagtgggatggcagatgaggaagaagaccccacgtttgaggaagaaaatgaagaaattggaggaggtgcagaaggtggacagggtaaaagaaagagacttttttctaaagaattgcgatgtatgatgtatggctttggggatgaccagaatccttatactgagtcagtggatattcttgaagatcttgtcatagagtttatcactgaaatgactcacaaggcaatgtcaattggaagacaaggtcgagtacaagttgaagatatcgtcttcttgattcgaaaggacccaaggaagtttgccagggttaaagacttgcttactatgaatgaagaattgaaacgagctagaaaagcatttgatgaagcaaattatggatcttgacactttttgtagtttccgaaaattaccatctggggaaaccatatataataattgtatattttctaaagtaagattctgatatctagccatgtaaatgaaagatggagaaacacaaagttttcagcctttatttttatgcctttgattttagggtgatattggtgcatgtaattgcctgcctttatattaccatacttgaattacttactgggttttaatgaccacacataagtcaaagtaccttgcaaaccatgccgttgttctgacttttgactatttaaaggataaagtagtatttaatgtgttaggtatgtttatgcccttgtaagctatactgtagctttttttttttttttttttgggaaaggggtctccattggcccccaagcgggggaaaagggggggcttttaaaaaacaaaagatatctggacagtgtgtgggattctttttaaaaggaggttggttagagggacacatattgcgtttgggaacaagtgtaaatctcttaaaagagatactccttaaattgttgagagaataacagggtatcatatctttaaaaaaacgaatacaaggggcagggaggacgggaccacagcccggtaaacaacgcaacttgggacgcccacagggggcgaacgaggaggcaggaaagaaacctcgtggaacggggaacccggtccattaaaataaaaatagcggcgggggagaggcccgtatcccaactgggggtgagcaacaggtaccgtagcgactaaagagaaacgcactctgcctgggaagaggcaaaaaaagccctatcacgtggggacactatctctcttccctctctctccccatgtagtcgatttattctttgttccccgaacgaacgacactcatactaaaccactcgcagacaagctaaagtaacaggagaaagaagaggaaagaagagaagcagagaaaggagaaaggggaagaaagagaaaaagaagagaggaaaagaagaaaagggaggaggcaggggagagacaaaaaaggagaaagaggagaaagaacgagcagggagaaaaagagaaagaacggaagactaaagaagaggaggaacgagcagagaagaaggagagagggaacgggaggagaggaagggaaagaaaggaagaaagaaaaaagagaagagaaggaaagagagagagagagagaaaaaagagagaaaggaaagacgagaga

SEQ ID NO: 417605 - DNA, 1671 bp, Homo sapiens
cacccctgctacacaccgcctccatacctttgaccggcctatggctgtactcggattgcattctcagcctccacttcaagcctgcgttccctggggaggtcattcaaccctagatccaccatatgtcatgcccaaccaatctcagttactttgcgagttcacctccatcctgagtggacgctcaagcaagactgctggagctgcagatctgggaggttcgctgcaccaccttgatgctcagtatgtacttttgaaaatataccggattgttgagatttgagaaaatctcataaagctgctgaaaagaactggccagagccgtgtgatttgagaggcggctgacgtaaggttagtgcgcggcccaggatgcccgcctggcccggggtgaatggcgctgtcgtcgcggtggtcgcgtaggcttcgcgccaggtctcgccccggatttaccctgcgaccccggccctccgcgcgcgccgcagccgccctcggttgctattggttgctcgtcctgtttgtcggcgcttctcgaagaagggggcgaagacgtgattgaatgtgtcggtgctcattagttcttctgtcagtcgatcacgaggtgccgttttcttcatttttcattggctggcggactgaggggcgggcttggcgcgccggtcgcccagacatggcggacggcagcggctggcagccgccgcgcccctgcgaggcctaccgcgccgagtggaagctctgccgcagcgccaggcacttcctacaccactactacgtccacggcgagcggccggcctgcgaacagtggcagcgcgacctggccagctgccgcgactgggaggagcgccggaacgccgaggcccaggtgctaagtgtggtggctcacacctgtaatctcagctacttgggaggctgaggcagaagaatcacttgaggataggagtttgaggttgcagtcagctatgatcgtgccactgcactccagcctgggcaacagagcaagaccccatctctaaataaatgttttaaaaataaaaataaatgttttggataaaaccccatattaataataagtattttacattattatctggcatagactgttatatatagcatattattgttgaaatacaaaacaatatgtatccgtactgtatgtgatatagtgccattttcagtaactgctgtacacacagcaactcagatgaaactcaaggaaattcttcagagcaaaaacagccaatcttgaaaacatacatgtagcaggattccatttatgtaacattggtgaaataatgtaattatagagatggaaaacagattaaaggttaccaggggtttaggttagggatggtgagggggtggttcatacgagggagtcctgtggtgttgaaaaccatctgtcagcctgactggtggttacacagggctatacatgaagttaaaattgtgtagagttaggtacacaaaggagtacagatgtaactggggaaactgagtatgttctgtagactgtaccaatgtcaatttctgcgtcctgatgctgtgctgtagtgtataaggtgttaacattgggggaggctggggcaagggtacccaggacctccctagacaacctcctatgcaacctcctgtgaatctataattacttcaaaataaaaagttgaaaacaaaaaaaag

SEQ ID NO: 417606 - DNA, 1070 bp, Homo sapiens
gccacttataatctcttaggcatagtaataactaatacattttttattgtgtttgatctaattcataaaatattttagggaagaccagaacatataaaaaacatttttacaggaattcctggttgtttcatgaaagggccgtatattcaaagtgacctccaaatacagaaggagctgagaaactaaagaatgaaggagacaaatccagcttgtcagcaaaaggtgatttattagggaacttacggacagaagcatggtcttggacagcagcaagacaggtaaatctctgtgctgttaccctcccagactaaggtggttttgacctaagggcaggtaggtaagtatgtgctctgatacaatttgggtgttgtcctctctaaatctcatgttgaattgtgatctctaaataaatgttttaaaaataaaaataaatgttttggataaaaccccatattaataataagtattttacattattatctggcatagactgttatatatagcatattattgttgaaatacaaaacaatatgtatccgtactgtatgtgatatagtgccattttcagtaactgctgtacacacagcaactcagatgaaactcaaggaaattcttcagagcaaaaacagccaatcttgaaaacatacatgtagcaggattccatttatgtaacattggtgaaataatgtaattatagagatggaaaacagattaaaggttaccaggggtttaggttagggatggtgagggggtggttcatacgagggagtcctgtggtgttgaaaaccatctgtcagcctgactggtggttacacagggctatacatgaagttaaaattgtgtagagttaggtacacaaaggagtacagatgtaactggggaaactgagtatgttctgtagactgtaccaatgtcaatttctgcgtcctgatgctgtgctgtagtgtataaggtgttaacattgggggaggctggggcaagggtacccaggacctccctagacaacctcctatgcaacctcctgtgaatctataattacttcaaaataaaaagttgaaaacaaaaaaaag

SEQ ID NO: 417607 - DNA, 865 bp, Homo sapiens
agaaaacaaatactgtaataagagcaatatctttcaaactttttggacaggtgctaagtgtggtggctcacacctgtaatctcagctacttgggaggctgaggcagaagaatcacttgaggataggagtttgaggttgcagtcagctatgatcgtgccactgcactccagcctgggcaacagagcaagaccccatctctaaataaatgttttaaaaataaaaataaatgttttggataaaaccccatattaataataagtattttacattattatctggcatagactgttatatatagcatattattgttgaaatacaaaacaatatgtatccgtactgtatgtgatatagtgccattttcagtaactgctgtacacacagcaactcagatgaaactcaaggaaattcttcagagcaaaaacagccaatcttgaaaacatacatgtagcaggattccatttatgtaacattggtgaaataatgtaattatagagatggaaaacagattaaaggttaccaggggtttaggttagggatggtgagggggtggttcatacgagggagtcctgtggtgttgaaaaccatctgtcagcctgactggtggttacacagggctatacatgaagttaaaattgtgtagagttaggtacacaaaggagtacagatgtaactggggaaactgagtatgttctgtagactgtaccaatgtcaatttctgcgtcctgatgctgtgctgtagtgtataaggtgttaacattgggggaggctggggcaagggtacccaggacctccctagacaacctcctatgcaacctcctgtgaatctataattacttcaaaataaaaagttgaaaacaaaaaaaag

SEQ ID NO: 417608 - DNA, 2469 bp, Homo sapiens
cacccctgctacacaccgcctccatacctttgaccggcctatggctgtactcggattgcattctcagcctccacttcaagcctgcgttccctggggaggtcattcaaccctagatccaccatatgtcatgcccaaccaatctcagttactttgcgagttcacctccatcctgagtggacgctcaagcaagactgctggagctgcagatctgggaggttcgctgcaccaccttgatgctcagtatgtacttttgaaaatataccggattgttgagatttgagaaaatctcataaagctgctgaaaagaactggccagagccgtgtgatttgagaggcggctgacgtaaggttagtgcgcggcccaggatgcccgcctggcccggggtgaatggcgctgtcgtcgcggtggtcgcgtaggcttcgcgccaggtctcgccccggatttaccctgcgaccccggccctccgcgcgcgccgcagccgccctcggttgctattggttgctcgtcctgtttgtcggcgcttctcgaagaagggggcgaagacgtgattgaatgtgtcggtgctcattagttcttctgtcagtcgatcacgaggtgccgttttcttcatttttcattggctggcggactgaggggcgggcttggcgcgccggtcgcccagacatggcggacggcagcggctggcagccgccgcgcccctgcgaggcctaccgcgccgagtggaagctctgccgcagcgccaggcacttcctacaccactactacgtccacggcgagcggccggcctgcgaacagtggcagcgcgacctggccagctgccgcgactgggaggagcgccggaacgccgaggcccagcaatccctctgtgagagcgagcgggcacgagtccgggctgcacggaagcacatcctggtgtgggccccgaggcagagcccccctccagactggcatctccctctgccacaggagaaggacgagtgacaagcatccctgccattggcctgtgcagcttcctcagtctgtttcaagttgctgttgcacagccctggggactgtgaccagcctacacagtctggtgggtccctgtgagctcttgctcacaggaacatggagcaggacattgctagccctacttgcccacccctcacctgcatgcaggataccctgacactgcgatgttctgcaggacaattgcaccgctttagagcttccaggaggccaagcattatggcaggtacttgtgagcagccaggtcaggctgggcatggtagcataggagatggtggtcctgaggtctaggcttctcaggtaaactgaagggtagccctgacctgtgtggacacacaggtgggtcataatgaggtagctaaacggttgtgccactgtgaatgtctttcctagtccttgggaaactgcctgccacgtcccaggtttggtgagcattgtgagtgctcacactctgctccactcgctcagttccactgcacatgcaggcaggtgtgccgagcaggtagggcttgctggcccctctgcaccagcaggcttcacttcttaggctcccaggtcggcccctggagactctggtttttaagaaatgcacacagctacagaacacacaaccttgcataaagagggtttgtggactcagctgaagaaatccaagtccaagacatatggaattaagcactccttccctcaaaatttcccctggtggttaatgtatcaaaagccatttcatctgatttcaaatagaagctgaaaattaagttcacacttgttagattttgtgtgtaacagtgttgtacctggacagtattagaaatttgtatgcttattctcttgttaagtgttttaaaatgtatgaaccaccaaaaacactatttcttgaagaggtctgtttattactaatagaatggtttctcatcctatggtggccctgttgtgtgatgctgagggctaggctgggtctgtgcccagcaccctccctgctctcttcctggacacaggcagcaagttgaatatcttttaatttgttctttggggcagaataatctatcacgttagaagggtgtccattaaagaacagtatttccctgcttgagtgtgttttctcctgtgctccctaagagcccctgtgtctgtgaacagtgggggtgggggtgggggttgtgctcacgggatcccaagagcaggagcatctaaagaggagccagcgttcccccatcatcaggggagtactgatgtgtctaaggcaaccagggtgcctccagcatggctgtggctggtttaataatgagcatttccacccagtgagggaagagaggaagactgctagagatctacaaggtttttcttactcttaaacacagggacggggcatctgaatttgcagtctgctgtaatcccagcactttgggaggccaaggtgggtggatcacttgaggtctggagtttgagaccagcctggc

SEQ ID NO: 417609 - DNA, 1535 bp, Homo sapiens
cacccctgctacacaccgcctccatacctttgaccggcctatggctgtactcggattgcattctcagcctccacttcaagcctgcgttccctggggaggtcattcaaccctagatccaccatatgtcatgcccaaccaatctcagttactttgcgagttcacctccatcctgagtggacgctcaagcaagactgctggagctgcagatctgggaggttcgctgcaccaccttgatgctcagtatgtacttttgaaaatataccggattgttgagatttgagaaaatctcataaagctgctgaaaagaactggccagagccgtgtgatttgagaggcggctgacgtaaggttagtgcgcggcccaggatgcccgcctggcccggggtgaatggcgctgtcgtcgcggtggtcgcgtaggcttcgcgccaggtctcgccccggatttaccctgcgaccccggccctccgcgcgcgccgcagccgccctcggttgctattggttgctcgtcctgtttgtcggcgcttctcgaagaagggggcgaagacgtgattgaatgtgtcggtgctcattagttcttctgtcagtcgatcacgaggtgccgttttcttcatttttcattggctggcggactgaggggcgggcttggcgcgccggtcgcccagacatggcggacggcagcggctggcagccgccgcgcccctgcgaggcctaccgcgccgagtggaagctctgccgcagcgccaggcacttcctacaccactactacgtccacggcgagcggccggcctgcgaacagtggcagcgcgacctggccagctgccgcgactgggaggagcgccggaacgccgaggcccaggtgctaagtgtggtggctcacacctgtaatctcagctacttgggaggctgaggcagaagaatcacttgaggataggagtttgaggttgcagtcagctatgatcgtgccactgcactccagcctgggcaacagagcaagaccccatctctaaataaatgttttaaaaataaaaataaatgttttggataaaaccccatattaataataagtattttacattattatctggcatagactgttatatatagcatattattgttgaaatacaaaacaatatgtatccgtactgtatgtgatatagtgccattttcagtaactgctgtacacacagcaactcagatgaaactcaaggaaattcttcagagcaaaaacagccaatcttgaaaacatacatgtagcaggattccatttatgtaacattggtgaaataatgtaattatagagatggaaaacagattaaaggttaccaggggtttaggttagggatggtgagggggtcccaagctgattcccgcactgaaagccctgtctgctggcgacattgacgagatggaggagcgcatggaaaaacggtagctgcctcaggtgctggccgacctactgttcagggaacttgcaagcggcctgtacgatggggagccttaacagaagcaggcccactcagaggagccccaggccc

SEQ ID NO: 417610 - DNA, 1790 bp, Homo sapiens
cacccctgctacacaccgcctccatacctttgaccggcctatggctgtactcggattgcattctcagcctccacttcaagcctgcgttccctggggaggtcattcaaccctagatccaccatatgtcatgcccaaccaatctcagttactttgcgagttcacctccatcctgagtggacgctcaagcaagactgctggagctgcagatctgggaggttcgctgcaccaccttgatgctcagtatgtacttttgaaaatataccggattgttgagatttgagaaaatctcataaagctgctgaaaagaactggccagagccgtgtgatttgagaggcggctgacgtaaggttagtgcgcggcccaggatgcccgcctggcccggggtgaatggcgctgtcgtcgcggtggtcgcgtaggcttcgcgccaggtctcgccccggatttaccctgcgaccccggccctccgcgcgcgccgcagccgccctcggttgctattggttgctcgtcctgtttgtcggcgcttctcgaagaagggggcgaagacgtgattgaatgtgtcggtgctcattagttcttctgtcagtcgatcacgaggtgccgttttcttcatttttcattggctggcggactgaggggcgggcttggcgcgccggtcgcccagacatggcggacggcagcggctggcaggtgagtgtgctgggtcggagccgggaaccaccggggtcttccggagggagggaacgggactggctcggggcgtagggcgcggccgccgggccccgctcaggcgccgcctctcgccgcagccgccgcgcccctgcgaggcctaccgcgccgagtggaagctctgccgcagcgccaggcacttcctacaccactactacgtccacggcgagcggccggcctgcgaacagtggcagcgcgacctggccagctgccgcgactgggaggagcgccggaacgccgaggcccaggtgctaagtgtggtggctcacacctgtaatctcagctacttgggaggctgaggcagaagaatcacttgaggataggagtttgaggttgcagtcagctatgatcgtgccactgcactccagcctgggcaacagagcaagaccccatctctaaataaatgttttaaaaataaaaataaatgttttggataaaaccccatattaataataagtattttacattattatctggcatagactgttatatatagcatattattgttgaaatacaaaacaatatgtatccgtactgtatgtgatatagtgccattttcagtaactgctgtacacacagcaactcagatgaaactcaaggaaattcttcagagcaaaaacagccaatcttgaaaacatacatgtagcaggattccatttatgtaacattggtgaaataatgtaattatagagatggaaaacagattaaaggttaccaggggtttaggttagggatggtgagggggtggttcatacgagggagtcctgtggtgttgaaaaccatctgtcagcctgactggtggttacacagggctatacatgaagttaaaattgtgtagagttaggtacacaaaggagtacagatgtaactggggaaactgagtatgttctgtagactgtaccaatgtcaatttctgcgtcctgatgctgtgctgtagtgtataaggtgttaacattgggggaggctggggcaagggtacccaggacctccctagacaacctcctatgcaacctcctgtgaatctataattacttcaaaataaaaagttgaaaacaaaaaaaag

SEQ ID NO: 417611 - DNA, 2588 bp, Homo sapiens
cacccctgctacacaccgcctccatacctttgaccggcctatggctgtactcggattgcattctcagcctccacttcaagcctgcgttccctggggaggtcattcaaccctagatccaccatatgtcatgcccaaccaatctcagttactttgcgagttcacctccatcctgagtggacgctcaagcaagactgctggagctgcagatctgggaggttcgctgcaccaccttgatgctcagtatgtacttttgaaaatataccggattgttgagatttgagaaaatctcataaagctgctgaaaagaactggccagagccgtgtgatttgagaggcggctgacgtaaggttagtgcgcggcccaggatgcccgcctggcccggggtgaatggcgctgtcgtcgcggtggtcgcgtaggcttcgcgccaggtctcgccccggatttaccctgcgaccccggccctccgcgcgcgccgcagccgccctcggttgctattggttgctcgtcctgtttgtcggcgcttctcgaagaagggggcgaagacgtgattgaatgtgtcggtgctcattagttcttctgtcagtcgatcacgaggtgccgttttcttcatttttcattggctggcggactgaggggcgggcttggcgcgccggtcgcccagacatggcggacggcagcggctggcaggtgagtgtgctgggtcggagccgggaaccaccggggtcttccggagggagggaacgggactggctcggggcgtagggcgcggccgccgggccccgctcaggcgccgcctctcgccgcagccgccgcgcccctgcgaggcctaccgcgccgagtggaagctctgccgcagcgccaggcacttcctacaccactactacgtccacggcgagcggccggcctgcgaacagtggcagcgcgacctggccagctgccgcgactgggaggagcgccggaacgccgaggcccagcaatccctctgtgagagcgagcgggcacgagtccgggctgcacggaagcacatcctggtgtgggccccgaggcagagcccccctccagactggcatctccctctgccacaggagaaggacgagtgacaagcatccctgccattggcctgtgcagcttcctcagtctgtttcaagttgctgttgcacagccctggggactgtgaccagcctacacagtctggtgggtccctgtgagctcttgctcacaggaacatggagcaggacattgctagccctacttgcccacccctcacctgcatgcaggataccctgacactgcgatgttctgcaggacaattgcaccgctttagagcttccaggaggccaagcattatggcaggtacttgtgagcagccaggtcaggctgggcatggtagcataggagatggtggtcctgaggtctaggcttctcaggtaaactgaagggtagccctgacctgtgtggacacacaggtgggtcataatgaggtagctaaacggttgtgccactgtgaatgtctttcctagtccttgggaaactgcctgccacgtcccaggtttggtgagcattgtgagtgctcacactctgctccactcgctcagttccactgcacatgcaggcaggtgtgccgagcaggtagggcttgctggcccctctgcaccagcaggcttcacttcttaggctcccaggtcggcccctggagactctggtttttaagaaatgcacacagctacagaacacacaaccttgcataaagagggtttgtggactcagctgaagaaatccaagtccaagacatatggaattaagcactccttccctcaaaatttcccctggtggttaatgtatcaaaagccatttcatctgatttcaaatagaagctgaaaattaagttcacacttgttagattttgtgtgtaacagtgttgtacctggacagtattagaaatttgtatgcttattctcttgttaagtgttttaaaatgtatgaaccaccaaaaacactatttcttgaagaggtctgtttattactaatagaatggtttctcatcctatggtggccctgttgtgtgatgctgagggctaggctgggtctgtgcccagcaccctccctgctctcttcctggacacaggcagcaagttgaatatcttttaatttgttctttggggcagaataatctatcacgttagaagggtgtccattaaagaacagtatttccctgcttgagtgtgttttctcctgtgctccctaagagcccctgtgtctgtgaacagtgggggtgggggtgggggttgtgctcacgggatcccaagagcaggagcatctaaagaggagccagcgttcccccatcatcaggggagtactgatgtgtctaaggcaaccagggtgcctccagcatggctgtggctggtttaataatgagcatttccacccagtgagggaagagaggaagactgctagagatctacaaggtttttcttactcttaaacacagggacggggcatctgaatttgcagtctgctgtaatcccagcactttgggaggccaaggtgggtggatcacttgaggtctggagtttgagaccagcctggc

SEQ ID NO: 417612 - DNA, 756 bp, Homo sapiens
gttattctggagacgactctcttaatcctccaccggtacaagaaggaacaagctataaatcgggctggaattgttcaagaggatgtgcagccaccagggttaaaagtgtggtctgatccatttggcaggaaatgagagggctgtcatcagctctgattaagaaaggagatttcttcatgctttcgattctgcatggggtacagccagtcacctcaccagagaatgacggctggagaagaaaactctgtaataccataaataagagtgcttgtaataaaagactgtgcacaaggattaatatttcccttcttaagtatcaaaagaactctggaacaaattataccattaggaaggttttcatgattcagttgattttccaaaaatgaagctatctcacccagctgggtttggaggagcaatctgcttattattctgtcgttaccacttactcaagcgagctgtgatatgaatacaagcaaccagtgggctcgggaaggtccgggtctcttctgccatcttccagataagagatttcagtaaaaaactgccatgctgagctgccttatagagctcttcgaaaatgttcgagttgataaagctctttgaggacaaggtacttcgtgcacctcatgctgaagattgcaccatgttggaaaataaatatgaagcaagtcaaactagatgcatacacttgtgtagaaatcaataatcaattaatagaagtgaaaaaatagacattaaaatgatttatttcta

SEQ ID NO: 417613 - DNA, 951 bp, Homo sapiens
agaactagtggatccccctttctgcaggaattcggcacgaggcggggtcacggcccggccgtcggtaacctggtttccgagagtgccgggcggtcggcgggtcagggcagcccggggcctgacgccatgtcccggaacctgcgcaccgcgctcattttcggcggcttcatctccctgatcggcgccgccttctatcccatctacttccggcccctaatgagattggaggagtacaagaaggaacaagctataaatcgggctggaattgttcaagaggatgtgcagccaccagggttaaaagtgtggtctgatccatttggcaggaaatgagagggctgtcatcagctctgattaagaaaggagatttcttcatgctttcgattctgcatggggtacagccagtcacctcaccagagaatgacggctggagaagaaaactctgtaataccataaataagagtgcttgtaataaaagactgtgcacaaggattaatatttcccttcttaagtatcaaaagaactctggaacaaattataccattaggaaggttttcatgattcagttgattttccaaaaatgaagctatctcacccagctgggtttggaggagcaatctgcttattattctgtcgttaccacttactcaagcgagctgtgatatgaatacaagcaaccagtgggctcgggaaggtccgggtctcttctgccatcttccagataagagatttcagtaaaaaactgccatgctgagctgccttatagagctcttcgaaaatgttcgagttgataaagctctttgaggacaaggtacttcgtgcacctcatgctgaagattgcaccatgttggaaaataaatatgaagcaagtcaaactagatgcatacacttgtgtagaaatcaataatcaattaatagaagtgaaaaaatagacattaaaatgatttatttcta

SEQ ID NO: 417614 - DNA, 736 bp, Homo sapiens
ctcgaggccaagatttcggcagaaggaacaagctataaatcgggctggaattgttcaagaggatgtgcagccaccagggttaaaagtgtggtctgatccatttggcaggaaatgagagggctgtcatcagctctgattaagaaaggagatttcttcatgctttcgattctgcatggggtacagccagtcacctcaccagagaatgacggctggagaagaaaactctgtaataccataaataagagtgcttgtaataaaagactgtgcacaaggattaatatttcccttcttaagtatcaaaagaactctggaacaaattataccattaggaaggttttcatgattcagttgattttccaaaaatgaagctatctcacccagctgggtttggaggagcaatctgcttattattctgtcgttaccacttactcaagcgagctgtgatatgaatacaagcaaccagtgggctcgggaaggtccgggtctcttctgccatcttccagataagagatttcagtaaaaaactgccatgctgagctgccttatagagctcttcgaaaatgttcgagttgataaagctctttgaggacaaggtacttcgtgcacctcatgctgaagattgcaccatgttggaaaataaatatgaagcaagtcaaactagatgcatacacttgtgtagaaatcaataatcaattaatagaagtgaaaaaatagacattaaaatgatttatttcta

SEQ ID NO: 417615 - DNA, 814 bp, Homo sapiens
gttttctaattgtcccatgtcattggcccatgtaaatacaaatatttctctctccccgccccccttctaaagaatgatttttctcttatgtttctcagagaaggaacaagctataaatcgggctggaattgttcaagaggatgtgcagccaccagggttaaaagtgtggtctgatccatttggcaggaaatgagagggctgtcatcagctctgattaagaaaggagatttcttcatgctttcgattctgcatggggtacagccagtcacctcaccagagaatgacggctggagaagaaaactctgtaataccataaataagagtgcttgtaataaaagactgtgcacaaggattaatatttcccttcttaagtatcaaaagaactctggaacaaattataccattaggaaggttttcatgattcagttgattttccaaaaatgaagctatctcacccagctgggtttggaggagcaatctgcttattattctgtcgttaccacttactcaagcgagctgtgatatgaatacaagcaaccagtgggctcgggaaggtccgggtctcttctgccatcttccagataagagatttcagtaaaaaactgccatgctgagctgccttatagagctcttcgaaaatgttcgagttgataaagctctttgaggacaaggtacttcgtgcacctcatgctgaagattgcaccatgttggaaaataaatatgaagcaagtcaaactagatgcatacacttgtgtagaaatcaataatcaattaatagaagtgaaaaaatagacattaaaatgatttatttcta

SEQ ID NO: 417616 - DNA, 1005 bp, Homo sapiens
agcgaaagcctctccacctcttccgagcggggtcacggcccggccgtcggtaacctggtttccgagagtgccgggcggtcggcgggtcagggcagcccggggcctgacgccatgtcccggaacctgcgcaccgcgctcattttcggcggcttcatctccctgatcggcgccgccttctatcccatctacttccggcccctaatgagattggaggagtacaagaaggaacaagctataaatcgggctggaattgttcaagaggatgtgcagccaccagggttaaaagtgtggtctgatccatttggcaggaaatgagagggctgtcatcagctctgattaagaaaggagatttcttcatgctttcgattctgcatggggtacagccagtcacctcaccagagaatgacggctggagaagaaaactctgtaataccataaataagagtgcttgtaataaaagactgtgcacaaggattaatatttcccttcttaagtatcaaaagaactctggaacaaattataccattaggaaggttttcatgattcagttgattttccaaaaatgaagctatctcacccagctgggtttggaggagcaatctgcttattattctgtcgttaccacttactcaagcgagctgtgatatgaatacaagcaaccagtgggctcgggaaggtccgggtctcttctgccatcttccagataagagatttcagtaaaaaactgccatgctgagctgccttatagagctcttcgaaaatgttcgagttgataaagctctttgaggacaaggtacttcgtgcacctcatgctgaagattgcaccatgttggaaaataaatatgaagcaagtcaaactagatgcatacacttgtgtagaaatcaataatcaattaatagaagtgaaaaaatagacattaaaatgatttatttctactttgcagtggtgtctttttgtaaatcatcttttgtaaagcaattaaaattatagtgccgagaagtaca

SEQ ID NO: 417617 - DNA, 510 bp, Homo sapiens
agcgaaagcctctccacctcttccgagcggggtcacggcccggccgtcggtaacctggtttccgagagtgccgggcggtcggcgggtcagggcagcccggggcctgacgccatgtcccggaacctgcgcaccgcgctcattttcggcggcttcatctccctgatcggcgccgccttctatcccatctacttccggcccctaatgagattggaggagtacaagaaggaacaagctataaatcgggctggaattgttcaagaggatgtgcagccaccagggttaaaagtgtggtctgatccatttggcaggaaatgagagggctgtcatcagctctgattaagaaaggagatttcttcatgctttcgattctgcatggggtacagccagtcacctcaccagagaatgacggctggagaagaaaactctgtaataccataaataagagtgcttgtaataaatatgatgcggccgcattccttttattgtgactgattgtgcaggacacttaat

SEQ ID NO: 417618 - DNA, 445 bp, Homo sapiens
agaaggaacaagctataaatcgggctggaattgttcaagaggatgtgcagccaccaggtaaactgaaaaaaaaaaatcaaaaccaaatcttatttgtactactgtgttgtgcgggtttgtgtgtgtttgccttggcctggagagtgggaaaatgccttttagcttagagacaagattgtgattttgctatttatttctcaacagttgccatttatagatgccacccaaggcgtcattctaatatttcactccagaatactttttgcacgtttgccaggttcctcttttccattttataagtgggcataaaaatgttaacaagtgcgtgattcgatatgagacgtgaatagctgtttggcagacttatttaccaagcacctatttaaacactcccctcatgggaaaatagtgtttacttgttagctgtttgaattgatgtggggtt

SEQ ID NO: 417619 - DNA, 430 bp, Homo sapiens
tctggaacaaattataccattaggaaggttttcatgattcagttgattttccaaaaatgaagctatctcacccagctgggtttggaggagcaatctgcttattattctgtcgttaccacttactcaagcgagctgtgatatgaatacaagcaaccagtgggctcgggaaggtccgggtctcttctgccatcttccagataagagatttcagtaaaaaactgccatgctgagctgccttatagagctcttcgaaaatgttcgagttgataaagctctttgaggacaaggtacttcgtgcacctcatgctgaagattgcaccatgttggaaaataaatatgaagcaagtcaaactagatgcatacacttgtgtagaaatcaataatcaattaatagaagtgaaaaaatagacattaaaatgatttatttcta

SEQ ID NO: 417620 - DNA, 936 bp, Homo sapiens
agcgaaagcctctccacctcttccgagcggggtcacggcccggccgtcggtaacctggtttccgagagtgccgggcggtcggcgggtcagggcagcccggggcctgacgccatgtcccggaacctgcgcaccgcgctcattttcggcggcttcatctccctgatcggcgccgccttctatcccatctacttccggcccctaatgagattggaggagtacaagaaggaacaagctataaatcgggctggaattgttcaagaggatgtgcagccaccagggttaaaagtgtggtctgatccatttggcaggaaatgagagggctgtcatcagctctgattaagaaaggagatttcttcatgctttcgattctgcatggggtacagccagtcacctcaccagagaatgacggctggagaagaaaactctgtaataccataaataagagtgcttgtaataaaagactgtgcacaaggattaatatttcccttcttaagtatcaaaagaactctggaacaaattataccattaggaaggttttcatgattcagttgattttccaaaaatgaagctatctcacccagctgggtttggaggagcaatctgcttattattctgtcgttaccacttactcaagcgagctgtgatatgaatacaagcaaccagtgggctcgggaaggtccgggtctcttctgccatcttccagataagagatttcagtaaaaaactgccatgctgagctgccttatagagctcttcgaaaatgttcgagttgataaagctctttgaggacaaggtacttcgtgcacctcatgctgaagattgcaccatgttggaaaataaatatgaagcaagtcaaactagatgcatacacttgtgtagaaatcaataatcaattaatagaagtgaaaaaatagacattaaaatgatttatttcta

SEQ ID NO: 417621 - DNA, 845 bp, Homo sapiens
agcgaaagcctctccacctcttccgagcggggtcacggcccggccgtcggtaacctggtttccgagagtgccgggcggtcggcgggtcagggcagcccggggcctgacgccatgtcccggaacctgcgcaccgcgctcattttcggcggcttcatctccctgatcggcgccgccttctatcccatctacttccggcccctaatgagattggaggagtacaagaaggaacaagctataaatcgggctggaattgttcaagaggatgtgcagccaccagggttaaaagtgtggtctgatccatttggcaggaaatgagagggctgtcatcagctctgattaagaaaggagatttcttcatgctttcgattctgcatggggtacagccagtcacctcaccagagaatgacggctggagaagaaaactctgtaataccataaataagagtgcttgtaataaaagactgtgcacaaggattaatatttcccttcttaagtatcaaaagaactctggaacaaattataccattaggaaggttttcatgattcagttgattttccaaaaatgaagctatctcacccagctgggtttggaggagcaatctgcttattattctgtcgttaccacttactcaagcgagctgtgatatgaatacaagcaaccagtgggctcgggaaggtccgggtctcttctgccatcttccagataagagatttcagtaaaaaactgccatgctgagctgccttatagagctcttcgaaaatgttcgagttgataaagctctttgaggacaaggtacttcagcatgaggtgcacgaaggtcgacgcggccgcgaatttagtagta

SEQ ID NO: 417622 - DNA, 1895 bp, Homo sapiens
  misc_feature (1094)..(1094): n is a, c, g, or t
ccacgcgtccgagaccaaggagtggaaagttctccggcagccctgagatctcaagagtgacatttgtgagaccagctaatttgattaaaattctcttggaatcagctttgctagtatcatacctgtgccagatttcatcatgggaaacagctgttacaacatagtagccactctgttgctggtcctcaactttgagaggacaagatcattgcaggatccttgtagtaactgcccagctggtacattctgtgataataacaggaatcagatttgcagtccctgtcctccaaatagtttctccagcgcaggtggacaaaggacctgtgacatatgcaggcagtgtaaaggtgttttcaggaccaggaaggagtgttcctccaccagcaatgcagagtgtgactgcactccagggtttcactgcctgggggcaggatgcagcatgtgtgaacaggattgtaaacaaggtcaagaactgacaaaaaaaggttgtaaagactgttgctttgggacatttaacgatcagaaacgtggcatctgtcgaccctggacaaactgttctttggatggaaagtctgtgcttgtgaatgggacgaaggagagggacgtggtctgtggaccatctccagccgacctctctccgggagcatcctctgtgaccccgcctgcccctgcgagagagccaggacactctccgcagatcatctccttctttcttgcgctgacgtcgactgcgttgctcttcctgctgttcttcctcacgctccgtttctctgttgttaaacggggcagaaagaaactcctgtatatattcaaacaaccatttatgagaccagtacaaactactcaagaggaagatggctgtagctgccgatttccagaagaagaagaaggaggatgtgaactgtgaaatggaagtcaatagggctgttgggactttcttgaaaagaagcaaggaaatatgagtcatccgctatcacagctttcaaaagcaagaacaccatcctacataatacccaggattcccccaacacacgttcttttctaaatgccaatgagttggcctttaaaaatgcaccactttttttttttttttngacagggtctcactctgtcacccaggctggagtgcagtggcaccaccatggctctctgcagccttgacctctgggagctcaagtgatcctcctgcctcagtctcctgagtagctggaactacaaggaagggccaccacacctgactaacttttttgttttttgtttggtaaagatggcatttcgccatgttgtacaggctggtctcaaactcctaggttcactttggcctcccaaagtgctgggattacagacatgaactgccaggcccggccaaaataatgcaccacttttaacagaacagacagatgaggacagagctggtgataaaaaaaaaaaaaaaaaagcattttctagataccacttaacaggtttgagctagtttttttgaaatccaaagaaaattatagtttaaattcaattacatagtccagtggtccaactataattataatcaaaatcaatgcaggtttgttttttggtgctaatatgacatatgacaataagccacgaggtgcagtaagtacccgactaaagtttccgtgggttctgtcatgtaacacgacatgctccaccgtcaggggggagtatgagcagagtgcctgagtttagggtcaaggacaaaaaacctcaggcctggaggaagttttggaaagagttcaagtgtctgtatatcctatggtcttctccatcctcacaccttctgcctttgtcctgctcccttttaagccaggttacattctaaaaattcttaacttttaacataatattttataccaaagccaataaatgaactgcatatg

SEQ ID NO: 417623 - DNA, 945 bp, Homo sapiens
ccacgcgtccgagaccaaggagtggaaagttctccggcagccctgagatctcaagagtgacatttgtgagaccagctaatttgattaaaattctcttggaatcagctttgctagtatcatacctgtgccagatttcatcatgggaaacagctgttacaacatagtagccactctgttgctggtcctcaactttgagaggacaagatcattgcaggatccttgtagtaactgcccagctggtacattctgtgataataacaggaatcagatttgcagtccctgtcctccaaatagtttctccagcgcaggtggacaaaggacctgtgacatatgcaggcagtgtaaaggtgttttcaggaccaggaaggagtgttcctccaccagcaatgcagagtgtgactgcactccagggtttcactgcctgggggcaggatgcagcatgtgtgaacaggattgtaaacaaggtcaagaactgacaaaaaaaggttgtaaagactgttgctttgggacatttaacgatcagaaacgtggcatctgtcgaccctggacaaacatcagagtggctgacgaatggaatcatgattcacaagaaaagtattgactattttctcggacttagctgaattctgtctttggaaagtggcttttttaaaaagctgttctttggatggaaagtctgtgcttgtgaatgggacgaaggagagggacgtggtctgtggaccatctccagccgacctctctccgggagcatcctctgtgaccccgcctgcccctgcgagagagccaggacactctccgcagatcatctccttctttcttgcgctgacgtcgactgcgttgctcttcctgctgttcttcctcacgctccgtttctctgttgttaaacggggcagaaagaaactcctgtatatattcaaacaacgtaagattaacataatcatatta

SEQ ID NO: 417624 - DNA, 1040 bp, Homo sapiens
ccacgcgtccgagaccaaggagtggaaagttctccggcagccctgagatctcaagagtgacatttgtgagaccagctaatttgattaaaattctcttggaatcagctttgctagtatcatacctgtgccagatttcatcatgggaaacagctgttacaacatagtagccactctgttgctggtcctcaactttgagaggacaagatcattgcaggatccttgtagtaactgcccagctggtacattctgtgataataacaggaatcagatttgcagtccctgtcctccaaatagtttctccagcgcaggtggacaaaggacctgtgacatatgcaggcagtgtaaaggtgttttcaggaccaggaaggagtgttcctccaccagcaatgcagagtgtgactgcactccagggtttcactgcctgggggcaggatgcagcatgtgtgaacaggattgtaaacaaggtcaagaactgacaaaaaaaggttgtaaagactgttgctttgggacatttaacgatcagaaacgtggcatctgtcgaccctggacaaactgttctttggatggaaagtctgtgcttgtgaatgggacgaaggagagggacgtggtctgtggaccatctccagccgacctctctccgggagcatcctctgtgaccccgcctgcccctgcgagagagccaggacactctccgcagatcatctccttctttcttgcgctgacgtcgactgcgttgctcttcctgctgttcttcctcacgctccgtttctctgttgttaaacggggcagaaagaaactcctgtatatattcaaacaacatggaagcagtggggataccttcacaatcctggagtcataacactgcattccaaggaaaccatcggatctcgaatctcagtaaccctcaagacgaaaataagtgctgctgaattgaaactagagctatgattgggatatggctaatattttatggtttagtgattcatgcttaagattcatgcttttttagctaatgtagaaaataaagaaaatagttctta

SEQ ID NO: 417625 - DNA, 386 bp, Homo sapiens
gtgattttcctgtctccgtctcctgagtagctgggattacaggtgccaaccaccacgcccagctaatttttgtagttttagtagagacggtttcaccatgttggccaggctggtctcaaactcctgacctcaggtgatccattcccctcggtctcccaaagtgctggaattacaggcatgacccattgcgcccggccccactgtttcctttctaatcgagtgagaaaatggtcagtatttctgtcaacaaaattcatgaggctctttgtacgcacagacttcaggcctttctctcaacaatcgccaaagctggagcatcacatggaggaacactggggtttgaaaaacaggaatgttccagaatcttctcagagtattacattttc

SEQ ID NO: 417626 - DNA, 537 bp, Homo sapiens
cattttctcttcttacaacattttttctcacggataaatgtccttctctaactttctgtaggtttctgctcaaatgcttccttatccctgaggctttccctgatcaccctctataaaaatggggtgggtgcacacaccttcactttttgtacattacaaaaactataacaggattcttgactgattttgtatattcgtaacagtgtgcagtacataaaaatccttttttaaaattgctgaactaatccatatttatcaccatctgacatactctagatttctcttcctgctggaatgaaaacttcaagaacatagaatagcgcctggcgcccagtaattgctcagtaaatactcagtgaatataaatgatctactctgaacttttagtgtgttcctttttactaaaagcttaatagtaaaagaccacatcttaatcaaaggttgttacttaccaccctcttttggcagttctattagcaaatgtccaaggtgattttttaaagacatgtaaataaatcgttttacctcttttcatgc

SEQ ID NO: 417627 - DNA, 499 bp, Homo sapiens
cacctagcctcaagtttctcctttgtaaagggactttggaattaactagaaaaactggggtagggtgcaatctgacttgtacccatatcaaaagtcaactttctgcatggtcaagtatcagataaatttaagccctctaggctttttttataatagtaaataatttttaaaaatagatgtttttgtaaaagacagactgtgaggaggaggtaagaattaaaatgaaaggctggacgcagtggctcacgcctgtaatcccagcattttgggaggccgaggtgggcggatcacgaggtcaggagaccaacaccatcctggctaacacggtgaaaccccgtctctactaaaaatacaaaaaattagcctggcgtggtggcgggcgcctgtagtcccggctacttggaaggctgaggcaggagaatggcatgaacccaggaggtggagcttgcagtgagccgagatcacgccactgcaccccagcatgggcgacagagtgaga

SEQ ID NO: 417628 - DNA, 468 bp, Homo sapiens
atactagcctgaaagtataagagcagtgatgctggcaatatggatatgccaaagagaagctgtaaagtgcttcctttaagtgaaaaggtacaagttcttgacttaataagaaaaagaatcatatgttgagactgccaagatttatggtaaggacgaatcttctatctgtgagattgtgaagaagtaaaaagaagttcgtgctggccaggcgcggtggctcacgcctgtaatcccaccaacacacacataactgcaataaaacagtattaagtaatttcaatggcctcaatggatcactgacttggacaaggtaataatgaagccaactgtcctttgttaaacaacttctaacaaaataacaaaaccttaacctatttgtttcccttcttccaactttagaaaagtcaaaaagttcatctctgttcttgccttttaaaatgtcttttattaaagaagtctgatgtgtta

SEQ ID NO: 417629 - DNA, 383 bp, Homo sapiens
caggttcctgctcttccttgctgtcctcacatcatctttctgatgctagattcacaccaatgtttcttactatattttctgtcccaggcaacattctcttccctttcctcagtggccagtggtgcagagtccccaagatttagtccatctgatcagatccaaagcagagctgggttgtctgtaaattatgaagagtacagattcctcagaaataattctagggctttaacagctaacagcacagaatttgtcttattggagatgggacagcagagggaggtagggtcaccatctgtgctggtttgcaaaatctattcccttggctcccttcttgcttggttaaatttcctggtgcctgaaagtagtcacacgttagcctgaat

SEQ ID NO: 417630 - DNA, 261 bp, Homo sapiens
ggtctagggggagaatctgttccaagcctttctcttaccttctggtgattgcaggcagtcttttgcattccttggtttgtagatacgtaatcctgccatctgtgcttccgctgtcacatgatgttctcctggtatctgtctgtgtctctgttttgtttttgttgttgcagggacaaaagtcataattgattaagggcattccctaatatcttcatcttaccttgattacatctgggatacggcagaactctttggctttaa

SEQ ID NO: 417631 - DNA, 1185 bp, Homo sapiens
tagtagagacggggtttcaccgtgttagccaggatgatctcgatctcctgacctcgtgatccacccgccttggcctcccaaagtgctgcgattacaggcgtgagccaccgtgcctggccaagaccttctttctaaagcagctttatagtgaaacattttatttagaaatctggaccttctttcttcagtttactgtaatccacattcactgagtagaatttgtattgatccctgtgacctagtttcttctagggcacccagttattctttctgtccctagtaaaatctggattgaactgtgccagatgcaggccgtacagtgttgctccagtacctccagctccagcagacacaaagagggagatcagactcagatgcttcttggcctgacggaagatctggcagcgcgtgtttgtaccaggggcctccagttcaaaaggagaaaacaaacctagctaccaggctctgcactcagtggtatccgcacttcagcgaggctgttaactgccccatgctgtcacactgtgggacacaccatctgcagcaagataaatttgaatgtgcagtgtagcatagtaaacgaaatttatgtacagcaaagggaaaacagttatcacttctttttaaaaactaaacatggatgaaaattgcgtgtcagcatcggagcatgtcagattgggagcagcaagagagatttagcccagccctcatctttcatgaatgaggaaaccaaaaccctaggattttaagacccagttgggaaaaggatgttctaaggagggttctgaaacctaaaaactcatctctgcagtgccttggtatctgttatttattttgagttagtagtaacttgaaaagtaccaagtcttaagttcctttagtgttaataacttagtagatttttaaaaattctttctcttttcttttcgggaaataccaaaatgagctccagtttacgttaaatataagtattatatggggtttcatgctctcttcatattcctaatgatgttacaatggaaatcttcaggtggaggagaatactccgactttctcaccgtgttctgagccttgtaccagagcagggagtggttgtgggaaagaagtcatggcccctcaggaggatgaaagggtggacatgcaggtgacaagagaaagcgccagagacaagaaaggggaaaacta

SEQ ID NO: 417632 - DNA, 267 bp, Homo sapiens
tcaacacaaacaccaggcaacagaataaagagcgtatctcagcaagtatttccttaaagttactaaagctgaaaatacagcatgaggctgttataaaattgttaaaaatctcagcgtacaaatgtctcccaacctttgaataacatagaaaccgagaccaatttaaaccagcccacaggcttgggcccttaaggacaataccgtggttctatttgccttccaatgtttttgtcactggaccaaatacagcaccattcacgtggaatc

SEQ ID NO: 417633 - DNA, 690 bp, Homo sapiens
cccccatctggcagggctgatgaagaggggtcactggagtgaaaatattgcccctctaccagtaaggtttgatgaggtcctaaatcgaggggattggaagatcatgaacattcttgagtagcgactttgtacccgccaccatgctacgtgattaaatatcgcagcatatttaatgcttacagtggccacataaaaattacccatgttacagatgaggaaactgagattgcagctaggaagagtgatgaaataaagttgtttattggggatattgactggctggtcgtgtaggtgcccttgtggtctgagatgtagttctggtaacttgattttgagacacaaccagaggatagcaggtttggaaactgacttaatgcacctcacaggtgtctggtgttcacgtcagtactccgacttcacaatgagaaatctgactcctccggtcctctgccattctgtgttcttgttcacttgtgttctccggtcagtgaattctgtcctaataagaaaacctaaaaggcaagtcagtcacaaccaatgtcctggtaagggcgcaatcagagaaacaggaggcgacatcgtcttgaatctgtcatcgagactgtgctatggcctgatgaatcatgcacgccccatagccaagagcactgtgtttgttacaaattgctgattaaacaacattggaataga

SEQ ID NO: 417634 - DNA, 406 bp, Homo sapiens
  misc_feature (268)..(268): n is a, c, g, or t
  misc_feature (292)..(292): n is a, c, g, or t
  misc_feature (307)..(307): n is a, c, g, or t
  misc_feature (401)..(401): n is a, c, g, or t
gcaatgtggctctggatagcaccttatggacagttgtgtccccaaggaaggatgagaatagctactgaagtcctaaagagcaagcctaactcaagccattggacacaggcattagacagaaagctggaagttgaaatggtggagtccaacttgcctggaccagcttaatggttctgctcctggtaacgtttttatccatggatgacttgcttgggtatggagagtcggcttgactacactgtgtggaagcaaagttttaaaagaagcnaaggactcagaattcattgatttnaagaaaattgcaggncagaccctggttaatcccctaaaactaagggggtttttaaatggacccaccaaccaaagccaaggccattggcaagcctttaactggctttggnaaagg

SEQ ID NO: 417635 - DNA, 695 bp, Homo sapiens
gcaatgtggctctggatagcaccttatggacagttgtgtccccaaggaaggatgagaatagctactgaagtcctaaagagcaagcctaactcaagccattggacacaggcattagacagaaagctggaagttgaaatggtggagtccaacttgcctggaccagcttaatggttctgctcctggtaatcgtgtttgtgtgatgcgtactgagtataaacgtcaggatgtcgtgcgttatatgagatcgatagcacagtaccaagattcgctcgttgcgataaccgtctctatacacaagcggtcatgtgtattagatccgtgccctattgagcatagcaccatcgctggtggcacggcatacgctatgtctcatacacgggaagccttataaggcactacgagccagtctggagacaggagtaagcaacttgtcaagcacagaggcaatagcaagtctactgaaccatatgtaggtgctcataatattgaagcgccaaacactagtagagacatagctatgtgtaacatagaatagacaagggcgtggtagccgtgctaccggaagtttcacgcagggatagtcggtccgactccacgcgtccgaagcaggccaccagttgggtaggctatgttaatataaatgtctatcaacatgtgttcaataatattggtactcgctggtatcctcagctgca

SEQ ID NO: 417636 - DNA, 4326 bp, Homo sapiens
tatgttgcccaggctagtctcaaactcttgagctcaggcactcctctcacctaggcctcccaaagtgctaggattacaggtgcgagttacaacacctggccaacctttactccttattacactaactttatcgttagtgttctactctacccacaactctggggaaactgaggctggggtagcttgctggtgcactagtaattccaaacttgaacgggagaaatgcttattggaagcactgtctttatatagtttgcaagttgtcattactttttatttttagagacatgtcttgttctgttgcccaggctggaatgcagtggcatgccaccatgcagtggcatggtgatagctcactgcagtctcaaattgctgggctcaagtaatcctcctccctgtaatcccaaagtgctgggattataggcatgcaccagcacatccagctaattttttgttggtccttcttttaaaagcaggcatttctcagaattactaaggcattaaggaattttaagaaaatctgattccagaatactttgttactgtaaatattgacactgctccttaacattttttttctgccattttaacgaaaaccgtatactacatctgcttgctcaaatgcaaaacaggactctgcctcttagactgtgttgccctggaagcctgagatggggcattctatgactaccaatattactttcactatcaaccacatgaagtgatcatatgtttcagtaccagatggtgtactgatactttatatatattctcatctgatccttacagggctcatttgagggagataactattatttccccattttatataagagaaaattgaagtttagagatgtgaagcttctttcctaataagtagtttccaggtactaattggccaattaagttttaaatccaagcaacctgacttgtcagtgtaaacagtttctagttaatcactgtgatgctgaataagtatagtgggtagcacatctgattcaactgagatctaccttcttaagaaaaaacaaatctaggaagcttacagtggctaagatgggtcatttaaatgtaggtgatttataactgcacgtaagtctatttcgtgttgctttgttatcttacctctcgataagaatggcaaataactactcttactcattgtgcatgattttctggttttatgtgactgtgttcaaattgaggaaaccagaatccagttattcaacaacaataattttctctatactatgatttatttacattttttcatatagttctctcaattatatataaagtctaggaaagtatgacttatgtgtgaatttccttacctattctttaaggctgttttgttttttaagagcctatttattgttgtactgctggttcctaaatagaacagttaagtaggccactgagcaggaaaaaatactgcaaaattttatagtcttctgagtttattactaccagaagaccttatctcagcccagatgtgtgtatctgaaaataaaaattacactatgggcatctgattaatatacttacgtcttacataaaagtaaaatgtgtctgtcctggccctatcagcctgttttttttttccttctcattctaggtagaagatgtgttacaacgttgtcgagaatatttaattaaaaaaataaatgcagagaattgtgtacgattgttgagttttgctgatctcttcagttgtgaggaattaaaacagagtgctaaaagaatggtggagcacaagttcactgctgtgtatcatcaggacgcgttcatgcagctgtcacatgacctactgatagatattctcagtagtgacaatttaaatgtagaaaaggaagaaaccgttcgagaagctgctatgctgtggctagagtataacacagaatcacgatcccagtatttgtcttctgttcttagccaaatcagaattgatgcactttcagaagtaacacagagagcttggtttcaaggtctgccacccaatgataagtcagtggtggttcaaggtctgtataagtccatgcccaagtttttcaaaccaagacttgggatgactaaagaggaaatgatgattttcattgaagcatcttcagaaaatccttgtagtctttactcttctgtctgttacagcccccaagcagaaaaagtttacaagttatgtagcccaccagctgatttgcataaggttgggaccgttgtaactcctgataatgatatctacatagcagggggtcaagttcctctgaaaaacacaaaaacaaatcacagtaaaacaagcaaacttcagactgccttcagaactgtgaattgcttttattggtttgatgcacagcaaaatacctggtttccaaagaccccaatgctttttgtccgcataaagccatctttggtttgctgtgaaggctatatctatgcaattggaggagatagcgtaggtggagaacttaatcggaggaccgtagaaagatacgacactgagaaagatgagtggacgatggtaagccctttaccttgtgcttggcaatggagtgcagcagttgtggttcatgactgcatttatgtgatgacactgaacctcatgtactgttattttccaaggtctgactcatgggtagaaatggccatgagacagactagtaggtcctttgcttcagctgcagcttttggtgataaaattttctatattggagggttgcatattgctaccaattccggcataagactcccctctggcactgtagatgggtcttcagtaactgtggaaatttatgatgtgaataaaaatgagtggaaaatggcagccaacatccctgctaagaggtactctgacccctgtgttagagctgttgtgatctcaaattctctatgtgtgtttatgcgagaaacccacttaaatgagcgagctaaatacgtcacctaccaatatgacctggaacttgaccggtggtctctgcggcagcatatatctgaacgtgtactgtgggacttggggagagattttcgatgcactgtggggaaactctatccatcctgccttgaagagtctccatggaaaccaccaacttatcttttttcaacggatgggacagaagagtttgaactggatggagaaatggttgcactaccacctgtatagtggggaagttcagggagtgcacgcctgagttatgtgctttgtcattttctttgctaaacaaaagaggctatgaaagaactaaatatgagtacataaaattctatctttgataaattttatttttatgccctacttaatatttgcatcagtataatatatatcagtgagtcttacagaaagatatgcttccataatatgaaatagattattcaataattgagaaactttatgtgtaatcatgagagtataagaatctggattatctaacattgttagccctgtgtatgtacagttcaaaaagttcatttataaaagtagtttcctgttcctagtgtgatgtatcacaaattgtgctgaggttattttagtatgtgtgtttcattcccgtgcttctgttctgaagtcctggaatacagttttcagtgtaattaattcaactgcacttaacactaatgtccgtgttggtatagaaatgtctaaatcctatactctagttgaggaagatcttccataattttatggtattacacagggaaagctatgactgcaggatcagtctaactatactattaggtgcatgtattctcttttcactaacttatacttgtctatctagaatacaggtcttccagtcagctggtcatttaccaggtgtggacttaagttgctgggcttgcagtaagaattgccagccactcattgtgcgggtctgcgtggagctttaatcagaaaaagcctccactttctgtattatgttaacattggctcatgcatataactatctgctgctgatgtagttctccatcttcaagatttagagtgggttaaccaggtcattacatcttaatttaataacaagcattactgtagagtgattgtgtatagatctgttagctgtcagggtgtgttttttttaacctgttgtgtgcgtgtgggggttaggattagtaaggtgaactgttcaggaattctctgcactagctgtgcagaagagcagataactagcgctgctctggcattaatcccaggaaccactagcagtagtgggcgccgccaatctaacatgagcacaggtgcttcatgacaaacattactagcatgttcaactgcaccatgttctggcactgtattttgaatgacattaatttattaaataaattgtatatattcaa

SEQ ID NO: 417637 - DNA, 3516 bp, Homo sapiens
cacccccttccttctgtattccccccgcgtacatctgaactaaccaagagaggtctagacgaacagagctcctgttatggtctatatcgacttaaaaaagaaagcagaaactgccctttgaaacggaaaattgtttactccacaggatccgctgaacataggatgttgccacaaaatctacctcgtgtatttttctctttcactcatgagctgcacaattgcagatttgagcacaatgtctgcagactgtgttgaaaaactctgaagaacctaattaacacaggatgacctaggagtgattctaagtctgtgtaacaagatattactcattagtgaatgtgtcagtcttggtactgaatgctgcagataacagcaagtaggttctcctttatttctgaagtattcacttgaccttccatcagtaagacggacttttctaatctgttcctggagatattaatggaatacagtcatgtccactcaagacgagaggcagatcaatactgaatatgctgtgtcattgttggaacagttgaaactgttttatgaacagcagttgtttactgacatagtgttaattgttgagggcactgaattcccttgtcataagatggttcttgcaacatgtagctcttatttcagggccatgtttatgagtggactaagtgaaagcaaacaaacccatgtacacctgaggaatgtcgatgctgccaccttacagataataataacttatgcatacacgggtaacttggcaatgaatgacagcactgtagaacagctttatgaaacagcttgcttcctacaggtagaagatgtgttacaacgttgtcgagaatatttaattaaaaaaataaatgcagagaattgtgtacgattgttgagttttgctgatctcttcagttgtgaggaattaaaacagagtgctaaaagaatggtggagcacaagttcactgctgtgtatcatcaggacgcgttcatgcagctgtcacatgacctactgatagatattctcagtagtgacaatttaaatgtagaaaaggaagaaaccgttcgagaagctgctatgctgtggctagagtataacacagaatcacgatcccagtatttgtcttctgttcttagccaaatcagaattgatgcactttcagaagtaacacagagagcttggtttcaaggtctgccacccaatgataagtcagtggtggttcaaggtctgtataagtccatgcccaagtttttcaaaccaagacttgggatgactaaagaggaaatgatgattttcattgaagcatcttcagaaaatccttgtagtctttactcttctgtctgttacagcccccaagcagaaaaagtttacaagttatgtagcccaccagctgatttgcataaggttgggaccgttgtaactcctgataatgatatctacatagcagggggtcaagttcctctgaaaaacacaaaaacaaatcacagtaaaacaagcaaacttcagactgccttcagaactgtgaattgcttttattggtttgatgcacagcaaaatacctggtttccaaagaccccaatgctttttgtccgcataaagccatctttggtttgctgtgaaggctatatctatgcaattggaggagatagcgtaggtggagaacttaatcggaggaccgtagaaagatacgacactgagaaagatgagtggacgatggtaagccctttaccttgtgcttggcaatggagtgcagcagttgtggttcatgactgcatttatgtgatgacactgaacctcatgtactgttattttccaaggtctgactcatgggtagaaatggccatgagacagactagtaggtcctttgcttcagctgcagcttttggtgataaaattttctatattggagggttgcatattgctaccaattccggcataagactcccctctggcactgtagatgggtcttcagtaactgtggaaatttatgatgtgaataaaaatgagtggaaaatggcagccaacatccctgctaagaggtactctgacccctgtgttagagctgttgtgatctcaaattctctatgtgtgtttatgcgagaaacccacttaaatgagcgagctaaatacgtcacctaccaatatgacctggaacttgaccggtggtctctgcggcagcatatatctgaacgtgtactgtgggacttggggagagattttcgatgcactgtggggaaactctatccatcctgccttgaagagtctccatggaaaccaccaacttatcttttttcaacggatgggacagaagagtttgaactggatggagaaatggttgcactaccacctgtatagtggggaagttcagggagtgcacgcctgagttatgtgctttgtcattttctttgctaaacaaaagaggctatgaaagaactaaatatgagtacataaaattctatctttgataaattttatttttatgccctacttaatatttgcatcagtataatatatatcagtgagtcttacagaaagatatgcttccataatatgaaatagattattcaataattgagaaactttatgtgtaatcatgagagtataagaatctggattatctaacattgttagccctgtgtatgtacagttcaaaaagttcatttataaaagtagtttcctgttcctagtgtgatgtatcacaaattgtgctgaggttattttagtatgtgtgtttcattcccgtgcttctgttctgaagtcctggaatacagttttcagtgtaattaattcaactgcacttaacactaatgtccgtgttggtatagaaatgtctaaatcctatactctagttgaggaagatcttccataattttatggtattacacagggaaagctatgactgcaggatcagtctaactatactattaggtgcatgtattctcttttcactaacttatacttgtctatctagaatacaggtcttccagtcagctggtcatttaccaggtgtggacttaagttgctgggcttgcagtaagaattgccagccactcattgtgcgggtctgcgtggagctttaatcagaaaaagcctccactttctgtattatgttaacattggctcatgcatataactatctgctgctgatgtagttctccatcttcaagatttagagtgggttaaccaggtcattacatcttaatttaataacaagcattactgtagagtgattgtgtatagatctgttagctgtcagggtgtgttttttttaacctgttgtgtgcgtgtgggggttaggattagtaaggtgaactgttcaggaattctctgcactagctgtgcagaagagcagataactagcgctgctctggcattaatcccaggaaccactagcagtagtgggcgccgccaatctaacatgagcacaggtgcttcatgacaaacattactagcatgttcaactgcaccatgttctggcactgtattttgaatgacattaatttattaaataaattgtatatattcaa

SEQ ID NO: 417638 - DNA, 4346 bp, Homo sapiens
ggtcgggccctgaggagcgtgcggcggcgcccgcagaggacgctgctttccgcgctggacggaccaagcgagggagggtgcgaggggaaaccggaaggaagaggcggcggcgccagccttcctcggccggaggcggaggcgagaccccaggcgaggccgcggcgggagggccacgcccccgccgccgcgccggaggggcccagtgtggacggggccaccggctggagcggatcccacacctccggaccgagggacgcggttactccacaggatccgctgaacataggatgttgccacaaaatctacctcgtgtatttttctctttcactcatgagctgcacaattgcagatttgagcacaatgtctgcagactgtgttgaaaaactctgaagaacctaattaacacaggatgacctaggagtgattctaagtctgtgtaacaagatattactcattagtgaatgtgtcagtcttggtactgaatgctgcagataacagcaagtaggttctcctttatttctgaagtattcacttgaccttccatcagtaagacggacttttctaatctgttcctggagatattaatggaatacagtcatgtccactcaagacgagaggcagatcaatactgaatatgctgtgtcattgttggaacagttgaaactgttttatgaacagcagttgtttactgacatagtgttaattgttgagggcactgaattcccttgtcataagatggttcttgcaacatgtagctcttatttcagggccatgtttatgagtggactaagtgaaagcaaacaaacccatgtacacctgaggaatgtcgatgctgccaccttacagataataataacttatgcatacacgggtaacttggcaatgaatgacagcactgtagaacagctttatgaaacagcttgcttcctacaggtagaagatgtgttacaacgttgtcgagaatatttaattaaaaaaataaatgcagagaattgtgtacgattgttgagttttgctgatctcttcagttgtgaggaattaaaacagagtgctaaaagaatggtggagcacaagttcactgctgtgtatcatcaggacgcgttcatgcagctgtcacatgacctactgatagatattctcagtagtgacaatttaaatgtagaaaaggaagaaaccgttcgagaagctgctatgctgtggctagagtataacacagaatcacgatcccagtatttgtcttctgttcttagccaaatcagaattgatgcactttcagaagtaacacagagagcttggtttcaaggtctgccacccaatgataagtcagtggtggttcaaggtctgtataagtccatgcccaagtttttcaaaccaagacttgggatgactaaagaggaaatgatgattttcattgaagcatcttcagaaaatccttgtagtctttactcttctgtctgttacagcccccaagcagaaaaagtttacaagttatgtagcccaccagctgatttgcataaggttgggaccgttgtaactcctgataatgatatctacatagcagggggtcaagttcctctgaaaaacacaaaaacaaatcacagtaaaacaagcaaacttcagactgccttcagaactgtgaattgcttttattggtttgatgcacagcaaaatacctggtttccaaagaccccaatgctttttgtccgcataaagccatctttggtttgctgtgaaggctatatctatgcaattggaggagatagcgtaggtggagaacttaatcggaggaccgtagaaagatacgacactgagaaagatgagtggacgatggtaagccctttaccttgtgcttggcaatggagtgcagcagttgtggttcatgactgcatttatgtgatgacactgaacctcatgtactgttattttccaaggtctgactcatgggtagaaatggccatgagacagactagtaggtcctttgcttcagctgcagcttttggtgataaaattttctatattggagggttgcatattgctaccaattccggcataagactcccctctggcactgtagatgggtcttcagtaactgtggaaatttatgatgtgaataaaaatgagtggaaaatggcagccaacatccctgctaagaggtactctgacccctgtgttagagctgttgtgatctcaaattctctatgtgtgtttatgcgagaaacccacttaaatgagcgagctaaatacgtcacctaccaatatgacctggaacttgaccggtggtctctgcggcagcatatatctgaacgtgtactgtgggacttggggagagattttcgatgcactgtggggaaactctatccatcctgccttgaagagtctccatggaaaccaccaacttatcttttttcaacggatgggacagaagagtttgaactggatggagaaatggttgcactaccacctgtatagtggggaagttcagggagtgcacgcctgagttatgtgctttgtcattttctttgctaaacaaaagaggctatgaaagaactaaatatgagtacataaaattctatctttgataaattttatttttatgccctacttaatatttgcatcagtataatatatatcagtgagtcttacagaaagatatgcttccataatatgaaatagattattcaataattgagaaactttatgtgtaatcatgagagtataagaatctggattatctaacattgttagccctgtgtatgtacagttcaaaaagttcatttataaaagtagtttcctgttcctagtgtgatgtatcacaaattgtgctgaggttattttagtatgtgtgtttcattcccgtgcttctgttctgaagtcctggaatacagttttcagtgtaattaattcaactgcacttaacactaatgtccgtgttggtatagaaatgtctaaatcctatactctagttgaggaagatcttccataattttatggtattacacagggaaagctatgactgcaggatcagtctaactatactattaggtgcatgtattctcttttcactaacttatacttgtctatctagaatacaggtcttccagtcagctggtcatttaccaggtgtggacttaagttgctgggcttgcagtaagaattgccagccactcattgtgcgggtctgcgtggagctttaatcagaaaaagcctccactttctgtattatgttaacattggctcatgcatataactatctgctgctgatgtagttctccatcttcaagatttagagtgggttaaccaggtcattacatcttaatttaataacaagcattactgtagagtgattgtgtatagatctgttagctgtcagggtgtgttttttttaacctgttgtgtgcgtgtgggggttaggattagtaaggtgaactgttcaggaattctctgcactagctgtgcagaagagcagataactagcgctgctctggcattaatcccaggaaccactagcagtagtgggcgccgccaatctaacatgagcacaggtgcttcatgacaaacattactagcatgttcaactgcaccatgttctggcactgtattttgaatgacattaatttattaaataaattgtatatattcaatatctatttttcttttgttatgggaatggtctgctttttaaattttgattttgctaggtcaaacttagctagtaataggtggtttcttccaaattttgtttgatgaagattgagagatatgcataggctttccttaggctagtgtctttctaccctgctggcatgttagaatcatctgattctgatcatcatctttagaagcttgagatgatgcctgaacctcaccccaaacaaaatggtttctttttagagcacatcattgatcatgtttatagacttgaactgcccctccactgcctactgaatgaagtccagattccttaccacatttaaggctctctctaatttggctttaaattacctttacagccctaccttgcattgtttttccataagccttatcttctgattaggctttcgctatgctttatgcttttttatgctattcatgctactcagaatggtttcttcatcccaactttacttgcagctgtctcaagagctatttaaggcagtttttaaagaatgtttcctgataaccatgtcttaccatgaggtgaaaagtatcctttctcacatttttactaccttgtacctagatcttattaattgtactgatcattctattgactattactagttttggccaggtggggtggcttatgcctgtaatcccagcactttgggaggcctaagtgggaggaa

SEQ ID NO: 417639 - DNA, 2584 bp, Homo sapiens
ggtcgggccctgaggagcgtgcggcggcgcccgcagaggacgctgctttccgcgctggacggaccaagcgagggagggtgcgaggggaaaccggaaggaagaggcggcggcgccagccttcctcggccggaggcggaggcgagaccccaggcgaggccgcggcgggagggccacgcccccgccgccgcgccggaggggcccagtgtggacggggccaccggctggagcggatcccacacctccggaccgagggacgcggttactccacaggatccgctgaacataggatgttgccacaaaatctacctcgtgtatttttctctttcactcatgagctgcacaattgcagatttgagcacaatgtctgcagactgtgttgaaaaactctgaagaacctaattaacacaggatgacctaggagtgattctaagtctgtgtaacaagatattactcattagtgaatgtgtcagtcttggtactgaatgctgcagataacagcaagtaggttctcctttatttctgaagtattcacttgaccttccatcagtaagacggacttttctaatctgttcctggagatattaatggaatacagtcatgtccactcaagacgagaggcagatcaatactgaatatgctgtgtcattgttggaacagttgaaactgttttatgaacagcagttgtttactgacatagtgttaattgttgagggcactgaattcccttgtcataagatggttcttgcaacatgtagctcttatttcagggccatgtttatgagtggactaagtgaaagcaaacaaacccatgtacacctgaggaatgtcgatgctgccaccttacagataataataacttatgcatacacgggtaacttggcaatgaatgacagcactgtagaacagctttatgaaacagcttgcttcctacaggtagaagatgtgttacaacgttgtcgagaatatttaattaaaaaaataaatgcagagaattgtgtacgattgttgagttttgctgatctcttcagttgtgaggaattaaaacagagtgctaaaagaatggtggagcacaagttcactgctgtgtatcatcaggacgcgttcatgcagctgtcacatgacctactgatagatattctcagtagtgacaatttaaatgtagaaaaggaagaaaccgttcgagaagctgctatgctgtggctagagtataacacagaatcacgatcccagtatttgtcttctgttcttagccaaatcagaattgatgcactttcagaagtaacacagagagcttggtttcaaggtctgccacccaatgataagtcagtggtggttcaaggtctgtataagtccatgcccaagtttttcaaaccaagacttgggatgactaaagaggaaatgatgattttcattgaagcatcttcagaaaatccttgtagtctttactcttctgtctgttacagcccccaagcagaaaaagtttacaagttatgtagcccaccagctgatttgcataaggttgggaccgttgtaactcctgataatgatatctacatagcagggggtcaagttcctctgaaaaacacaaaaacaaatcacagtaaaacaagcaaacttcagactgccttcagaactgtgaattgcttttattggtttgatgcacagcaaaatacctggtttccaaagaccccaatgctttttgtccgcataaagccatctttggtttgctgtgaaggctatatctatgcaattggaggagatagcgtaggtggagaacttaatcggaggaccgtagaaagatacgacactgagaaagatgagtggacgatggtaagccctttaccttgtgcttggcaatggagtgcagcagttgtggttcatgactgcatttatgtgatgacactgaacctcatgtactgttattttccaaggtctgactcatgggtagaaatggccatgagacagactagtaggtcctttgcttcagctgcagcttttggtgataaaattttctatattggagggttgcatattgctaccaattccggcataagactcccctctggcactgtagatgggtcttcagtaactgtggaaatttatgatgtgaataaaaatgagtggaaaatggcagccaacatccctgctaagaggtactctgacccctgtgttagagctgttgtgatctcaaattctctatgtgtgtttatgcgagaaacccacttaaatgagcgagctaaatacgtcacctaccaatatgacctggaacttgaccggtggtctctgcggcagcatatatctgaacgtgtactgtgggacttggggagagattttcgatgcactgtggggaaactctatccatcctgccttgaagagtctccatggaaaccaccaacttatcttttttcaacggatgggacagaagagtttgaactggatggagaaatggttgcactaccacctgtatagtggggaagttcagggagtgcacgcctgagttatgtgctttgtcattttctttgctaaacaaaagaggctatgaaagaactaaatatgagtacataaaattctatctttgataaat

SEQ ID NO: 417640 - DNA, 3219 bp, Homo sapiens
ggtcgggccctgaggagcgtgcggcggcgcccgcagaggacgctgctttccgcgctggacggaccaagcgagggagggtgcgaggggaaaccggaaggaagaggcggcggcgccagccttcctcggccggaggcggaggcgagaccccaggcgaggccgcggcgggagggccacgcccccgccgccgcgccggaggggcccagtgtggacggggccaccggctggagcggatcccacacctccggaccgagggacgcggttactccacaggatccgctgaacataggatgttgccacaaaatctacctcgtgtatttttctctttcactcatgagctgcacaattgcagatttgagcacaatgtctgcagactgtgttgaaaaactctgaagaacctaattaacacaggatgacctaggagtgattctaagtctgtgtaacaagatattactcattagtgaatgtgtcagtcttggtactgaatgctgcagataacagcaagtaggttctcctttatttctgaagtattcacttgaccttccatcagtaagacggacttttctaatctgttcctggagatattaatggaatacagtcatgtccactcaagacgagaggcagatcaatactgaatatgctgtgtcattgttggaacagttgaaactgttttatgaacagcagttgtttactgacatagtgttaattgttgagggcactgaattcccttgtcataagatggttcttgcaacatgtagctcttatttcagggccatgtttatgagtggactaagtgaaagcaaacaaacccatgtacacctgaggaatgtcgatgctgccaccttacagataataataacttatgcatacacgggtaacttggcaatgaatgacagcactgtagaacagctttatgaaacagcttgcttcctacaggtagaagatgtgttacaacgttgtcgagaatatttaattaaaaaaataaatgcagagaattgtgtacgattgttgagttttgctgatctcttcagttgtgaggaattaaaacagagtgctaaaagaatggtggagcacaagttcactgctgtgtatcatcaggacgcgttcatgcagctgtcacatgacctactgatagatattctcagtagtgacaatttaaatgtagaaaaggaagaaaccgttcgagaagctgctatgctgtggctagagtataacacagaatcacgatcccagtatttgtcttctgttcttagccaaatcagaattgatgcactttcagaagtaacacagagagcttggtttcaaggtctgccacccaatgataagtcagtggtggttcaaggtctgtataagtccatgcccaagtttttcaaaccaagacttgggatgactaaagaggaaatgatgattttcattgaagcatcttcagaaaatccttgtagtctttactcttctgtctgttacagcccccaagcagaaaaagtttacaagttatgtagcccaccagctgatttgcataaggttgggaccgttgtaactcctgataatgatatctacatagcagggggtcaagttcctctgaaaaacacaaaaacaaatcacagtaaaacaagcaaacttcagactgccttcagaactgtgaattgcttttattggtttgatgcacagcaaaatacctggtttccaaagaccccaatgctttttgtccgcataaagccatctttggtttgctgtgaaggctatatctatgcaattggaggagatagcgtaggtggagaacttaatcggaggaccgtagaaagatacgacactgagaaagatgagtggacgatggtaagccctttaccttgtgcttggcaatggagtgcagcagttgtggttcatgactgcatttatgtgatgacactgaacctcatgtactgttattttccaaggtctgactcatgggtagaaatggccatgagacagactagtaggtcctttgcttcagctgcagcttttggtgataaaattttctatattggagggttgcatattgctaccaattccggcataagactcccctctggcactgtagatgggtcttcagtaactgtggaaatttatgatgtgaataaaaatgagtggaaaatggcagccaacatccctgctaagaggtactctgacccctgtgttagagctgttgtgatctcaaattctctatgtgtgtttatgcgagaaacccacttaaatgagcgagctaaatacgtcacctaccaatatgacctggaacttgaccggtggtctctgcggcagcatatatctgaacgtgtactgtgggacttggggagagattttcgatgcactgtggggaaactctatccatcctgccttgaagagtctccatggaaaccaccaacttatcttttttcaacggatgggacagaagagtttgaactggatggagaaatggttgcactaccacctgtatagtggggaagttcagggagtgcacgcctgagttatgtgctttgtcattttctttgctaaacaaaagaggctatgaaagaactaaatatgagtacataaaattctatctttgataaattttatttttatgccctacttaatatttgcatcagtataatatatatcagtgagtcttacagaaagatatgcttccataatatgaaatagattattcaataattgagaaactttatgtgtaatcatgagagtataagaatctggattatctaacattgttagccctgtgtatgtacagttcaaaaagttcatttataaaagtagtttcctaaaaaaaaaaaaaaaaaaatataaaaaaagataataaaaaatagaaaaaaaaaatgagtaataaaaaaaaaaaggggggggggggaaaaaaaatattccgggggggggcaattttggcaccccgttttttttaaaaagggggccccctgtgggggccgccataaaaaaacgggacgagcgggggggcttatacacacggtctggggggagaacacgccctgcgggcttctcgtggggagccgccactcggtgccggcgcagcactggcgacccaccccaagagataagagcgagcggggcaaaaagcggtgtggggtaaccgcctatctccgggcgaaatgtcggttatgtctccccagtcaactcactgatgtaacagtcatacgcgaccatcaggcacaacaccacgacgacagccaccaacac

SEQ ID NO: 417641 - DNA, 987 bp, Homo sapiens
ggtcgggccctgaggagcgtgcggcggcgcccgcagaggacgctgctttccgcgctggacggaccaagcgagggagggtgcgaggggaaaccggaaggaagaggcggcggcgccagccttcctcggccggaggcggaggcgagaccccaggcgaggccgcggcgggagggccacgcccccgccgccgcgccggaggggcccagtgtggacggggccaccggctggagcggatcccacacctccggaccgagggacgcggttactccacaggatccgctgaacataggatgttgccacaaaatctacctcgtgtatttttctctttcactcatgagctgcacaattgcagatttgagcacaatgtctgcagactgtgttgaaaaactctgaagaacctaattaacacaggatgacctaggagtgattctaagtctgtgtaacaagatattactcattagtgaatgtgtcagtcttggtactgaatgctgcagataacagcaagtaggttctcctttatttctgaagtattcacttgaccttccatcagtaagacggacttttctaatctgttcctggagatattaatggaatacagtcatgtccactcaagacgagaggcagatcaatactgaatatgctgtgtcattgttggaacagttgaaactgttttatgaacagcagttgtttactgacatagtgttaattgttgagggcactgaattcccttgtcataagatggttcttgcaacatgtagctcttatttcagggccatgtttatgagtggactaagtgaaagcaaacaaacccatgtacacctgaggaatgtcgatgctgccaccttacagataataataacttatgcatacacgggtaacttggcaatgaatgacagcactgtagaacagctttatgaaacagcttgcttcctacaggtagaagatgtgttacaacgttgtcgagaatatttaattaaaaaaataaatgca

SEQ ID NO: 417642 - DNA, 3641 bp, Homo sapiens
ggtcgggccctgaggagcgtgcggcggcgcccgcagaggacgctgctttccgcgctggacggaccaagcgagggagggtgcgaggggaaaccggaaggaagaggcggcggcgccagccttcctcggccggaggcggaggcgagaccccaggcgaggccgcggcgggagggccacgcccccgccgccgcgccggaggggcccagtgtggacggggccaccggctggagcggatcccacacctccggaccgagggacgcggttactccacaggatccgctgaacataggatgttgccacaaaatctacctcgtgtatttttctctttcactcatgagctgcacaattgcagatttgagcacaatgtctgcagactgtgttgaaaaactctgaagaacctaattaacacaggatgacctaggagtgattctaagtctgtgtaacaagatattactcattagtgaatgtgtcagtcttggtactgaatgctgcagataacagcaagtaggttctcctttatttctgaagtattcacttgaccttccatcagtaagacggacttttctaatctgttcctggagatattaatggaatacagtcatgtccactcaagacgagaggcagatcaatactgaatatgctgtgtcattgttggaacagttgaaactgttttatgaacagcagttgtttactgacatagtgttaattgttgagggcactgaattcccttgtcataagatggttcttgcaacatgtagctcttatttcagggccatgtttatgagtggactaagtgaaagcaaacaaacccatgtacacctgaggaatgtcgatgctgccaccttacagataataataacttatgcatacacgggtaacttggcaatgaatgacagcactgtagaacagctttatgaaacagcttgcttcctacaggtagaagatgtgttacaacgttgtcgagaatatttaattaaaaaaataaatgcagagaattgtgtacgattgttgagttttgctgatctcttcagttgtgaggaattaaaacagagtgctaaaagaatggtggagcacaagttcactgctgtgtatcatcaggacgcgttcatgcagctgtcacatgacctactgatagatattctcagtagtgacaatttaaatgtagaaaaggaagaaaccgttcgagaagctgctatgctgtggctagagtataacacagaatcacgatcccagtatttgtcttctgttcttagccaaatcagaattgatgcactttcagaagtaacacagagagcttggtttcaaggtctgccacccaatgataagtcagtggtggttcaaggtctgtataagtccatgcccaagtttttcaaaccaagacttgggatgactaaagaggaaatgatgattttcattgaagcatcttcagaaaatccttgtagtctttactcttctgtctgttacagcccccaagcagaaaaagtttacaagttatgtagcccaccagctgatttgcataaggttgggaccgttgtaactcctgataatgatatctacatagcagggggtcaagttcctctgaaaaacacaaaaacaaatcacagtaaaacaagcaaacttcagactgccttcagaactgtgaattgcttttattggtttgatgcacagcaaaatacctggtttccaaagaccccaatgctttttgtccgcataaagccatctttggtttgctgtgaaggctatatctatgcaattggaggagatagcgtaggtggagaacttaatcggaggaccgtagaaagatacgacactgagaaagatgagtggacgatggtaagccctttaccttgtgcttggcaatggagtgcagcagttgtggttcatgactgcatttatgtgatgacactgaacctcatgtactgttattttccaaggtctgactcatgggtagaaatggccatgagacagactagtaggtcctttgcttcagctgcagcttttggtgataaaattttctatattggagggttgcatattgctaccaattccggcataagactcccctctggcactgtagatgggtcttcagtaactgtggaaatttatgatgtgaataaaaatgagtggaaaatggcagccaacatccctgctaagaggtactctgacccctgtgttagagctgttgtgatctcaaattctctatgtgtgtttatgcgagaaacccacttaaatgagcgagctaaatacgtcacctaccaatatgacctggaacttgaccggtggtctctgcggcagcatatatctgaacgtgtactgtgggacttggggagagattttcgatgcactgtggggaaactctatccatcctgccttgaagagtctccatggaaaccaccaacttatcttttttcaacggatgggacagaagagtttgaactggatggagaaatggttgcactaccacctgtatagtggggaagttcagggagtgcacgcctgagttatgtgctttgtcattttctttgctaaacaaaagaggctatgaaagaactaaatatgagtacataaaattctatctttgataaattttatttttatgccctacttaatatttgcatcagtataatatatatcagtgagtcttacagaaagatatgcttccataatatgaaatagattattcaataattgagaaactttatgtgtaatcatgagagtataagaatctggattatctaacattgttagccctgtgtatgtacagttcaaaaagttcatttataaaagtagtttcctgttcctagtgtgatgtatcacaaattgtgctgaggttattttagtatgtgtgtttcattcccgtgcttctgttctgaagtcctggaatacagttttcagtgtaattaattcaactgcacttaacactaatgtccgtgttggtatagaaatgtctaaatcctatactctagttgaggaagatcttccataattttatggtattacacagggaaagctatgactgcaggatcagtctaactatactattaggtgcatgtattctcttttcactaacttatacttgtctatctagaatacaggtcttccagtcagctggtcatttaccaggtgtggacttaagttgctgggcttgcagtaagaattgccagccactcattgtgcgggtctgcgtggagctttaatcagaaaaagcctccactttctgtattatgttaacattggctcatgcatataactatctgctgctgatgtagttctccatcttcaagatttagagtgggttaaccaggtcattacatcttaatttaataacaagcattactgtagagtgattgtgtatagatctgttagctgtcagggtgtgttttttttaacctgttgtgtgcgtgtgggggttaggattagtaaggtgaactgttcaggaattctctgcactagctgtgcagaagagcagataactagcgctgctctggcattaatcccaggaaccactagcagtagtgggcgccgccaatctaacatgagcacaggtgcttcatgacaaacattactagcatgttcaactgcaccatgttctggcactgtattttgaatgacattaatttattaaataaattgtatatattcaa

SEQ ID NO: 417643 - DNA, 2773 bp, Homo sapiens
gctctggaaatagtcaccaggagagtgatttccatggggaaaattttaaataagaatgcacatgggacaggcaatagaaagtttgccaagttaaatttggtacataattgtgttcactccatatcccaacaaagcatgtgtgcgatcagttggtcgctcctgctgccgcctcagtatggcttgtagtaatcctgatttccaccctgccatggcaaggtggaaatcaggacgcgttcatgcagctgtcacatgacctactgatagatattctcagtagtgacaatttaaatgtagaaaaggaagaaaccgttcgagaagctgctatgctgtggctagagtataacacagaatcacgatcccagtatttgtcttctgttcttagccaaatcagaattgatgcactttcagaagtaacacagagagcttggtttcaaggtctgccacccaatgataagtcagtggtggttcaaggtctgtataagtccatgcccaagtttttcaaaccaagacttgggatgactaaagaggaaatgatgattttcattgaagcatcttcagaaaatccttgtagtctttactcttctgtctgttacagcccccaagcagaaaaagtttacaagttatgtagcccaccagctgatttgcataaggttgggaccgttgtaactcctgataatgatatctacatagcagggggtcaagttcctctgaaaaacacaaaaacaaatcacagtaaaacaagcaaacttcagactgccttcagaactgtgaattgcttttattggtttgatgcacagcaaaatacctggtttccaaagaccccaatgctttttgtccgcataaagccatctttggtttgctgtgaaggctatatctatgcaattggaggagatagcgtaggtggagaacttaatcggaggaccgtagaaagatacgacactgagaaagatgagtggacgatggtaagccctttaccttgtgcttggcaatggagtgcagcagttgtggttcatgactgcatttatgtgatgacactgaacctcatgtactgttattttccaaggtctgactcatgggtagaaatggccatgagacagactagtaggtcctttgcttcagctgcagcttttggtgataaaattttctatattggagggttgcatattgctaccaattccggcataagactcccctctggcactgtagatgggtcttcagtaactgtggaaatttatgatgtgaataaaaatgagtggaaaatggcagccaacatccctgctaagaggtactctgacccctgtgttagagctgttgtgatctcaaattctctatgtgtgtttatgcgagaaacccacttaaatgagcgagctaaatacgtcacctaccaatatgacctggaacttgaccggtggtctctgcggcagcatatatctgaacgtgtactgtgggacttggggagagattttcgatgcactgtggggaaactctatccatcctgccttgaagagtctccatggaaaccaccaacttatcttttttcaacggatgggacagaagagtttgaactggatggagaaatggttgcactaccacctgtatagtggggaagttcagggagtgcacgcctgagttatgtgctttgtcattttctttgctaaacaaaagaggctatgaaagaactaaatatgagtacataaaattctatctttgataaattttatttttatgccctacttaatatttgcatcagtataatatatatcagtgagtcttacagaaagatatgcttccataatatgaaatagattattcaataattgagaaactttatgtgtaatcatgagagtataagaatctggattatctaacattgttagccctgtgtatgtacagttcaaaaagttcatttataaaagtagtttcctgttcctagtgtgatgtatcacaaattgtgctgaggttattttagtatgtgtgtttcattcccgtgcttctgttctgaagtcctggaatacagttttcagtgtaattaattcaactgcacttaacactaatgtccgtgttggtatagaaatgtctaaatcctatactctagttgaggaagatcttccataattttatggtattacacagggaaagctatgactgcaggatcagtctaactatactattaggtgcatgtattctcttttcactaacttatacttgtctatctagaatacaggtcttccagtcagctggtcatttaccaggtgtggacttaagttgctgggcttgcagtaagaattgccagccactcattgtgcgggtctgcgtggagctttaatcagaaaaagcctccactttctgtattatgttaacattggctcatgcatataactatctgctgctgatgtagttctccatcttcaagatttagagtgggttaaccaggtcattacatcttaatttaataacaagcattactgtagagtgattgtgtatagatctgttagctgtcagggtgtgttttttttaacctgttgtgtgcgtgtgggggttaggattagtaaggtgaactgttcaggaattctctgcactagctgtgcagaagagcagataactagcgctgctctggcattaatcccaggaaccactagcagtagtgggcgccgccaatctaacatgagcacaggtgcttcatgacaaacattactagcatgttcaactgcaccatgttctggcactgtattttgaatgacattaatttattaaataaattgtatatattcaa

SEQ ID NO: 417644 - DNA, 4314 bp, Homo sapiens
ggtcgggccctgaggagcgtgcggcggcgcccgcagaggacgctgctttccgcgctggacggaccaagcgagggagggtgcgaggggaaaccggaaggaagaggcggcggcgccagccttcctcggccggaggcggaggcgagaccccaggcgaggccgcggcgggagggccacgcccccgccgccgcgccggaggggcccagtgtggacggggccaccggctggagcggatcccacacctccggaccgagggacgcggttactccacaggatccgctgaacataggatgttgccacaaaatctacctcgtgtatttttctctttcactcatgagctgcacaattgcagatttgagcacaatgtctgcagactgtgttgaaaaactctgaagaacctaattaacacaggatgacctaggagtgattctaagtctgtgtaacaagatattactcattagtgaatgtgtcagtcttggtactgaatgctgcagataacagcaagtaggttctcctttatttctgaagtattcacttgaccttccatcagtaagacggacttttctaatctgttcctggagatattaatggaatacagtcatgtccactcaagacgagaggcagatcaatactgaatatgctgtgtcattgttggaacagttgaaactgttttatgaacagcagttgtttactgacatagtgttaattgttgagggcactgaattcccttgtcataagatggttcttgcaacatgtagctcttatttcagggccatgtttatgagtggactaagtgaaagcaaacaaacccatgtacacctgaggaatgtcgatgctgccaccttacagataataataacttatgcatacacgggtaacttggcaatgaatgacagcactgtagaacagctttatgaaacagcttgcttcctacaggtagaagatgtgttacaacgttgtcgagaatatttaattaaaaaaataaatgcagagaattgtgtacgattgttgagttttgctgatctcttcagttgtgaggaattaaaacagagtgctaaaagaatggtggagcacaagttcactgctgtgtatcatcaggacgcgttcatgcagctgtcacatgacctactgatagatattctcagtagtgacaatttaaatgtagaaaaggaagaaaccgttcgagaagctgctatgctgtggctagagtataacacagaatcacgatcccagtatttgtcttctgttcttagccaaatcagaattgatgcactttcagaagtaacacagagagcttggtttcaaggtctgccacccaatgataagtcagtggtggttcaaggtctgtataagtccatgcccaagtttttcaaaccaagacttgggatgactaaagaggaaatgatgattttcattgaagcatcttcagaaaatccttgtagtctttactcttctgtctgttacagcccccaagcagaaaaagtttacaagttatgtagcccaccagctgatttgcataaggttgggaccgttgtaactcctgataatgatatctacatagcagggggtcaagttcctctgaaaaacacaaaaacaaatcacagtaaaacaagcaaacttcagactgccttcagaactgtgaattgcttttattggtttgatgcacagcaaaatacctggtttccaaagaccccaatgctttttgtccgcataaagccatctttggtttgctgtgaaggctatatctatgcaattggaggagatagcgtaggtggagaacttaatcggaggaccgtagaaagatacgacactgagaaagatgagtggacgatggtaagccctttaccttgtgcttggcaatggagtgcagcagttgtggttcatgactgcatttatgtgatgacactgaacctcatgtactgttattttccaaggtctgactcatgggtagaaatggccatgagacagactagtaggtcctttgcttcagctgcagcttttggtgataaaattttctatattggagggttgcatattgctaccaattccggcataagactcccctctggcactgtagatgggtcttcagtaactgtggaaatttatgatgtgaataaaaatgagtggaaaatggcagccaacatccctgctaagaggtactctgacccctgtgttagagctgttgtgatctcaaattctctatgtgtgtttatgcgagaaacccacttaaatgagcgagctaaatacgtcacctaccaatatgacctggaacttgaccggtggtctctgcggcagcatatatctgaacgtgtactgtgggacttggggagagattttcgatgcactgtggggaaactctatccatcctgccttgaagagtctccatggaaaccaccaacttatcttttttcaacggatgggacagaagagtttgaactggatggagaaatggttgcactaccacctgtatagtggggaagttcagggagtgcacgcctgagttatgtgctttgtcattttctttgctaaacaaaagaggctatgaaagaactaaatatgagtacataaaattctatctttgataaattttatttttatgccctacttaatatttgcatcagtataatatatatcagtgagtcttacagaaagatatgcttccataatatgaaatagattattcaataattgagaaactttatgtgtaatcatgagagtataagaatctggattatctaacattgttagccctgtgtatgtacagttcaaaaagttcatttataaaagtagtttcctgttcctagtgtgatgtatcacaaattgtgctgaggttattttagtatgtgtgtttcattcccgtgcttctgttctgaagtcctggaatacagttttcagtgtaattaattcaactgcacttaacactaatgtccgtgttggtatagaaatgtctaaatcctatactctagttgaggaagatcttccataattttatggtattacacagggaaagctatgactgcaggatcagtctaactatactattaggtgcatgtattctcttttcactaacttatacttgtctatctagaatacaggtcttccagtcagctggtcatttaccaggtgtggacttaagttgctgggcttgcagtaagaattgccagccactcattgtgcgggtctgcgtggagctttaatcagaaaaagcctccactttctgtattatgttaacattggctcatgcatataactatctgctgctgatgtagttctccatcttcaagatttagagtgggttaaccaggtcattacatcttaatttaataacaagcattactgtagagtgattgtgtatagatctgttagctggtgtgggggttaggattagtaaggtgaactgttcaggaattctctgcactagctgtgcagaagagcagataactagcgctgctctggcattaatcccaggaaccactagcagtagtgggcgccgccaatctaacatgagcacaggtgcttcatgacaaacattactagcatgttcaactgcaccatgttctggcactgtattttgaatgacattaatttattaaataaattgtatatattcaatatctatttttcttttgttatgggaatggtctgctttttaaattttgattttgctaggtcaaacttagctagtaataggtggtttcttccaaattttgtttgatgaagattgagagatatgcataggctttccttaggctagtgtctttctaccctgctggcatgttagaatcatctgattctgatcatcatctttagaagcttgagatgatgcctgaacctcaccccaaacaaaatggtttctttttagagcacatcattgatcatgtttatagacttgaactgcccctccactgcctactgaatgaagtccagattccttaccacatttaaggctctctctaatttggctttaaattacctttacagccctaccttgcattgtttttccataagccttatcttctgattaggctttcgctatgctttatgcttttttatgctattcatgctactcagaatggtttcttcatcccaactttacttgcagctgtctcaagagctatttaaggcagtttttaaagaatgtttcctgataaccatgtcttaccatgaggtgaaaagtatcctttctcacatttttactaccttgtacctagatcttattaattgtactgatcattctattgactattactagttttggccaggtggggtggcttatgcctgtaatcccagcactttgggaggcctaagtgggaggaa

SEQ ID NO: 417645 - DNA, 2842 bp, Homo sapiens
ggtcgggccctgaggagcgtgcggcggcgcccgcagaggacgctgctttccgcgctggacggaccaagcgagggagggtgcgaggggaaaccggaaggaagaggcggcggcgccagccttcctcggccggaggcggaggcgagaccccaggcgaggccgcggcgggagggccacgcccccgccgccgcgccggaggggcccagtgtggacggggccaccggctggagcggatcccacacctccggaccgagggacgcggttactccacaggatccgctgaacataggatgttgccacaaaatctacctcgtgtatttttctctttcactcatgagctgcacaattgcagatttgagcacaatgtctgcagactgtgttgaaaaactctgaagaacctaattaacacaggatgacctaggagtgattctaagtctgtgtaacaagatattactcattagtgaatgtgtcagtcttggtactgaatgctgcagataacagcaagtaggttctcctttatttctgaagtattcacttgaccttccatcagtaagacggacttttctaatctgttcctggagatattaatggaatacagtcatgtccactcaagacgagaggcagatcaatactgaatatgctgtgtcattgttggaacagttgaaactgttttatgaacagcagttgtttactgacatagtgttaattgttgagggcactgaattcccttgtcataagatggttcttgcaacatgtagctcttatttcagggccatgtttatgagtggactaagtgaaagcaaacaaacccatgtacacctgaggaatgtcgatgctgccaccttacagataataataacttatgcatacacgggtaacttggcaatgaatgacagcactgtagaacagctttatgaaacagcttgcttcctacaggtagaagatgtgttacaacgttgtcgagaatatttaattaaaaaaataaatgcagagaattgtgtacgattgttgagttttgctgatctcttcagttgtgaggaattaaaacagagtgctaaaagaatggtggagcacaagttcactgctgtgtatcatcaggacgcgttcatgcagctgtcacatgacctactgatagatattctcagtagtgacaatttaaatgtagaaaaggaagaaaccgttcgagaagctgctatgctgtggctagagtataacacagaatcacgatcccagtatttgtcttctgttcttagccaaatcagaattgatgcactttcagaagtaacacagagagcttggtttcaaggtctgccacccaatgataagtcagtggtggttcaaggtctgtataagtccatgcccaagtttttcaaaccaagacttgggatgactaaagaggaaatgatgattttcattgaagcatcttcagaaaatccttgtagtctttactcttctgtctgttacagcccccaagcagaaaaagtttacaagttatgtagcccaccagctgatttgcataaggttgggaccgttgtaactcctgataatgatatctacatagcagggggtcaagttcctctgaaaaacacaaaaacaaatcacagtaaaacaagcaaacttcagactgccttcagaactgtgaattgcttttattggtttgatgcacagcaaaatacctggtttccaaagaccccaatgctttttgtccgcataaagccatctttggtttgctgtgaaggctatatctatgcaattggaggagatagcgtaggtggagaacttaatcggaggaccgtagaaagatacgacactgagaaagatgagtggacgatggtaagccctttaccttgtgcttggcaatggagtgcagcagttgtggttcatgactgcatttatgtgatgacactgaacctcatgtactgttattttccaaggtctgactcatgggtagaaatggccatgagacagactagtaggtcctttgcttcagctgcagcttttggtgataaaattttctatattggagggttgcatattgctaccaattccggcataagactcccctctggcactgtagatgggtcttcagtaactgtggaaatttatgatgtgaataaaaatgagtggaaaatggcagccaacatccctgctaagaggtactctgacccctgtgttagagctgttgtgatctcaaattctctatgtgtgtttatgcgagaaacccacttaaatgagcgagctaaatacgtcacctaccaatatgacctggaacttgaccggtggtctctgcggcagcatatatctgaacgtgtactgtgggacttggggagagattttcgatgcactgtggggaaactctatccatcctgccttgaagagtctccatggaaaccaccaacttatcttttttcaacggatgggacagaagagtttgaactggatggagaaatggttgcactaccacctgtatagtggggaagttcagggagtgcacgcctgagttatgtgctttgtcattttctttgctaaacaaaagaggctatgaaagaactaaatatgagtacataaaattctatctttgataaattttatttttatgccctacttaatatttgcatcagtataatatatatcagtgagtcttacagaaagatatgcttccataatatgaaatagattattcaataattgagaaactttatgtgtaatcatgagagtataagaatctggattatctaacattgttagccctgtgtatgtacagttcaaaaagttcatttataaaagtagtttcctgttcctagtgtgatgtatcacaaaaaaaaaagtcgacgcggccgcgaat

SEQ ID NO: 417646 - DNA, 1448 bp, Homo sapiens
ggtcgggccctgaggagcgtgcggcggcgcccgcagaggacgctgctttccgcgctggacggaccaagcgagggagggtgcgaggggaaaccggaaggaagaggcggcggcgccagccttcctcggccggaggcggaggcgagaccccaggcgaggccgcggcgggagggccacgcccccgccgccgcgccggaggggcccagtgtggacggggccaccggctggagcggatcccacacctccggaccgagggacgcggttactccacaggatccgctgaacataggatgttgccacaaaatctacctcgtgtatttttctctttcactcatgagctgcacaattgcagatttgagcacaatgtctgcagactgtgttgaaaaactctgaagaacctaattaacacaggatgacctaggagtgattctaagtctgtgtaacaagatattactcattagtgaatgtgtcagtcttggtactgaatgctgcagataacagcaagtaggttctcctttatttctgaagtattcacttgaccttccatcagtaagacggacttttctaatctgttcctggagatattaatggaatacagtcatgtccactcaagacgagaggcagatcaatactgaatatgctgtgtcattgttggaacagttgaaactgttttatgaacagcagttgtttactgacatagtgttaattgttgagggcactgaattcccttgtcataagatggttcttgcaacatgtagctcttatttcagggccatgtttatgagtggactaagtgaaagcaaacaaacccatgtacacctgaggaatgtcgatgctgccaccttacagataataataacttatgcatacacgggtaacttggcaatgaatgacagcactgtagaacagctttatgaaacagcttgcttcctacaggtaagcatatatatatttttttagacggagtctctctctgttgcccaggctggagtgcagtggcacgatctccgctcactgcaacctccgcctcccaggttcaagtgattctcctgcctcagcctcctgagtagctgggattacaggtgctaatttttgtatttttagtacggggtttcaccatgttggtcaggctggtcttgatctcctgacctcgtgatccacctgccttggcctcccaaagtgctgggattacacgcgtgagccactgtgtccagcctacaggtaagcatttttttactcagttacatacatgagttgtagcttattggtttattatgtggtttattttgtgaggaaacattgttaaacataaccactcatgcatctgcacaggggcacgacggacaccaagcggaaagcatggtgcagcccgggcacagaaagcagaaccaggcgcaaggaacccagtaaacacagaaacggcgccaaggggccccagccaccaaacagaa

SEQ ID NO: 417647 - DNA, 406 bp, Homo sapiens
ctcgccccgcaccttccccgcctatgcccctcgctgagataggcccttccctcctccgggagcctcccgggccacgcgaccctcaacttctccagccgctccacccacgcttcctggaccgcctcctgcaggcgaggctcacatccagcactgtcccttacagtcgccatgcccctggcgacctcagtgtcccactctgtacggggacaatgcaaatccctttgcctcatagggtgcatgtgccagtgttgataaagtgctggccacaggccctgccttcccagggctcacaacactgtgtccctgacacacccgtgggctgtagtgattctcttcatggggatttgactataacccgcagtcaggaatgatttcacaccatagctcagtacatacacacatatct

SEQ ID NO: 417648 - DNA, 1181 bp, Homo sapiens
tttctctgtcagttcatattcattatacatatagatttctgaccattcagttatattgaagtcctactgtgggctgggcatggtggctcacgcctgtaaccccagcactttgggaggccaaggtgggcagatcacctgaggtcaggagttcaagaccaacagtctgggagacagagtgagactgtttcaaaaagaaaaaaaaagaaaagaaaaacagaaaaataaagtagggtaagaaggataaagaatactggtgaagggaattatgatatattgatgtcttataaaaggagggaaagcctgtctgataaggtgatatttgagcaaagaactgaaggaattgagaaagtgagccatttatacatccagggaagagcatgccaagcttcaagtgcagtgacaaattcaaaggaacttgtcatgtttaaggaatagtaaggaaattagtaaggttacactagagtgaaggaaggggcatatgataagaaaagagctcacagagatagttatggagaacagaggccttaagaccatgtgggcagtagtgaggatttggcattttattcccagtgagagaggaagccattttcatgagagatttgacaggatctcacttaaaatttaaaagtaatcaggccaggcacgatggctcatgcccggtaatcccagcaccttgggaggccaaggtgggaggactgcttgaaccctggagttcaagactagcctgggcaacatagggagagtgtgtgtctgcaaaaaaaaaaaaattctaggcatggtggtgtgttgactgtagttccagctactccagaggctgaggtgggaggattggttgagcctgggtggatgaggctgcagtgacccatgatcatgcatgggagacagagcaagaccttgtctcaagaaaggaaagaaatcactggctcttctgtaaaaaatgatctgttaagagtaattgaaaaactaaatacaagtaataaaataatctttcatttaagaaatactaccaaaattaagatggagatctagcaaaaagtcaaaagcagctgggcgtggtggctcacacctgtaatccctacaccttggggaggctgaggcgggaggatcacctgaggtcaggagttcgagaccagcctggccaacagagccaaagtctctactgaaaatacaaaaattagctt

SEQ ID NO: 417649 - DNA, 495 bp, Homo sapiens
tctatattacatttttaagaattgcttatttttcaatttttctagtatttcttgtatattctaccacaggtgaacaactcattttttgggtgacatttttagagcttgcttgaggggcactagaaagaagggcagtaatgtgatgtgaatgtttcagcttatgaaaacagctgtgctctactttaagaaatttgacatttaaaagtgtaagattgcaaaacaaattaattactagttggttatattatgtgagaattttaaaaaagggattcactaaaagttgttttcaaatacttaatccctttaaatggtatttatctaatgtgatttgatttgtgaataatcagttggcatacaacaatttaggaacagatttttggcatatgtaagggttatcagtgtgttctttgagttctctctttaccaaaagtatttggggacaaagttaaattcagtgttgttccacttatatgccacctataatggtttaactga

SEQ ID NO: 417650 - DNA, 3266 bp, Homo sapiens
  misc_feature (156)..(156): n is a, c, g, or t
ggtgatgagcccttgggttctcgctccgactgctaaattcgcttggccgggtccaccttctcgtggcctcactcgccacacggatcagaatccggagcaggcagttctctctattctgaggctcctgcggctgccgcgctgacttccctgtgtggnggagggaactctgggcaggctggttttcttggaatgtgtttacgatgttgaatgggacttgaacaggaagctggacgctgcagctggaactagcgtgccaagttatttatgattccatctgatatacataggagagaaactgatagaagaattctgatggcaactgtatgatagaagctatataaagtcaagtgtccattttctttcaactatatttgagcatacccaggatttaagtcgtggaactgaacatttatttggctgatcctcatcatgaaccgtgcttttagcaggaagaaagacaaaacatggatgcatacacctgaagctttatcaaaacatttcattccctataatgcaaagtttcttggcagtacagaagtggaacagccaaaaggaacagaagttgtgagagatgctgtaaggaaactaaagtttgcaagacatatcaagaaatctgaaggccagaaaattcctaaagtggagttgcaaatatcaatttatggagtaaaaattctagaacccaaaacaaaggaagttcaacacaattgccagcttcatagaatatctttttgtgcagatgataaaactgacaagaggatattcactttcatatgcaaagattctgagtcaaataaacatttgtgctatgtatttgacagcgaaaagtgtgctgaagagatcactttaacaattggccaagcatttgacctggcatacaggaaatttctagaatcaggaggaaaagatgttgaaacaagaaaacagatcgcagggttacaaaaaagaatccaagacttagaaacagaaaatatggaacttaaaaataaagtacaagatttggaaaaccaactgagaataactcaagtatcagcacctccagcaggcagtatgacacctaagtcgccctccactgacatctttgatatgattccattttctccaatatcacaccagtcttcgatgcctactcgcaatggcacacagccacctccagtacctagtagatctactgagattaaacgggacctgtttggagcagaaccttttgacccatttaactgtggagcagcagatttccctccagatattcaatcaaaattagatgagatgcaggaggggttcaaaatgggactaactcttgaaggcacagtattttgtctcgacccgttagacagtaggtgctgacatcaagaacaagaaatcctgattcatgttaaatgtgtttgtatacacatgtcatttattattattactttaagataggtattattcatgtgtcaatgtttttgaatattttaatattttgaaaattttctcagttaaatttcctcaccttcactattgatctgtaatttttattttaaaaacagcttactgtaaagtagatcatacttttatgttcctttctgtttctactgtagatgaatttgtaattgaaagacatattatacaaatacctgccttgtgtctgagttctatttagttagcatcttgaaatttgtattcattttccagatggctagtttattaatgatttcccaaaagccataccttaaagataactttttaaattctgaagagacatgccaatgtcaaactaaacatgttctgtttttaaaccaacaaacatgttactattcattggacagatatcattttatgtataaatactgttcacatcactgggaaaatgtaaactttaaacataatgccacaaggtcactaatttctagcaggtaaaattataaggatataaattccaataataaaccaaatgtatttagagtatttattagtaaatgcaaggtgatgttagttatgatcagttatactctaaatatttaatttgttttataaaggtagtgaaaaaatgaaaatttgctatttattaaaaaacattaaatttcattccaaatgagataagtgatattactataacatctaagcatcatctgatttgatattccctaaaaaacatttggaatatatgctatctatagattcagtatctactacccatatttactttaccaaatatatttctcctcactgcataaggactactcttctcatattttcttctttgatgaagatatttttcaccaaagtttattttgtgatgccctcttggttttgatactttaaaatctgtggcacccgttctacatgaattatcaatatttggtaaattcaatctgtatttgttttgttaaagtcaaaaatctcattttccaaaaaaaaaaaaaaacccagttacggctcagtttagtctggaacttgagcaataaaattctctggcattccattattgatgtgctgatgaaccgggacttttaaaaatatttgtgttcctatacctttaccctttacctaacagactaatttgtactcagtaaaacaaaaatttatggtcaaaatttctaacttggttccatcacatttataagataaataaattaaattaatgaaaatgtgacttagagtaggggtagccctcaaaaatagatttatcatttactcattggaattttcttcaagtgttaaaggtacattttcactaggaaaagaaatcaaatatgcttatgcaatatatatttgtgtgtttttccttaatgttatatggtatatatgagccttcttgtttagtttcttttatctgctaagttgtaccttaattagagggcaatatatgtttcataaagaagagtctttataattttgtttgtcagatagtattttggaatttgtataataaggatgtttagaagccatataagtggctttttttaacagatagaatttgtatttttattgtactttaaaaagatttatgtaataggtatatatttagtggccatttattatcaatggtaacacaatggagtactaagatggtatttgcacatttaagatatgttactttaccaatttttaatggtaatcaactctgctactggcatgatgaaatagtacataactggtcattaattatgaacatttacttctccagtgcgtttttatgaagatctggttgaaaattgtatttctatgtaaactcaacgatatgtttggttttcctgaaaataaatgattttaaataaattaaa

SEQ ID NO: 417651 - DNA, 3584 bp, Homo sapiens
agactgagctcagtagccaggcatgaaagagactgggcaagttgcaggggctaattggaaaggggctgtcggttgcacttggggtttaaacaagaggtttcttttgcaatgagaatttttaggtggctaagatcagtcttcttggcaaaaaaataaactaagcatagagtgcagttggatatgaccgaggaaattacaaaaagggctccaggagcaaagtctgagctttccttatcagtgttgcagtggaatagctgggggcctgatgctgtttgtgctgatcatactttgcaaatgcccacactttgttgctgtttgtctccttggacgaggtttgctgcaacttcaattccttgacttcggccttactttgttttcatagcagcaagaattgaagacttaagggtttgagcagatggttttctacctaaattgaataattcaattacgtattctcaactagcatggatttgggtcatggaattaaagtagaaacgtatccggcatgacttctttgtgcttatcaaaagtgatcctgataaacagatcttgctctttcatgtaaagaagtaaaagttatttatgattccatctgatatacataggagagaaactgatagaagaattctgatggcaactgtatgatagaagctatataaagtcaagtgtccattttctttcaactatatttgagcatacccaggatttaagtcgtggaactgaacatttatttggctgatcctcatcatgaaccgtgcttttagcaggaagaaagacaaaacatggatgcatacacctgaagctttatcaaaacatttcattccctataatgcaaagtttcttggcagtacagaagtggaacagccaaaaggaacagaagttgtgagagatgctgtaaggaaactaaagtttgcaagacatatcaagaaatctgaaggccagaaaattcctaaagtggagttgcaaatatcaatttatggagtaaaaattctagaacccaaaacaaaggaagttcaacacaattgccagcttcatagaatatctttttgtgcagatgataaaactgacaagaggatattcactttcatatgcaaagattctgagtcaaataaacatttgtgctatgtatttgacagcgaaaagtgtgctgaagagatcactttaacaattggccaagcatttgacctggcatacaggaaatttctagaatcaggaggaaaagatgttgaaacaagaaaacagatcgcagggttacaaaaaagaatccaagacttagaaacagaaaatatggaacttaaaaataaagtacaagatttggaaaaccaactgagaataactcaagtatcagcacctccagcaggcagtatgacacctaagtcgccctccactgacatctttgatatgattccattttctccaatatcacaccagtcttcgatgcctactcgcaatggcacacagccacctccagtacctagtagatctactgagattaaacgggacctgtttggagcagaaccttttgacccatttaactgtggagcagcagatttccctccagatattcaatcaaaattagatgagatgcaggaggggttcaaaatgggactaactcttgaaggcacagtattttgtctcgacccgttagacagtaggtgctgacatcaagaacaagaaatcctgattcatgttaaatgtgtttgtatacacatgtcatttattattattactttaagataggtattattcatgtgtcaatgtttttgaatattttaatattttgaaaattttctcagttaaatttcctcaccttcactattgatctgtaatttttattttaaaaacagcttactgtaaagtagatcatacttttatgttcctttctgtttctactgtagatgaatttgtaattgaaagacatattatacaaatacctgccttgtgtctgagttctatttagttagcatcttgaaatttgtattcattttccagatggctagtttattaatgatttcccaaaagccataccttaaagataactttttaaattctgaagagacatgccaatgtcaaactaaacatgttctgtttttaaaccaacaaacatgttactattcattggacagatatcattttatgtataaatactgttcacatcactgggaaaatgtaaactttaaacataatgccacaaggtcactaatttctagcaggtaaaattataaggatataaattccaataataaaccaaatgtatttagagtatttattagtaaatgcaaggtgatgttagttatgatcagttatactctaaatatttaatttgttttataaaggtagtgaaaaaatgaaaatttgctatttattaaaaaacattaaatttcattccaaatgagataagtgatattactataacatctaagcatcatctgatttgatattccctaaaaaacatttggaatatatgctatctatagattcagtatctactacccatatttactttaccaaatatatttctcctcactgcataaggactactcttctcatattttcttctttgatgaagatatttttcaccaaagtttattttgtgatgccctcttggttttgatactttaaaatctgtggcacccgttctacatgaattatcaatatttggtaaattcaatctgtatttgttttgttaaagtcaaaaatctcattttccaaaaaaaaaaaaaaacccagttacggctcagtttagtctggaacttgagcaataaaattctctggcattccattattgatgtgctgatgaaccgggacttttaaaaatatttgtgttcctatacctttaccctttacctaacagactaatttgtactcagtaaaacaaaaatttatggtcaaaatttctaacttggttccatcacatttataagataaataaattaaattaatgaaaatgtgacttagagtaggggtagccctcaaaaatagatttatcatttactcattggaattttcttcaagtgttaaaggtacattttcactaggaaaagaaatcaaatatgcttatgcaatatatatttgtgtgtttttccttaatgttatatggtatatatgagccttcttgtttagtttcttttatctgctaagttgtaccttaattagagggcaatatatgtttcataaagaagagtctttataattttgtttgtcagatagtattttggaatttgtataataaggatgtttagaagccatataagtggctttttttaacagatagaatttgtatttttattgtactttaaaaagatttatgtaataggtatatatttagtggccatttattatcaatggtaacacaatggagtactaagatggtatttgcacatttaagatatgttactttaccaatttttaatggtaatcaactctgctactggcatgatgaaatagtacataactggtcattaattatgaacatttacttctccagtgcgtttttatgaagatctggttgaaaattgtatttctatgtaaactcaacgatatgtttggttttcctgaaaataaatgattttaaataaattaaa

SEQ ID NO: 417652 - DNA, 3126 bp, Homo sapiens
  misc_feature (156)..(156): n is a, c, g, or t
ggtgatgagcccttgggttctcgctccgactgctaaattcgcttggccgggtccaccttctcgtggcctcactcgccacacggatcagaatccggagcaggcagttctctctattctgaggctcctgcggctgccgcgctgacttccctgtgtggnggagggaactctgggcaggctggttttcttggaatgtgtttacgatgttgaatgggacttgaacaggaagctggacgctgcagctggaactagcgtgccaagttatttatgattccatctgatatacataggagagaaactgatagaagaattctgatggcaactgtatgatagaagctatataaagtcaagtgtccattttctttcaactatatttgagcatacccaggatttaagtcgtggaactgaacatttatttggctgatcctcatcatgaaccgtgcttttagcaggaagaaagacaaaacatggatgcatacacctgaagctttatcaaaacatttcattccctataatgcaaagtttcttggcagtacagaagtggaacagccaaaaggaacagaagttgtgagagatgctgtaaggaaactaaagtttgcaagacatatcaagaaatctgaaggccagaaaattcctaaagtggagttgcaaatatcaatttatggagtaaaaattctagaacccaaaacaagctgaagagatcactttaacaattggccaagcatttgacctggcatacaggaaatttctagaatcaggaggaaaagatgttgaaacaagaaaacagatcgcagggttacaaaaaagaatccaagacttagaaacagaaaatatggaacttaaaaataaagtacaagatttggaaaaccaactgagaataactcaagtatcagcacctccagcaggcagtatgacacctaagtcgccctccactgacatctttgatatgattccattttctccaatatcacaccagtcttcgatgcctactcgcaatggcacacagccacctccagtacctagtagatctactgagattaaacgggacctgtttggagcagaaccttttgacccatttaactgtggagcagcagatttccctccagatattcaatcaaaattagatgagatgcaggaggggttcaaaatgggactaactcttgaaggcacagtattttgtctcgacccgttagacagtaggtgctgacatcaagaacaagaaatcctgattcatgttaaatgtgtttgtatacacatgtcatttattattattactttaagataggtattattcatgtgtcaatgtttttgaatattttaatattttgaaaattttctcagttaaatttcctcaccttcactattgatctgtaatttttattttaaaaacagcttactgtaaagtagatcatacttttatgttcctttctgtttctactgtagatgaatttgtaattgaaagacatattatacaaatacctgccttgtgtctgagttctatttagttagcatcttgaaatttgtattcattttccagatggctagtttattaatgatttcccaaaagccataccttaaagataactttttaaattctgaagagacatgccaatgtcaaactaaacatgttctgtttttaaaccaacaaacatgttactattcattggacagatatcattttatgtataaatactgttcacatcactgggaaaatgtaaactttaaacataatgccacaaggtcactaatttctagcaggtaaaattataaggatataaattccaataataaaccaaatgtatttagagtatttattagtaaatgcaaggtgatgttagttatgatcagttatactctaaatatttaatttgttttataaaggtagtgaaaaaatgaaaatttgctatttattaaaaaacattaaatttcattccaaatgagataagtgatattactataacatctaagcatcatctgatttgatattccctaaaaaacatttggaatatatgctatctatagattcagtatctactacccatatttactttaccaaatatatttctcctcactgcataaggactactcttctcatattttcttctttgatgaagatatttttcaccaaagtttattttgtgatgccctcttggttttgatactttaaaatctgtggcacccgttctacatgaattatcaatatttggtaaattcaatctgtatttgttttgttaaagtcaaaaatctcattttccaaaaaaaaaaaaaaacccagttacggctcagtttagtctggaacttgagcaataaaattctctggcattccattattgatgtgctgatgaaccgggacttttaaaaatatttgtgttcctatacctttaccctttacctaacagactaatttgtactcagtaaaacaaaaatttatggtcaaaatttctaacttggttccatcacatttataagataaataaattaaattaatgaaaatgtgacttagagtaggggtagccctcaaaaatagatttatcatttactcattggaattttcttcaagtgttaaaggtacattttcactaggaaaagaaatcaaatatgcttatgcaatatatatttgtgtgtttttccttaatgttatatggtatatatgagccttcttgtttagtttcttttatctgctaagttgtaccttaattagagggcaatatatgtttcataaagaagagtctttataattttgtttgtcagatagtattttggaatttgtataataaggatgtttagaagccatataagtggctttttttaacagatagaatttgtatttttattgtactttaaaaagatttatgtaataggtatatatttagtggccatttattatcaatggtaacacaatggagtactaagatggtatttgcacatttaagatatgttactttaccaatttttaatggtaatcaactctgctactggcatgatgaaatagtacataactggtcattaattatgaacatttacttctccagtgcgtttttatgaagatctggttgaaaattgtatttctatgtaaactcaacgatatgtttggttttcctgaaaataaatgattttaaataaattaaa

SEQ ID NO: 417653 - DNA, 2550 bp, Homo sapiens
cgacaagcagtccggcaagaagcgtggattcggcttcgtgtatttccagaatcacgacgcggcagacaaggccgcggggtcaagttccatccgattcagggccatcgcgtgggctgaagagatcactttaacaattggccaagcatttgacctggcatacaggaaatttctagaatcaggaggaaaagatgttgaaacaagaaaacagatcgcagggttacaaaaaagaatccaagacttagaaacagaaaatatggaacttaaaaataaagtacaagatttggaaaaccaactgagaataactcaagtatcagcacctccagcaggcagtatgacacctaagtcgccctccactgacatctttgatatgattccattttctccaatatcacaccagtcttcgatgcctactcgcaatggcacacagccacctccagtacctagtagatctactgagattaaacgggacctgtttggagcagaaccttttgacccatttaactgtggagcagcagatttccctccagatattcaatcaaaattagatgagatgcaggaggggttcaaaatgggactaactcttgaaggcacagtattttgtctcgacccgttagacagtaggtgctgacatcaagaacaagaaatcctgattcatgttaaatgtgtttgtatacacatgtcatttattattattactttaagataggtattattcatgtgtcaatgtttttgaatattttaatattttgaaaattttctcagttaaatttcctcaccttcactattgatctgtaatttttattttaaaaacagcttactgtaaagtagatcatacttttatgttcctttctgtttctactgtagatgaatttgtaattgaaagacatattatacaaatacctgccttgtgtctgagttctatttagttagcatcttgaaatttgtattcattttccagatggctagtttattaatgatttcccaaaagccataccttaaagataactttttaaattctgaagagacatgccaatgtcaaactaaacatgttctgtttttaaaccaacaaacatgttactattcattggacagatatcattttatgtataaatactgttcacatcactgggaaaatgtaaactttaaacataatgccacaaggtcactaatttctagcaggtaaaattataaggatataaattccaataataaaccaaatgtatttagagtatttattagtaaatgcaaggtgatgttagttatgatcagttatactctaaatatttaatttgttttataaaggtagtgaaaaaatgaaaatttgctatttattaaaaaacattaaatttcattccaaatgagataagtgatattactataacatctaagcatcatctgatttgatattccctaaaaaacatttggaatatatgctatctatagattcagtatctactacccatatttactttaccaaatatatttctcctcactgcataaggactactcttctcatattttcttctttgatgaagatatttttcaccaaagtttattttgtgatgccctcttggttttgatactttaaaatctgtggcacccgttctacatgaattatcaatatttggtaaattcaatctgtatttgttttgttaaagtcaaaaatctcattttccaaaaaaaaaaaaaaacccagttacggctcagtttagtctggaacttgagcaataaaattctctggcattccattattgatgtgctgatgaaccgggacttttaaaaatatttgtgttcctatacctttaccctttacctaacagactaatttgtactcagtaaaacaaaaatttatggtcaaaatttctaacttggttccatcacatttataagataaataaattaaattaatgaaaatgtgacttagagtaggggtagccctcaaaaatagatttatcatttactcattggaattttcttcaagtgttaaaggtacattttcactaggaaaagaaatcaaatatgcttatgcaatatatatttgtgtgtttttccttaatgttatatggtatatatgagccttcttgtttagtttcttttatctgctaagttgtaccttaattagagggcaatatatgtttcataaagaagagtctttataattttgtttgtcagatagtattttggaatttgtataataaggatgtttagaagccatataagtggctttttttaacagatagaatttgtatttttattgtactttaaaaagatttatgtaataggtatatatttagtggccatttattatcaatggtaacacaatggagtactaagatggtatttgcacatttaagatatgttactttaccaatttttaatggtaatcaactctgctactggcatgatgaaatagtacataactggtcattaattatgaacatttacttctccagtgcgtttttatgaagatctggttgaaaattgtatttctatgtaaactcaacgatatgtttggttttcctgaaaataaatgattttaaataaattaaa

SEQ ID NO: 417654 - DNA, 2137 bp, Homo sapiens
cagcaagtcaacatttgacatatagttatttattagttgatcaaagcatgaatatttcaactttagtgcatagtcttttttattcactgattttattttgctgtaagcatttcagatattaattattttattctgttttacaggaggggttcaaaatgggactaactcttgaaggcacagtattttgtctcgacccgttagacagtaggtgctgacatcaagaacaagaaatcctgattcatgttaaatgtgtttgtatacacatgtcatttattattattactttaagataggtattattcatgtgtcaatgtttttgaatattttaatattttgaaaattttctcagttaaatttcctcaccttcactattgatctgtaatttttattttaaaaacagcttactgtaaagtagatcatacttttatgttcctttctgtttctactgtagatgaatttgtaattgaaagacatattatacaaatacctgccttgtgtctgagttctatttagttagcatcttgaaatttgtattcattttccagatggctagtttattaatgatttcccaaaagccataccttaaagataactttttaaattctgaagagacatgccaatgtcaaactaaacatgttctgtttttaaaccaacaaacatgttactattcattggacagatatcattttatgtataaatactgttcacatcactgggaaaatgtaaactttaaacataatgccacaaggtcactaatttctagcaggtaaaattataaggatataaattccaataataaaccaaatgtatttagagtatttattagtaaatgcaaggtgatgttagttatgatcagttatactctaaatatttaatttgttttataaaggtagtgaaaaaatgaaaatttgctatttattaaaaaacattaaatttcattccaaatgagataagtgatattactataacatctaagcatcatctgatttgatattccctaaaaaacatttggaatatatgctatctatagattcagtatctactacccatatttactttaccaaatatatttctcctcactgcataaggactactcttctcatattttcttctttgatgaagatatttttcaccaaagtttattttgtgatgccctcttggttttgatactttaaaatctgtggcacccgttctacatgaattatcaatatttggtaaattcaatctgtatttgttttgttaaagtcaaaaatctcattttccaaaaaaaaaaaaaaacccagttacggctcagtttagtctggaacttgagcaataaaattctctggcattccattattgatgtgctgatgaaccgggacttttaaaaatatttgtgttcctatacctttaccctttacctaacagactaatttgtactcagtaaaacaaaaatttatggtcaaaatttctaacttggttccatcacatttataagataaataaattaaattaatgaaaatgtgacttagagtaggggtagccctcaaaaatagatttatcatttactcattggaattttcttcaagtgttaaaggtacattttcactaggaaaagaaatcaaatatgcttatgcaatatatatttgtgtgtttttccttaatgttatatggtatatatgagccttcttgtttagtttcttttatctgctaagttgtaccttaattagagggcaatatatgtttcataaagaagagtctttataattttgtttgtcagatagtattttggaatttgtataataaggatgtttagaagccatataagtggctttttttaacagatagaatttgtatttttattgtactttaaaaagatttatgtaataggtatatatttagtggccatttattatcaatggtaacacaatggagtactaagatggtatttgcacatttaagatatgttactttaccaatttttaatggtaatcaactctgctactggcatgatgaaatagtacataactggtcattaattatgaacatttacttctccagtgcgtttttatgaagatctggttgaaaattgtatttctatgtaaactcaacgatatgtttggttttcctgaaaataaatgattttaaataaattaaa

SEQ ID NO: 417655 - DNA, 1453 bp, Homo sapiens
  misc_feature (156)..(156): n is a, c, g, or t
ggtgatgagcccttgggttctcgctccgactgctaaattcgcttggccgggtccaccttctcgtggcctcactcgccacacggatcagaatccggagcaggcagttctctctattctgaggctcctgcggctgccgcgctgacttccctgtgtggnggagggaactctgggcaggctggttttcttggaatgtgtttacgatgttgaatgggacttgaacaggaagctggacgctgcagctggaactagcgtgccaagttatttatgattccatctgatatacataggagagaaactgatagaagaattctgatggcaactgtatgatagaagctatataaagtcaagtgtccattttctttcaactatatttgagcatacccaggatttaagtcgtggaactgaacatttatttggctgatcctcatcatgaaccgtgcttttagcaggaagaaagacaaaacatggatgcatacacctgaagctttatcaaaacatttcattccctataatgcaaagtttcttggcagtacagaagtggaacagccaaaaggaacagaagttgtgagagatgctgtaaggaaactaaagtttgcaagacatatcaagaaatctgaaggccagaaaattcctaaagtggagttgcaaatatcaatttatggagtaaaaattctagaacccaaaacaaaggaagttcaacacaattgccagcttcatagaatatctttttgtgcagatgataaaactgacaagaggatattcactttcatatgcaaagattctgagtcaaataaacatttgtgctatgtatttgacagcgaaaagtgtgctgaagagatcactttaacaattggccaagcatttgacctggcatacaggaaatttctagaatcaggaggaaaagatgttgaaacaagaaaacagatcgcagggttacaaaaaagaatccaagacttagaaacagaaaatatggaacttaaaaataaagtacaagatttggaaaaccaactgagaataactcaagtatcagcacctccagcaggcagtatgacacctaagtcgccctccactgacatctttgatatgattccattttctccaatatcacaccagtcttcgatgcctactcgcaatggcacacagccacctccagtacctagtagatctactgagattaaacgggacctgtttggagcagaaccttttgacccatttaactgtggagcagcagatttccctccagatattcaatcaaaattagatgagatgcagggtttcatcatgttgtccagactgggcttgaactgctgggctcaagcgatctacccacttagacctcccaaagtgcttggaccacaggcatgagccaccatacttggccatgattgtttcttttagtccaatatttacttgcaaggtcactttaacaaaagtaaaataatattttcttcat

SEQ ID NO: 417656 - DNA, 700 bp, Homo sapiens
  misc_feature (8)..(8): n is a, c, g, or t
  misc_feature (10)..(10): n is a, c, g, or t
  misc_feature (17)..(17): n is a, c, g, or t
ccgaccgnanatataangaggtgcaatatcaatttatggagtaaaaattctagaacccaaaacaaaggaagttcaacacaattgccagcttcatagaatatctttttgtgcagatgataaaactgacaagaggatattcactttcatatgcaaagattctgagtcaaataaacatttgtgctatgtatttgacagcgaaaagtgtgctgaagagatcactttaacaattggccaagcatttgacctggcatacaggaaatttctagaatcaggaggaaaagatgttgaaacaagaaaacagatcgcagggttacaaaaaagaatccaagacttagaaacagaaaatatggaacttaaaaataaagtacaagatttggaaaaccaactgagaataactcaagtatcagcacctccagcaggcagtatgacacctaagtcgccctccactgacatctttgatatgattccattttctccaatatcacaccagtcttcgatgcctactcgcaatggcacacagccacctccagtacctagtagatctactgagattaaacgggacctgtttggagcagaaccttttgacccatttaactgtggagcagcagatttccctccagatattcaatcaaaattagatgagatgcagtttatatatggtagaatccagacagacaccaattatatgaagctgattgag

SEQ ID NO: 417657 - DNA, 3431 bp, Homo sapiens
  misc_feature (156)..(156): n is a, c, g, or t
ggtgatgagcccttgggttctcgctccgactgctaaattcgcttggccgggtccaccttctcgtggcctcactcgccacacggatcagaatccggagcaggcagttctctctattctgaggctcctgcggctgccgcgctgacttccctgtgtggnggagggaactctgggcaggctggttttcttggaatgtgtttacgatgttgaatgggacttgaacaggaagctggacgctgcagctggaactagcgtgccaagttatttatgattccatctgatatacataggagagaaactgatagaagaattctgatggcaactgtatgatagaagctatataaagtcaagtgtccattttctttcaactatatttgagcatacccaggatttaagtcgtggaactgaacatttatttggctgatcctcatcatgaaccgtgcttttagcaggaagaaagacaaaacatggatgcatacacctgaagctttatcaaaacatttcattccctataatgcaaagtttcttggcagtacagaagtggaacagccaaaaggaacagaagttgtgagagatgctgtaaggaaactaaagtttgcaagacatatcaagaaatctgaaggccagaaaattcctaaagtggagttgcaaatatcaatttatggagtaaaaattctagaacccaaaacaaaggaagttcaacacaattgccagcttcatagaatatctttttgtgcagatgataaaactgacaagaggatattcactttcatatgcaaagattctgagtcaaataaacatttgtgctatgtatttgacagcgaaaagtgtgctgaagagatcactttaacaattggccaagcatttgacctggcatacaggaaatttctagaatcaggaggaaaagatgttgaaacaagaaaacagatcgcagggttacaaaaaagaatccaagacttagaaacagaaaatatggaacttaaaaataaagtacaagatttggaaaaccaactgagaataactcaagtatcagcacctccagcaggcagtatgacacctaagtcgccctccactgacatctttgatatgattccattttctccaatatcacaccagtcttcgatgcctactcgcaatggcacacagccacctccagtacctagtagatctactgagattaaacgggacctgtttggagcagaaccttttgacccatttaactgtggagcagcagatttccctccagatattcaatcaaaattagatgagatgcaggaggggttcaaaatgggactaactcttgaaggcacagtattttgtctcgacccgttagacagtaggtgctgacatcaagaacaagaaatcctgattcatgttaaatgtgtttgtatacacatgtcatttattattattactttaagataggtattattcatgtgtcaatgtttttgaatattttaatattttgaaaattttctcagttaaatttcctcaccttcactattgatctgtaatttttattttaaaaacagcttactgtaaagtagatcatacttttatgttcctttctgtttctactgtagatgaatttgtaattgaaagacatattatacaaatacctgccttgtgtctgagttctatttagttagcatcttgaaatttgtattcattttccagatggctagtttattaatgatttcccaaaagccataccttaaagataactttttaaattctgaagagacatgccaatgtcaaactaaacatgttctgtttttaaaccaacaaacatgttactattcattggacagatatcattttatgtataaatactgttcacatcactgggaaaatgtaaactttaaacataatgccacaaggtcactaatttctagcaggtaaaattataaggatataaattccaataataaaccaaatgtatttagagtatttattagtaaatgcaaggtgatgttagttatgatcagttatactctaaatatttaatttgttttataaaggtagtgaaaaaatgaaaatttgctatttattaaaaaacattaaatttcattccaaatgagataagtgatattactataacatctaagcatcatctgatttgatattccctaaaaaacatttggaatatatgctatctatagattcagtatctactacccatatttactttaccaaatatatttctcctcactgcataaggactactcttctcatattttcttctttgatgaagatatttttcaccaaagtttattttgtgatgccctcttggttttgatactttaaaatctgtggcacccgttctacatgaattatcaatatttggtaaattcaatctgtatttgttttgttaaagtcaaaaatctcattttccaaaaaaaaaaaaaaacccagttacggctcagtttagtctggaacttgagcaataaaattctctggcattccattattgatgtgctgatgaaccgggacttttaaaaatatttgtgttcctatacctttaccctttacctaacagactaatttgtactcagtaaaacaaaaatttatggtcaaaatttctaacttggttccatcacatttataagataaataaattaaattaatgaaaatgtgacttagagtaggggtagccctcaaaaatagatttatcatttactcattggaattttcttcaagtgttaaaggtacattttcactaggaaaagaaatcaaatatgcttatgcaatatatatttgtgtgtttttccttaatgttatatggtatatatgagccttcttgtttagtttcttttatctgctaagttgtaccttaattagagggcaatatatgtttcataaagaagagtctttataattttgtttgtcagatagtattttggaatttgtataataaggatgtttagaagccatataagtggctttttttaacagatagaatttgtatttttattgtactttaaaaagatttatgtaataggtatatatttagtggccatttattatcaatggtaacacaatggagtactaagatggtatttgcacatttaagatatgttactttaccaatttttaatggtaatcaactctgctactggcatgatgaaatagtacataactggtcattaattatgaacatttacttctccagtgcgtttttatgaagatctggttgaaaattgtatttctatgtaaactcaacgatatgtttggttttcctgaaaataaatgattttaaataaattaaaaaaaaaacacacagcaacacctaacacaatgacacacaaacaaagggggcggaaaaatccgggccaatcgcccaccttttaaggcccacggctaaaaacagcgcgaaccgggaaaaaccggtttcaacccggcggtggccccataggaaaaaataacctcgttta

SEQ ID NO: 417658 - DNA, 3491 bp, Homo sapiens
  misc_feature (156)..(156): n is a, c, g, or t
ggtgatgagcccttgggttctcgctccgactgctaaattcgcttggccgggtccaccttctcgtggcctcactcgccacacggatcagaatccggagcaggcagttctctctattctgaggctcctgcggctgccgcgctgacttccctgtgtggnggagggaactctgggcaggctggttttcttggaatgtgtttacgatgttgaatgggacttgaacaggaagctggacgctgcagctggaactagcgtgccaagttatttatgattccatctgatatacataggagagaaactgatagaagaattctgatggcaactgtatgatagaagctatataaagtcaagtgtccattttctttcaactatatttgagcatacccaggatttaagtcgtggaactgaacatttatttggctgatcctcatcatgaaccgtgcttttagcaggaagaaagacaaaacatggatgcatacacctgaagctttatcaaaacatttcattccctataatgcaaagtttcttggcagtacagaagtggaacagccaaaaggaacagaagttgtgagagatgctgtaaggaaactaaagtttgcaagacatatcaagaaatctgaaggccagaaaattcctaaagtggagttgcaaatatcaatttatggagtaaaaattctagaacccaaaacaaaggaagttcaacacaattgccagcttcatagaatatctttttgtgcagatgataaaactgacaagaggatattcactttcatatgcaaagattctgagtcaaataaacatttgtgctatgtatttgacagcgaaaagtgtgctgaagagatcactttaacaattggccaagcatttgacctggcatacaggaaatttctagaatcaggaggaaaagatgttgaaacaagaaaacagatcgcagggttacaaaaaagaatccaagacttagaaacagaaaatatggaacttaaaaataaagtacaagatttggaaaaccaactgagaataactcaagtatcagcacctccactgctgcacaatatgtctgatcatgaacaacatgtgtttcagagatgctcatcctctttctggcgtagtaatggtgattcatctccctgtctcaatatttcttccatctctgtcactcctatcaactcgcctgattccagactatcactgggactgttaataccaccaccttctaaatgtggctttcccaagccagtcagtgagagcagcatcccaagacctcatgcaggcagtatgacacctaagtcgccctccactgacatctttgatatgattccattttctccaatatcacaccagtcttcgatgcctactcgcaatggcacacagccacctccagtacctagtagatctactgagattaaacgggacctgtttggagcagaaccttttgacccatttaactgtggagcagcagatttccctccagatattcaatcaaaattagatgagatgcaggaggggttcaaaatgggactaactcttgaaggcacagtattttgtctcgacccgttagacagtaggtgctgacatcaagaacaagaaatcctgattcatgttaaatgtgtttgtatacacatgtcatttattattattactttaagataggtattattcatgtgtcaatgtttttgaatattttaatattttgaaaattttctcagttaaatttcctcaccttcactattgatctgtaatttttattttaaaaacagcttactgtaaagtagatcatacttttatgttcctttctgtttctactgtagatgaatttgtaattgaaagacatattatacaaatacctgccttgtgtctgagttctatttagttagcatcttgaaatttgtattcattttccagatggctagtttattaatgatttcccaaaagccataccttaaagataactttttaaattctgaagagacatgccaatgtcaaactaaacatgttctgtttttaaaccaacaaacatgttactattcattggacagatatcattttatgtataaatactgttcacatcactgggaaaatgtaaactttaaacataatgccacaaggtcactaatttctagcaggtaaaattataaggatataaattccaataataaaccaaatgtatttagagtatttattagtaaatgcaaggtgatgttagttatgatcagttatactctaaatatttaatttgttttataaaggtagtgaaaaaatgaaaatttgctatttattaaaaaacattaaatttcattccaaatgagataagtgatattactataacatctaagcatcatctgatttgatattccctaaaaaacatttggaatatatgctatctatagattcagtatctactacccatatttactttaccaaatatatttctcctcactgcataaggactactcttctcatattttcttctttgatgaagatatttttcaccaaagtttattttgtgatgccctcttggttttgatactttaaaatctgtggcacccgttctacatgaattatcaatatttggtaaattcaatctgtatttgttttgttaaagtcaaaaatctcattttccaaaaaaaaaaaaaaacccagttacggctcagtttagtctggaacttgagcaataaaattctctggcattccattattgatgtgctgatgaaccgggacttttaaaaatatttgtgttcctatacctttaccctttacctaacagactaatttgtactcagtaaaacaaaaatttatggtcaaaatttctaacttggttccatcacatttataagataaataaattaaattaatgaaaatgtgacttagagtaggggtagccctcaaaaatagatttatcatttactcattggaattttcttcaagtgttaaaggtacattttcactaggaaaagaaatcaaatatgcttatgcaatatatatttgtgtgtttttccttaatgttatatggtatatatgagccttcttgtttagtttcttttatctgctaagttgtaccttaattagagggcaatatatgtttcataaagaagagtctttataattttgtttgtcagatagtattttggaatttgtataataaggatgtttagaagccatataagtggctttttttaacagatagaatttgtatttttattgtactttaaaaagatttatgtaataggtatatatttagtggccatttattatcaatggtaacacaatggagtactaagatggtatttgcacatttaagatatgttactttaccaatttttaatggtaatcaactctgctactggcatgatgaaatagtacataactggtcattaattatgaacatttacttctccagtgcgtttttatgaagatctggttgaaaattgtatttctatgtaaactcaacgatatgtttggttttcctgaaaataaatgattttaaataaattaaa

SEQ ID NO: 417659 - DNA, 1180 bp, Homo sapiens
  misc_feature (156)..(156): n is a, c, g, or t
ggtgatgagcccttgggttctcgctccgactgctaaattcgcttggccgggtccaccttctcgtggcctcactcgccacacggatcagaatccggagcaggcagttctctctattctgaggctcctgcggctgccgcgctgacttccctgtgtggnggagggaactctgggcaggctggttttcttggaatgtgtttacgatgttgaatgggacttgaacaggaagctggacgctgcagctggaactagcgtgccaagttatttatgattccatctgatatacataggagagaaactgatagaagaattctgatggcaactgtatgatagaagctatataaagtcaagtgtccattttctttcaactatatttgagcatacccaggatttaagtcgtggaactgaacatttatttggctgatcctcatcatgaaccgtgcttttagcaggaagaaagacaaaacatggatgcatacacctgaagctttatcaaaacatttcattccctataatgcaaagtttcttggcagtacagaagtggaacagccaaaaggaacagaagttgtgagagatgctgtaaggaaactaaagtttgcaagacatatcaagaaatctgaaggccagaaaattcctaaagtggagttgcaaatatcaatttatggagtaaaaattctagaacccaaaacaaaggaagttcaacacaattgccagcttcatagaatatctttttgtgcagatgataaaactgacaagaggatattcactttcatatgcaaagattctgagtcaaataaacatttgtgctatgtatttgacagcgaaaagtgtgctgaagagatcactttaacaattggccaagcatttgacctggcatacaggaaatttctagaatcaggaggaaaagatgttgaaacaagaaaacagatcgcagggttacaaaaaagaatccaagacttagaaacagaaaatatggaacttaaaaataaagtacaagatttggaaaaccaactgagaataactcaagtatcagcacctccagcaggcagtatgacacctaagtcgccctccactgacatctttgatatgattccattttctccaatatcacaccagtcttcgatgcctaccctttccaaaacacaaaatcactggcaagcgttctagatcgcgagcggccgct

SEQ ID NO: 417660 - DNA, 411 bp, Homo sapiens
ttgctttaggccttctaggatgtatggctgtttgtcatgcagcaacagataaccagaccaccacttaacagagggagcagtatcagtgatgcagcatcatccacacccaccaaacaactcactggaatgactgacctgttgtttaggaaaagtgaggatgcaaaagaaacttcagaaggttttacccagtaggattcaaagctatccaatgactatactactccctctacaacagaagtagtgagagtaaagacttgatatttatcttcaactaagctgccactgtcctttggactaaatctttgtgtatcacatcaatattttaataactcaaatctagatgtgccacctctatctcaggacaacctaattcttgagcacaaacatcattcctaacaataactcagtaac

SEQ ID NO: 417661 - DNA, 784 bp, Homo sapiens
atttggcagagcctcgccaatttggggcgcacctccccttcctgggatgctctcagaaggcaaaccaattcccagaagagagggaaaaacagccacaacagagagaacctttgctgtccctgtttggaaagagattgggatttcctggagagggcttgcttctactgcaggtttgtttaaaagctcaacatctattctggaagagaacaacgcagactccaggaagatggtggggcgtgtcattttggaatgtgtcttgctgctcttctcatcaaaggtaaagtcctcttcttcaccttttaacctagagtagctgtgcaactttctttgaccaatcaaatatggtggaagtgatgttgcgtgacttccagatataagtcttaaagagatttttcactttctgctttcactctcttggaatgttgccctgagatcaccacaccatgaagaagtctggggcgaaaggccatgtggagtgagaggctcagcttcccagatgatctcactgagcacagcccccagccacctgccagctcaatgcaacctggtgatggacccaagcaaataccagcagaagaatcacctggtcaacccacagaatcatgagaaatactaatttgttgttgtcttaagccacagggtgaagactatatttgctcacataaattgtgtccttataacagaaaaagcttcttagggctggtgcggtggcttattcctgtaatcccagcactttgggaggcggacgcaagcagatcacttgagttcaggagttctagaccag

SEQ ID NO: 417662 - DNA, 373 bp, Homo sapiens
atttggcagagcctcgccaatttggggcgcacctccccttcctgggatgctctcagaaggcaaaccaattcccagaagagagggaaaaacagccacaacagagagaacctttgctgtccctgtttggaaagagattgggatttcctggagagggcttgcttctactgcaggtttgtttaaaagctcaacatctattctggaagagaacaacgcagactccaggaagatggtgggaaacagataattgtcatccagactcttcaattagttacattttctttcttttttcttcttaatgaatgagaggcaaataaatctttggcattcccagtgcctctgaagtgtaaactccaccagatcatctagatgcaca

SEQ ID NO: 417663 - DNA, 402 bp, Homo sapiens
gtgcatgatactcaggaaggaacatggcctgagcacggaggtgaagggtggactgagggccctgggaagaccatctgcagtgacagtggggaggaggctagcgaggctctggacagttgcagtggggagccacaggaaccaccaagtgagggagggaccgaacaaaagccagtcatggtagaggctaggtggaaagcagggagcctcacaccctactggccagaagatcctcttagcgagcctctaacaggaagggtagcttctcttcaccctttgccagcaccaggggtctagaccaccggttcccttttgccatgttcccctcctccctcctttcctgcgtcatcccatctctgcctaccccccatgtatctatcttttggtttgttttttttttttctt

SEQ ID NO: 417664 - DNA, 716 bp, Homo sapiens
gaatgaaaaaaaaaaaaagaaaaaaaaaaaaaaagtcttgaatgtcctagtgttctagtgtttgcataattgcttttcatccctgctctctgctaattgcttttaaggatctctgctacatcctgcatttcccatcattgttggattttattgacttctcttagaaagccagcctgatatataaaattctattatcttgggacctttgcctgtgatgctgttatgcttttagggaagacagtggttggttccatgaaaatggacctgtctggaatacactggaatttcataatctatccagaaaaagataaagcccagatgataaataccagaaccttttgctcctgtctctttggcgaaaacaagtggtgtttggcttgctctggtgaaggggtcatgggctgtcacagaattcgaaaaagatattttgatattcaggccgggcacagtggctcacgcctgtaatcccagcactttgggcggccaaggcgggtggatcacgaggtcaagagattgagaccatcctggccaacatggtgaaaccctgtctctactgaaaatacaaaaattagctggacatggtggcacacacctgtaatctcagctacttgggaggctgaggcaggagaatcgcttgaacccaggaggcggaggttgcattgagccaagatcacaccactgtactccagcttggcgatagagcgaggctccatctc

SEQ ID NO: 417665 - DNA, 438 bp, Homo sapiens
gttgtttttaaggattaaatgagatattacatgtaatgtgctcatcccagtgcccagcacacaagaaatgttcaataaaataggaggcataattgtcctgtttgaatactagataacccttttaatggatattctacaattatgaatctaaggtgctttggaggagcctaggcaatctattccaaaattaaatgtaaggaaggtacatgagtaagggatggagtaggccctggaccaacactagagctccaaatttcctaaaaagcttgagcttcttttactgtggccacgcctataatgggaataaatctggttcttcaaacagtccctcccctctctaagctctgctgggagtagagacatcagcaggctggttctgtgtttagctcctccccatcttgactctcatcccattcctctttcctactaccaattcag

SEQ ID NO: 417666 - DNA, 479 bp, Homo sapiens
cccatagctaggtgttgccagggtttttcaaatttcttcctggaggggaagttgatgagtacagcttattcctagctccactgttagcacctcacaggtgttcttgtactgcatttcctcttgattgaggaacagttttttattgcatccatctttttgaacttttggtgtacagacatgactattaactccagaatttgcacagctgtctcaacctgcccttacaacatctaatatgttagcagtatacctactagcatgcagtgtgtgccctcaattccctattgcatttgtgtttatgtgagtttcagtcttttaatccatgtaagggatatagagaagggcatacccaggccgggtgcagtggctcacgcttctaatcccaccactttgtgatgccaaggtgggcagatcacgaggtcaggagttcgagaccagcctgaccaacatactgaagccctgtctctactaaaaataca

SEQ ID NO: 417667 - DNA, 4473 bp, Homo sapiens
ctgcagtggatggtaaagtcacgggtcattagcgagctacaggaggcctgctgggacatggtatctgccatggcggcgactgcggcaaagcgagagcctcggagacgccgctgccgccagcacagccggagacctgagccgacactgggggcagtccgcgagccccgcactctctcgatgagtcggagaagtcccgttgtatcagagtaagatggacggtagctttgattgtgattgtggtgagctggagccacctgatcactaacaaaagacatcttctgttaaccaacagccgccagggcttcctgttgaaataaatatatagcaacaaaggaaaaaaagaagcaaaacggaaatagtgcttaccagcaccttagaatgatgctgctcaggaccagtccaacactgaatgtatctgcactgtgaggagaatgttcatagaagcctgttgtgtgcatatttattcacatttttgttaaatgttaaatcgtttagcacggtaatctgagtgcacagtatgtcatttcattccgtttgagtttcttgttttcgttaaatgtctgcagagttgctgcccctttcttgaactatgagtactgcaatctttttaattctcaatatgaatagagctttttgagctttaaatctaaggggaactcgacaggcctgtttggcatatgcaatgaacatcaagaaaccatcttgctgtggaagcataattatttttcttctccctttttgaaagatctttccttttgatgccagttttcttccttgtttacacaagttcaatttgaaaggaaaaggcaatagtaagggtttcaaaatggcagagaaatttgaaagtctcatgaacattcatggttttgatctgggttctaggtatatggacttaaaaccattgggttgtggaggcaatggcttggttttttctgctgtagacaatgactgtgacaaaagagtagccatcaagaaaattgtccttactgatccccagagtgtcaaacatgctctacgtgaaatcaaaattattagaagacttgaccatgataacattgtgaaagtgtttgagattcttggtcccagtggaagccaattaacagacgatgtgggctctcttacggaactgaacagtgtttacattgttcaggagtacatggagacagacttggctaatgtgctggagcagggccctttactggaagagcatgccaggcttttcatgtatcagctgctacgggggctcaagtatattcactctgcaaatgtactgcacagagatctcaaaccagctaatcttttcattaatacggaagacttggtgctgaagataggtgactttggtcttgcacggatcatggatcctcattattcccataagggtcatctttctgaaggattggttactaaatggtacagatctccacgtcttttactttctcctaataattatactaaagccattgacatgtgggctgcaggctgcatctttgctgaaatgctgactggtaaaaccctttttgcaggtgcacatgaacttgaacagatgcagctgattttagaatctattcctgttgtacatgaggaagatcgtcaggagcttctcagcgtaattccagtttacattagaaatgacatgactgagccacacaaacctttaactcagctgcttccaggaattagtcgagaagcactggatttcctggaacaaattttgacatttagccccatggatcggttaacagcagaagaagcactctcccatccttacatgagcatatattcttttccaatggatgagccaatttcaagccatccttttcatattgaagatgaagttgatgatattttgcttatggatgaaactcacagtcacatttataactgggaaaggtatcatgattgtcagttttcagagcatgattggcctgtacataacaactttgatattgatgaagttcagcttgatccaagagctctgtccgatgtcactgatgaagaagaagtacaagttgatccccgaaaatatttggatggagatcgggaaaagtatctggaggatcctgcttttgataccaattactctactgagccttgttggcaatactcagatcatcatgaaaacaaatattgtgatctggagtgtagccatacttgtaactacaaaacgaggtcatcatcatatttagataacttagtttggagagagagtgaagttaaccattactatgaacccaagcttattatagatctttccaattggaaagaacaaagcaaagaaaaatctgataagaaaggcaaatcaaaatgtgaaaggaatggattggttaaagcccagatagcgctagaggaagcatcacagcaactggctggaaaagaaagggaaaagaatcagggatttgattttgattcctttattgcaggaactattcagcttagttcccagcatgagcctactgatgttgttgataaattaaatgacttgaatagctcagtgtcccaactagaattgaaaagtttgatatcaaagtcagtaagccaagaaaaacaggaaaaaggaatggcaaatctggctcaattagaagccttgtaccagtcttcttgggacagccagtttgtgagtggtggggaggactgttttttcataaatcagttttgtgaggtaaggaaggatgaacaagttgagaaggaaaacacttacactagttacttggacaagttctttagcaggaaagaagatactgaaatgctagaaactgagccagtagaggatgggaagcttggggagagaggacatgaggaaggatttctgaacaacagtggggagttcctctttaacaagcagctcgagtccataggcatcccacagtttcacagtccagttgggtcaccacttaagtcaatacaggccacattaacaccttctgctatgaaatcttcccctcaaattcctcatcaaacatacagcagcattctgaaacatctgaactaaaacactcagcagacatttatctttgtattcttcatgaaatgtgttttgtctttttttattactagtgtttaagtcattttttacttgaatcagatggtgtcatttagtaaggattttatgagttcttgttttttaaaatccagactttctttttctacatgtgagatagttttcattttaactggcatgtcatttgcacacaaaaataaagactagagcaaaataatgcaacgcaggaggagaaaagaaatgcactaagacaagaacattctctcatagaacattgatctgttttacaggaaacaaaccttgccttgaaatttacacagtgagactgtacataattgcatgaaaatagctatttttttcctaagacatttttcattcatgaatattttcaagtttttcatactgtacacatttcttaaaacacatgataccagcagcaactgaaaatgaatgccgaatttggtacacatgtgttatctacctcaaggtaacaagagtatgtggcaaaacatataccacccatagtgcttcacaaaatgcacttctatttagccagcgtttattgtagtaaactattcttaataaaactcactcactgtttataaatgttctggtatgcattctttatagtgaagtgttaatacatcacatcttatttattttagcaaatcagtatattttctgtatttaattataaaaaattaacttagtttttaaaatttatttgcaaatatactttttccatttggcactatggtttgttgcctacctagctgcatctataatgtcagcttatcctaaggctgtccacgtacttaatttacttaagtgttcattttaagtaacgtgctcactgtgtataggaatttgtattttggaggtgcttgatctatctacaaagaaaaattaattaggaattactttattataaaatgctcctagaagtcttaattgtgtttattttttaaaaaaacaaatgttagacttgtgtgcatggaagtaattaaggtacatcattattgtagtttgaaagttgtacatgataagacattttgtttttactgtatgtttttactgaatgatctattccccatcccaaggcaagcatgaataaaattaggttaaacgtagcatgtggcatcgcagtctcttagaatttgtttcatctattttattttattgaatactgtctgtatctttggttatcctgtttgaagaaaaaggacaaataaaacatggccagcaaatacagctcctgtttcactcttgggttaatgaaaattttctgctagaatgaaaattactaccagaatcactttgaattatggccataaattgctagtctgaaaggctgagaaggttcaagtcttttgacttaaaccatcacatattagaatggaataaagctttataatatttcaaaactgttaggtaaaatgtgtagttgaaactttgaactgtgcagtcagaaa

SEQ ID NO: 417668 - DNA, 4456 bp, Homo sapiens
accgcgaagccccgccccctcttcctcgccctctctcgcgggtcggggttacatggcggcgactgcggcaaagcgagagcctcggagacgccgctgccgccagcacagccggagacctgagccgacactgggggcagtccgcgagccccgcactctctcgatgagtcggagaagtcccgttgtatcagagtaagatggacggtagctttgattgtgattgtggtgagctggagccacctgatcactaacaaaagacatcttctgttaaccaacagccgccagggcttcctgttgaaataaatatatagcaacaaaggaaaaaaagaagcaaaacggaaatagtgcttaccagcaccttagaatgatgctgctcaggaccagtccaacactgaatgtatctgcactgtgaggagaatgttcatagaagcctgttgtgtgcatatttattcacatttttgttaaatgttaaatcgtttagcacggtaatctgagtgcacagtatgtcatttcattccgtttgagtttcttgttttcgttaaatgtctgcagagttgctgcccctttcttgaactatgagtactgcaatctttttaattctcaatatgaatagagctttttgagctttaaatctaaggggaactcgacaggcctgtttggcatatgcaatgaacatcaagaaaccatcttgctgtggaagcataattatttttcttctccctttttgaaagatctttccttttgatgccagttttcttccttgtttacacaagttcaatttgaaaggaaaaggcaatagtaagggtttcaaaatggcagagaaatttgaaagtctcatgaacattcatggttttgatctgggttctaggtatatggacttaaaaccattgggttgtggaggcaatggcttggttttttctgctgtagacaatgactgtgacaaaagagtagccatcaagaaaattgtccttactgatccccagagtgtcaaacatgctctacgtgaaatcaaaattattagaagacttgaccatgataacattgtgaaagtgtttgagattcttggtcccagtggaagccaattaacagacgatgtgggctctcttacggaactgaacagtgtttacattgttcaggagtacatggagacagacttggctaatgtgctggagcagggccctttactggaagagcatgccaggcttttcatgtatcagctgctacgggggctcaagtatattcactctgcaaatgtactgcacagagatctcaaaccagctaatcttttcattaatacggaagacttggtgctgaagataggtgactttggtcttgcacggatcatggatcctcattattcccataagggtcatctttctgaaggattggttactaaatggtacagatctccacgtcttttactttctcctaataattatactaaagccattgacatgtgggctgcaggctgcatctttgctgaaatgctgactggtaaaaccctttttgcaggtgcacatgaacttgaacagatgcagctgattttagaatctattcctgttgtacatgaggaagatcgtcaggagcttctcagcgtaattccagtttacattagaaatgacatgactgagccacacaaacctttaactcagctgcttccaggaattagtcgagaagcactggatttcctggaacaaattttgacatttagccccatggatcggttaacagcagaagaagcactctcccatccttacatgagcatatattcttttccaatggatgagccaatttcaagccatccttttcatattgaagatgaagttgatgatattttgcttatggatgaaactcacagtcacatttataactgggaaaggtatcatgattgtcagttttcagagcatgattggcctgtacataacaactttgatattgatgaagttcagcttgatccaagagctctgtccgatgtcactgatgaagaagaagtacaagttgatccccgaaaatatttggatggagatcgggaaaagtatctggaggatcctgcttttgataccaattactctactgagccttgttggcaatactcagatcatcatgaaaacaaatattgtgatctggagtgtagccatacttgtaactacaaaacgaggtcatcatcatatttagataacttagtttggagagagagtgaagttaaccattactatgaacccaagcttattatagatctttccaattggaaagaacaaagcaaagaaaaatctgataagaaaggcaaatcaaaatgtgaaaggaatggattggttaaagcccagatagcgctagaggaagcatcacagcaactggctggaaaagaaagggaaaagaatcagggatttgattttgattcctttattgcaggaactattcagcttagttcccagcatgagcctactgatgttgttgataaattaaatgacttgaatagctcagtgtcccaactagaattgaaaagtttgatatcaaagtcagtaagccaagaaaaacaggaaaaaggaatggcaaatctggctcaattagaagccttgtaccagtcttcttgggacagccagtttgtgagtggtggggaggactgttttttcataaatcagttttgtgaggtaaggaaggatgaacaagttgagaaggaaaacacttacactagttacttggacaagttctttagcaggaaagaagatactgaaatgctagaaactgagccagtagaggatgggaagcttggggagagaggacatgaggaaggatttctgaacaacagtggggagttcctctttaacaagcagctcgagtccataggcatcccacagtttcacagtccagttgggtcaccacttaagtcaatacaggccacattaacaccttctgctatgaaatcttcccctcaaattcctcatcaaacatacagcagcattctgaaacatctgaactaaaacactcagcagacatttatctttgtattcttcatgaaatgtgttttgtctttttttattactagtgtttaagtcattttttacttgaatcagatggtgtcatttagtaaggattttatgagttcttgttttttaaaatccagactttctttttctacatgtgagatagttttcattttaactggcatgtcatttgcacacaaaaataaagactagagcaaaataatgcaacgcaggaggagaaaagaaatgcactaagacaagaacattctctcatagaacattgatctgttttacaggaaacaaaccttgccttgaaatttacacagtgagactgtacataattgcatgaaaatagctatttttttcctaagacatttttcattcatgaatattttcaagtttttcatactgtacacatttcttaaaacacatgataccagcagcaactgaaaatgaatgccgaatttggtacacatgtgttatctacctcaaggtaacaagagtatgtggcaaaacatataccacccatagtgcttcacaaaatgcacttctatttagccagcgtttattgtagtaaactattcttaataaaactcactcactgtttataaatgttctggtatgcattctttatagtgaagtgttaatacatcacatcttatttattttagcaaatcagtatattttctgtatttaattataaaaaattaacttagtttttaaaatttatttgcaaatatactttttccatttggcactatggtttgttgcctacctagctgcatctataatgtcagcttatcctaaggctgtccacgtacttaatttacttaagtgttcattttaagtaacgtgctcactgtgtataggaatttgtattttggaggtgcttgatctatctacaaagaaaaattaattaggaattactttattataaaatgctcctagaagtcttaattgtgtttattttttaaaaaaacaaatgttagacttgtgtgcatggaagtaattaaggtacatcattattgtagtttgaaagttgtacatgataagacattttgtttttactgtatgtttttactgaatgatctattccccatcccaaggcaagcatgaataaaattaggttaaacgtagcatgtggcatcgcagtctcttagaatttgtttcatctattttattttattgaatactgtctgtatctttggttatcctgtttgaagaaaaaggacaaataaaacatggccagcaaatacagctcctgtttcactcttgggttaatgaaaattttctgctagaatgaaaattactaccagaatcactttgaattatggccataaattgctagtctgaaaggctgagaaggttcaagtcttttgacttaaaccatcacatattagaatggaataaagctttataatatttcaaaactgttaggtaaaatgtgtagttgaaactttgaactgtgcagtcagaaa

SEQ ID NO: 417669 - DNA, 4131 bp, Homo sapiens
ctgcagtggatggtaaagtcacgggtcattagcgagctacaggaggcctgctgggacatggtatctgccatggcggcgactgcggcaaagcgagagcctcggagacgccgctgccgccagcacagccggagacctgagccgacactgggggcagtccgcgagccccgcactctctcgatgagtcggagaagtcccgttgtatcagagtaagatggacggtagctttgattgtgattgtggtgagctggagccacctgatcactaacaaaagacatcttctgttaaccaacagccgccagggcttcctgttgaaataaatatatagcaacaaaggaaaaaaagaagcaaaacggaaatagtgcttaccagcaccttagaatgatgctgctcaggaccagtccaacactgaatgtatctgcactgtgaggagaatgttcatagaagcctgttgtgtgcatatttattcacatttttgttaaatgttaaatcgtttagcacggtaatctgagtgcacagtatgtcatttcattccgtttgagtttcttgttttcgttaaatgtctgcagagttgctgcccctttcttgaactatgagtactgcaatctttttaattctcaatatgaatagagctttttgagctttaaatctaaggggaactcgacaggcctgtttggcatatgcaatgaacatcaagaaaccatcttgctgtggaagcataattatttttcttctccctttttgaaagatctttccttttgatgccagttttcttccttgtttacacaagttcaatttgaaaggaaaaggcaatagtaagggtttcaaaatggcagagaaatttgaaagtctcatgaacattcatggttttgatctgggttctaggtatatggacttaaaaccattgggttgtggaggcaatggcttggttttttctgctgtagacaatgactgtgacaaaagagtagccatcaagaaaattgtccttactgatccccagagtgtcaaacatgctctacgtgaaatcaaaattattagaagacttgaccatgataacattgtgaaagtgtttgagattcttggtcccagtggaagccaattaacagacgatgtgggctctcttacggaactgaacagtgtttacattgttcaggagtacatggagacagacttggctaatgtgctggagcagggccctttactggaagagcatgccaggcttttcatgtatcagctgctacgggggctcaagtatattcactctgcaaatgtactgcacagagatctcaaaccagctaatcttttcattaatacggaagacttggtgctgaagataggtgactttggtcttgcacggatcatggatcctcattattcccataagggtcatctttctgaaggattggttactaaatggtacagatctccacgtcttttactttctcctaataattatactaaagccattgacatgtgggctgcaggctgcatctttgctgaaatgctgactggtaaaaccctttttgcaggtgcacatgaacttgaacagatgcagctgattttagaatctattcctgttgtacatgaggaagatcgtcaggagcttctcagcgtaattccagtttacattagaaatgacatgactgagccacacaaacctttaactcagctgcttccaggaattagtcgagaagcactggatttcctggaacaaattttgacatttagccccatggatcggttaacagcagaagaagcactctcccatccttacatgagcatatattcttttccaatggatgagccaatttcaagccatccttttcatattgaagatgaagttgatgatattttgcttatggatgaaactcacagtcacatttataactgggaaaggtatcatgattgtcagttttcagagcatgattggcctgtacataacaactttgatattgatgaagttcagcttgatccaagagctctgtccgatgtcactgatgaagaagaagtacaagttgatccccgaaaatatttggatggagatcgggaaaagtatctggaggatcctgcttttgataccaattactctactgagccttgttggcaatactcagatcatcatgaaaacaaatattgtgatctggagtgtagccatacttgtaactacaaaacgaggtcatcatcatatttagataacttagtttggagagagagtgaagttaaccattactatgaacccaagcttattatagatctttccaattggaaagaacaaagcaaagaaaaatctgataagaaaggcaaatcaaaatgtgaaaggaatggattggttaaagcccagatagcgctagaggaagcatcacagcaactggctggaaaagaaagggaaaagaatcagggatttgattttgattcctttattgcaggaactattcagcttagttcccagcatgagcctactgatgttgttgataaattaaatgacttgaatagctcagtgtcccaactagaattgaaaagtttgatatcaaagtcagtaagccaagaaaaacaggaaaaaggaatggcaaatctggctcaattagaagccttgtaccagtcttcttgggacagccagtttgtgagtggtggggaggactgttttttcataaatcagttttgtgaggtaaggaaggatgaacaagttgagaaggaaaacacttacactagttacttggacaagttctttagcaggaaagaagatactgaaatgctagaaactgagccagtagaggatgggaagcttggggagagaggacatgaggaaggatttctgaacaacagtggggagttcctctttaacaagcagctcgagtccataggcatcccacagtttcacagtccagttgggtcaccacttaagtcaatacaggccacattaacaccttctgctatgaaatcttcccctcaaattcctcatcaaacatacagcagcattctgaaacatctgaactaaaacactcagcagacatttatctttgtattcttcatgaaatgtgttttgtctttttttattactagtgtttaagtcattttttacttgaatcagatggtgtcatttagtaaggattttatgagttcttgttttttaaaatccagactttctttttctacatgtgagatagttttcattttaactggcatgtcatttgcacacaaaaataaagactagagcaaaataatgcaacgcaggaggagaaaagaaatgcactaagacaagaacattctctcatagaacattgatctgttttacaggaaacaaaccttgccttgaaatttacacagtgagactgtacataattgcatgaaaatagctatttttttcctaagacatttttcattcatgaatattttcaagtttttcatactgtacacatttcttaaaacacatgataccagcagcaactgaaaatgaatgccgaatttggtacacatgtgttatctacctcaaggtaacaagagtatgtggcaaaacatataccacccatagtgcttcacaaaatgcacttctatttagccagcgtttattgtagtaaactattcttaataaaactcactcactgtttataaatgttctggtatgcattctttatagtgaagtgttaatacatcacatcttatttattttagcaaatcagtatattttctgtatttaattataaaaaattaacttagtttttaaaatttatttgcaaatatactttttccatttggcactatggtttgttgcctacctagctgcatctataatgtcagcttatcctaaggctgtccacgtacttaatttacttaagtgttcattttaagtaacgtgctcactgtgtataggaatttgtattttggaggtgcttgatctatctacaaagaaaaattaattaggaattactttattataaaatgctcctagaagtcttaattgtgtttattttttaaaaaaacaaatgttagacttgtgtgcatggaagtaattaaggtacatcattattgtagtttgaaagttgtacatgataagacattttgtttttactgtatgtttttactgaatgatctattccccatcccaaggcaagcatgaataaaattaggttaaacgta

SEQ ID NO: 417670 - DNA, 4419 bp, Homo sapiens
ctgcagtggatggtaaagtcacgggtcattagcgagctacaggaggcctgctgggacatggtatctgccatggcggcgactgcggcaaagcgagagcctcggagacgccgctgccgccagcacagccggagacctgagccgacactgggggcagtccgcgagccccgcactctctcgatgagtcggagaagtcccgttgtatcagagtaagatggacggtagctttgattgtgattgtggtgagctggagccacctgatcactaacaaaagacatcttctgttaaccaacagccgccagggcttcctgttgaaataaatatatagcaacaaaggaaaaaaagaatccaacactgaatgtatctgcactgtgaggagaatgttcatagaagcctgttgtgtgcatatttattcacatttttgttaaatgttaaatcgtttagcacggtaatctgagtgcacagtatgtcatttcattccgtttgagtttcttgttttcgttaaatgtctgcagagttgctgcccctttcttgaactatgagtactgcaatctttttaattctcaatatgaatagagctttttgagctttaaatctaaggggaactcgacaggcctgtttggcatatgcaatgaacatcaagaaaccatcttgctgtggaagcataattatttttcttctccctttttgaaagatctttccttttgatgccagttttcttccttgtttacacaagttcaatttgaaaggaaaaggcaatagtaagggtttcaaaatggcagagaaatttgaaagtctcatgaacattcatggttttgatctgggttctaggtatatggacttaaaaccattgggttgtggaggcaatggcttggttttttctgctgtagacaatgactgtgacaaaagagtagccatcaagaaaattgtccttactgatccccagagtgtcaaacatgctctacgtgaaatcaaaattattagaagacttgaccatgataacattgtgaaagtgtttgagattcttggtcccagtggaagccaattaacagacgatgtgggctctcttacggaactgaacagtgtttacattgttcaggagtacatggagacagacttggctaatgtgctggagcagggccctttactggaagagcatgccaggcttttcatgtatcagctgctacgggggctcaagtatattcactctgcaaatgtactgcacagagatctcaaaccagctaatcttttcattaatacggaagacttggtgctgaagataggtgactttggtcttgcacggatcatggatcctcattattcccataagggtcatctttctgaaggattggttactaaatggtacagatctccacgtcttttactttctcctaataattatactaaagccattgacatgtgggctgcaggctgcatctttgctgaaatgctgactggtaaaaccctttttgcaggtgcacatgaacttgaacagatgcagctgattttagaatctattcctgttgtacatgaggaagatcgtcaggagcttctcagcgtaattccagtttacattagaaatgacatgactgagccacacaaacctttaactcagctgcttccaggaattagtcgagaagcactggatttcctggaacaaattttgacatttagccccatggatcggttaacagcagaagaagcactctcccatccttacatgagcatatattcttttccaatggatgagccaatttcaagccatccttttcatattgaagatgaagttgatgatattttgcttatggatgaaactcacagtcacatttataactgggaaaggtatcatgattgtcagttttcagagcatgattggcctgtacataacaactttgatattgatgaagttcagcttgatccaagagctctgtccgatgtcactgatgaagaagaagtacaagttgatccccgaaaatatttggatggagatcgggaaaagtatctggaggatcctgcttttgataccaattactctactgagccttgttggcaatactcagatcatcatgaaaacaaatattgtgatctggagtgtagccatacttgtaactacaaaacgaggtcatcatcatatttagataacttagtttggagagagagtgaagttaaccattactatgaacccaagcttattatagatctttccaattggaaagaacaaagcaaagaaaaatctgataagaaaggcaaatcaaaatgtgaaaggaatggattggttaaagcccagatagcgctagaggaagcatcacagcaactggctggaaaagaaagggaaaagaatcagggatttgattttgattcctttattgcaggaactattcagcttagttcccagcatgagcctactgatgttgttgataaattaaatgacttgaatagctcagtgtcccaactagaattgaaaagtttgatatcaaagtcagtaagccaagaaaaacaggaaaaaggaatggcaaatctggctcaattagaagccttgtaccagtcttcttgggacagccagtttgtgagtggtggggaggactgttttttcataaatcagttttgtgaggtaaggaaggatgaacaagttgagaaggaaaacacttacactagttacttggacaagttctttagcaggaaagaagatactgaaatgctagaaactgagccagtagaggatgggaagcttggggagagaggacatgaggaaggatttctgaacaacagtggggagttcctctttaacaagcagctcgagtccataggcatcccacagtttcacagtccagttgggtcaccacttaagtcaatacaggccacattaacaccttctgctatgaaatcttcccctcaaattcctcatcaaacatacagcagcattctgaaacatctgaactaaaacactcagcagacatttatctttgtattcttcatgaaatgtgttttgtctttttttattactagtgtttaagtcattttttacttgaatcagatggtgtcatttagtaaggattttatgagttcttgttttttaaaatccagactttctttttctacatgtgagatagttttcattttaactggcatgtcatttgcacacaaaaataaagactagagcaaaataatgcaacgcaggaggagaaaagaaatgcactaagacaagaacattctctcatagaacattgatctgttttacaggaaacaaaccttgccttgaaatttacacagtgagactgtacataattgcatgaaaatagctatttttttcctaagacatttttcattcatgaatattttcaagtttttcatactgtacacatttcttaaaacacatgataccagcagcaactgaaaatgaatgccgaatttggtacacatgtgttatctacctcaaggtaacaagagtatgtggcaaaacatataccacccatagtgcttcacaaaatgcacttctatttagccagcgtttattgtagtaaactattcttaataaaactcactcactgtttataaatgttctggtatgcattctttatagtgaagtgttaatacatcacatcttatttattttagcaaatcagtatattttctgtatttaattataaaaaattaacttagtttttaaaatttatttgcaaatatactttttccatttggcactatggtttgttgcctacctagctgcatctataatgtcagcttatcctaaggctgtccacgtacttaatttacttaagtgttcattttaagtaacgtgctcactgtgtataggaatttgtattttggaggtgcttgatctatctacaaagaaaaattaattaggaattactttattataaaatgctcctagaagtcttaattgtgtttattttttaaaaaaacaaatgttagacttgtgtgcatggaagtaattaaggtacatcattattgtagtttgaaagttgtacatgataagacattttgtttttactgtatgtttttactgaatgatctattccccatcccaaggcaagcatgaataaaattaggttaaacgtagcatgtggcatcgcagtctcttagaatttgtttcatctattttattttattgaatactgtctgtatctttggttatcctgtttgaagaaaaaggacaaataaaacatggccagcaaatacagctcctgtttcactcttgggttaatgaaaattttctgctagaatgaaaattactaccagaatcactttgaattatggccataaattgctagtctgaaaggctgagaaggttcaagtcttttgacttaaaccatcacatattagaatggaataaagctttataatatttcaaaactgttaggtaaaatgtgtagttgaaactttgaactgtgcagtcagaaa

SEQ ID NO: 417671 - DNA, 2903 bp, Homo sapiens
accgcgaagccccgccccctcttcctcgccctctctcgcgggtcggggttacatggcggcgactgcggcaaagcgagagcctcggagacgccgctgccgccagcacagccggagacctgagccgacactgggggcagtccgcgagccccgcactctctcgatgagtcggagaagtcccgttgtatcagagtaagatggacggtagctttgattgtgattgtggtgagctggagccacctgatcactaacaaaagacatcttctgttaaccaacagccgccagggcttcctgttgaaataaatatatagcaacaaaggaaaaaaagaagcaaaacggaaatagtgcttaccagcaccttagaatgatgctgctcaggaccagtccaacactgaatgtatctgcactgtgaggagaatgttcatagaagcctgttgtgtgcatatttattcacatttttgttaaatgttaaatcgtttagcacggtaatctgagtgcacagtatgtcatttcattccgtttgagtttcttgttttcgttaaatgtctgcagagttgctgcccctttcttgaactatgagtactgcaatctttttaattctcaatatgaatagagctttttgagctttaaatctaaggggaactcgacaggcctgtttggcatatgcaatgaacatcaagaaaccatcttgctgtggaagcataattatttttcttctccctttttgaaagatctttccttttgatgccagttttcttccttgtttacacaagttcaatttgaaaggaaaaggcaatagtaagggtttcaaaatggcagagaaatttgaaagtctcatgaacattcatggttttgatctgggttctaggtatatggacttaaaaccattgggttgtggaggcaatggcttggttttttctgctgtagacaatgactgtgacaaaagagtagccatcaagaaaattgtccttactgatccccagagtgtcaaacatgctctacgtgaaatcaaaattattagaagacttgaccatgataacattgtgaaagtgtttgagattcttggtcccagtggaagccaattaacagacgatgtgggctctcttacggaactgaacagtgtttacattgttcaggagtacatggagacagacttggctaatgtgctggagcagggccctttactggaagagcatgccaggcttttcatgtatcagctgctacgggggctcaagtatattcactctgcaaatgtactgcacagagatctcaaaccagctaatcttttcattaatacggaagacttggtgctgaagataggtgactttggtcttgcacggatcatggatcctcattattcccataagggtcatctttctgaaggattggttactaaatggtacagatctccacgtcttttactttctcctaataattatactaaagccattgacatgtgggctgcaggctgcatctttgctgaaatgctgactggtaaaaccctttttgcaggtgcacatgaacttgaacagatgcagctgattttagaatctattcctgttgtacatgaggaagatcgtcaggagcttctcagcgtaattccagtttacattagaaatgacatgactgagccacacaaacctttaactcagctgcttccaggaattagtcgagaagcactggatttcctggaacaaattttgacatttagccccatggatcggttaacagcagaagaagcactctcccatccttacatgagcatatattcttttccaatggatgagccaatttcaagccatccttttcatattgaagatgaagttgatgatattttgcttatggatgaaactcacagtcacatttataactgggaaaggtatcatgattgtcagttttcagagcatgattggcctgtacataacaactttgatattgatgaagttcagcttgatccaagagctctgtccgatgtcactgatgaagaagaagtacaagttgatccccgaaaatatttggatggagatcgggaaaagtatctggaggatcctgcttttgataccaattactctactgagccttgttggcaatactcagatcatcatgaaaacaaatattgtgatctggagtgtagccatacttgtaactacaaaacgaggtcatcatcatatttagataacttagtttggagagagagtgaagttaaccattactatgaacccaagcttattatagatctttccaattggaaagaacaaagcaaagaaaaatctgataagaaaggcaaatcaaaatgtgaaaggaatggattggttaaagcccagatagcgctagaggaagcatcacagcaactggctggaaaagaaagggaaaagaatcagggatttgattttgattcctttattgcaggaactattcagcttagttcccagcatgagcctactgatgttgttgataaattaaatgacttgaatagctcagtgtcccaactagaattgaaaagtttgatatcaaagtcagtaagccaagaaaaacaggaaaaaggaatggcaaatctggctcaattagaagccttgtaccagtcttcttgggacagccagtttgtgagtggtggggaggactgttttttcataaatcagttttgtgaggtaaggaaggatgaacaagttgagaaggaaaacacttacactagttacttggacaagttctttagcaggaaagaagatactgaaatgctagaaactgagccagtagaggatgggaagcttggggagagaggacatgaggaaggatttctgaacaacagtggggagttcctctttaacaagcagctcgagtccataggcatcccacagtttcacagtccagttgggtcacgtcgacgcggccgcggtcgacgcggccgc

SEQ ID NO: 417672 - DNA, 1559 bp, Homo sapiens
caatgaaccatggattaccgtaattcggagctccggtacccctttgagtggtcaactgtcctgaaacatctgaactaaaacactcagcagacatttatctttgtattcttcatgaaatgtgttttgtctttttttattactagtgtttaagtcattttttacttgaatcagatggtgtcatttagtaaggattttatgagttcttgttttttaaaatccagactttctttttctacatgtgagatagttttcattttaactggcatgtcatttgcacacaaaaataaagactagagcaaaataatgcaacgcaggaggagaaaagaaatgcactaagacaagaacattctctcatagaacattgatctgttttacaggaaacaaaccttgccttgaaatttacacagtgagactgtacataattgcatgaaaatagctatttttttcctaagacatttttcattcatgaatattttcaagtttttcatactgtacacatttcttaaaacacatgataccagcagcaactgaaaatgaatgccgaatttggtacacatgtgttatctacctcaaggtaacaagagtatgtggcaaaacatataccacccatagtgcttcacaaaatgcacttctatttagccagcgtttattgtagtaaactattcttaataaaactcactcactgtttataaatgttctggtatgcattctttatagtgaagtgttaatacatcacatcttatttattttagcaaatcagtatattttctgtatttaattataaaaaattaacttagtttttaaaatttatttgcaaatatactttttccatttggcactatggtttgttgcctacctagctgcatctataatgtcagcttatcctaaggctgtccacgtacttaatttacttaagtgttcattttaagtaacgtgctcactgtgtataggaatttgtattttggaggtgcttgatctatctacaaagaaaaattaattaggaattactttattataaaatgctcctagaagtcttaattgtgtttattttttaaaaaaacaaatgttagacttgtgtgcatggaagtaattaaggtacatcattattgtagtttgaaagttgtacatgataagacattttgtttttactgtatgtttttactgaatgatctattccccatcccaaggcaagcatgaataaaattaggttaaacgtagcatgtggcatcgcagtctcttagaatttgtttcatctattttattttattgaatactgtctgtatctttggttatcctgtttgaagaaaaaggacaaataaaacatggccagcaaatacagctcctgtttcactcttgggttaatgaaaattttctgctagaatgaaaattactaccagaatcactttgaattatggccataaattgctagtctgaaaggctgagaaggttcaagtcttttgacttaaaccatcacatattagaatggaataaagctttataatatttcaaaactgttaggtaaaatgtgtagttgaaactttgaactgtgcagtcagaaa

SEQ ID NO: 417673 - DNA, 1280 bp, Homo sapiens
ggaggcgatctagaggatccctcataggttcgcaggaggagaaaagaaatgcactaagacaagaacattctctcatagaacattgatctgttttacaggaaacaaaccttgccttgaaatttacacagtgagactgtacataattgcatgaaaatagctatttttttcctaagacatttttcattcatgaatattttcaagtttttcatactgtacacatttcttaaaacacatgataccagcagcaactgaaaatgaatgccgaatttggtacacatgtgttatctacctcaaggtaacaagagtatgtggcaaaacatataccacccatagtgcttcacaaaatgcacttctatttagccagcgtttattgtagtaaactattcttaataaaactcactcactgtttataaatgttctggtatgcattctttatagtgaagtgttaatacatcacatcttatttattttagcaaatcagtatattttctgtatttaattataaaaaattaacttagtttttaaaatttatttgcaaatatactttttccatttggcactatggtttgttgcctacctagctgcatctataatgtcagcttatcctaaggctgtccacgtacttaatttacttaagtgttcattttaagtaacgtgctcactgtgtataggaatttgtattttggaggtgcttgatctatctacaaagaaaaattaattaggaattactttattataaaatgctcctagaagtcttaattgtgtttattttttaaaaaaacaaatgttagacttgtgtgcatggaagtaattaaggtacatcattattgtagtttgaaagttgtacatgataagacattttgtttttactgtatgtttttactgaatgatctattccccatcccaaggcaagcatgaataaaattaggttaaacgtagcatgtggcatcgcagtctcttagaatttgtttcatctattttattttattgaatactgtctgtatctttggttatcctgtttgaagaaaaaggacaaataaaacatggccagcaaatacagctcctgtttcactcttgggttaatgaaaattttctgctagaatgaaaattactaccagaatcactttgaattatggccataaattgctagtctgaaaggctgagaaggttcaagtcttttgacttaaaccatcacatattagaatggaataaagctttataatatttcaaaactgttaggtaaaatgtgtagttgaaactttgaactgtgcagtcagaaa

SEQ ID NO: 417674 - DNA, 331 bp, Homo sapiens
gtgaattgctgataacatttttgtaagctatttttgattaagggtaatttgtcacttaatgaccataattaagtttaatgtaccagtagtagtttattgctaaatgcctactttgtgtcatactacaaatttgaagaaaagagtatttcctgcaatggtgactctcttctttttctcatccccccaggttgtatcagagtaagatggacggtagctttgattgtgattgtggtgagctggagccacctgatcactaacaaaagacatcttctgttaaccaacagccgccagggcttcctgttgaaataaatatatagcaacaaaggaaaaa

SEQ ID NO: 417675 - DNA, 495 bp, Homo sapiens
cactcagccagaaaatcgtttttaagttgtaaatcaggtaagttttatttctgacaaattaactttttaattgtgtagtccatttttcccttttataagatggggacctattagtacaattaagatgctcatttcctgttgtgtagtatgtagtgctaaggtaatcacttagctagtcattgaaataaatgagatcaacatttactgtttttctaaaggtaagcaattcttttctgaaaaacttttaccttttcctctgcagcactggatttcctggaacaaattttgacatttagccccatggatcggttaacagcagaagaagcactctcccatccttacatgagcatatattcttttccaatggatgagccaatttcaagccatccttttcatattgaagatgaagttgatgatattttgcttatggatgaaactcacagtcacatttataactgggaaaggtaaattgatcctaaattagaaaaataatat

SEQ ID NO: 417676 - DNA, 4553 bp, Homo sapiens
ctgcagtggatggtaaagtcacgggtcattagcgagctacaggaggcctgctgggacatggtatctgccatggcggcgactgcggcaaagcgagagcctcggagacgccgctgccgccagcacagccggagacctgagccgacactgggggcagtccgcgagccccgcactctctcgatgagtcggagaagtcccaactgactttacagtgtacatttatcagaaatgtaaaacatgactgagctttaaggaattgtctacgttaaggcaagaaggttgtatcagagtaagatggacggtagctttgattgtgattgtggtgagctggagccacctgatcactaacaaaagacatcttctgttaaccaacagccgccagggcttcctgttgaaataaatatatagcaacaaaggaaaaaaagaagcaaaacggaaatagtgcttaccagcaccttagaatgatgctgctcaggaccagtccaacactgaatgtatctgcactgtgaggagaatgttcatagaagcctgttgtgtgcatatttattcacatttttgttaaatgttaaatcgtttagcacggtaatctgagtgcacagtatgtcatttcattccgtttgagtttcttgttttcgttaaatgtctgcagagttgctgcccctttcttgaactatgagtactgcaatctttttaattctcaatatgaatagagctttttgagctttaaatctaaggggaactcgacaggcctgtttggcatatgcaatgaacatcaagaaaccatcttgctgtggaagcataattatttttcttctccctttttgaaagatctttccttttgatgccagttttcttccttgtttacacaagttcaatttgaaaggaaaaggcaatagtaagggtttcaaaatggcagagaaatttgaaagtctcatgaacattcatggttttgatctgggttctaggtatatggacttaaaaccattgggttgtggaggcaatggcttggttttttctgctgtagacaatgactgtgacaaaagagtagccatcaagaaaattgtccttactgatccccagagtgtcaaacatgctctacgtgaaatcaaaattattagaagacttgaccatgataacattgtgaaagtgtttgagattcttggtcccagtggaagccaattaacagacgatgtgggctctcttacggaactgaacagtgtttacattgttcaggagtacatggagacagacttggctaatgtgctggagcagggccctttactggaagagcatgccaggcttttcatgtatcagctgctacgggggctcaagtatattcactctgcaaatgtactgcacagagatctcaaaccagctaatcttttcattaatacggaagacttggtgctgaagataggtgactttggtcttgcacggatcatggatcctcattattcccataagggtcatctttctgaaggattggttactaaatggtacagatctccacgtcttttactttctcctaataattatactaaagccattgacatgtgggctgcaggctgcatctttgctgaaatgctgactggtaaaaccctttttgcaggtgcacatgaacttgaacagatgcagctgattttagaatctattcctgttgtacatgaggaagatcgtcaggagcttctcagcgtaattccagtttacattagaaatgacatgactgagccacacaaacctttaactcagctgcttccaggaattagtcgagaagcactggatttcctggaacaaattttgacatttagccccatggatcggttaacagcagaagaagcactctcccatccttacatgagcatatattcttttccaatggatgagccaatttcaagccatccttttcatattgaagatgaagttgatgatattttgcttatggatgaaactcacagtcacatttataactgggaaaggtatcatgattgtcagttttcagagcatgattggcctgtacataacaactttgatattgatgaagttcagcttgatccaagagctctgtccgatgtcactgatgaagaagaagtacaagttgatccccgaaaatatttggatggagatcgggaaaagtatctggaggatcctgcttttgataccaattactctactgagccttgttggcaatactcagatcatcatgaaaacaaatattgtgatctggagtgtagccatacttgtaactacaaaacgaggtcatcatcatatttagataacttagtttggagagagagtgaagttaaccattactatgaacccaagcttattatagatctttccaattggaaagaacaaagcaaagaaaaatctgataagaaaggcaaatcaaaatgtgaaaggaatggattggttaaagcccagatagcgctagaggaagcatcacagcaactggctggaaaagaaagggaaaagaatcagggatttgattttgattcctttattgcaggaactattcagcttagttcccagcatgagcctactgatgttgttgataaattaaatgacttgaatagctcagtgtcccaactagaattgaaaagtttgatatcaaagtcagtaagccaagaaaaacaggaaaaaggaatggcaaatctggctcaattagaagccttgtaccagtcttcttgggacagccagtttgtgagtggtggggaggactgttttttcataaatcagttttgtgaggtaaggaaggatgaacaagttgagaaggaaaacacttacactagttacttggacaagttctttagcaggaaagaagatactgaaatgctagaaactgagccagtagaggatgggaagcttggggagagaggacatgaggaaggatttctgaacaacagtggggagttcctctttaacaagcagctcgagtccataggcatcccacagtttcacagtccagttgggtcaccacttaagtcaatacaggccacattaacaccttctgctatgaaatcttcccctcaaattcctcatcaaacatacagcagcattctgaaacatctgaactaaaacactcagcagacatttatctttgtattcttcatgaaatgtgttttgtctttttttattactagtgtttaagtcattttttacttgaatcagatggtgtcatttagtaaggattttatgagttcttgttttttaaaatccagactttctttttctacatgtgagatagttttcattttaactggcatgtcatttgcacacaaaaataaagactagagcaaaataatgcaacgcaggaggagaaaagaaatgcactaagacaagaacattctctcatagaacattgatctgttttacaggaaacaaaccttgccttgaaatttacacagtgagactgtacataattgcatgaaaatagctatttttttcctaagacatttttcattcatgaatattttcaagtttttcatactgtacacatttcttaaaacacatgataccagcagcaactgaaaatgaatgccgaatttggtacacatgtgttatctacctcaaggtaacaagagtatgtggcaaaacatataccacccatagtgcttcacaaaatgcacttctatttagccagcgtttattgtagtaaactattcttaataaaactcactcactgtttataaatgttctggtatgcattctttatagtgaagtgttaatacatcacatcttatttattttagcaaatcagtatattttctgtatttaattataaaaaattaacttagtttttaaaatttatttgcaaatatactttttccatttggcactatggtttgttgcctacctagctgcatctataatgtcagcttatcctaaggctgtccacgtacttaatttacttaagtgttcattttaagtaacgtgctcactgtgtataggaatttgtattttggaggtgcttgatctatctacaaagaaaaattaattaggaattactttattataaaatgctcctagaagtcttaattgtgtttattttttaaaaaaacaaatgttagacttgtgtgcatggaagtaattaaggtacatcattattgtagtttgaaagttgtacatgataagacattttgtttttactgtatgtttttactgaatgatctattccccatcccaaggcaagcatgaataaaattaggttaaacgtagcatgtggcatcgcagtctcttagaatttgtttcatctattttattttattgaatactgtctgtatctttggttatcctgtttgaagaaaaaggacaaataaaacatggccagcaaatacagctcctgtttcactcttgggttaatgaaaattttctgctagaatgaaaattactaccagaatcactttgaattatggccataaattgctagtctgaaaggctgagaaggttcaagtcttttgacttaaaccatcacatattagaatggaataaagctttataatatttcaaaactgttaggtaaaatgtgtagttgaaactttgaactgtgcagtcagaaa

SEQ ID NO: 417677 - DNA, 4208 bp, Homo sapiens
ctgcagtggatggtaaagtcacgggtcattagcgagctacaggaggcctgctgggacatggtatctgccatggcggcgactgcggcaaagcgagagcctcggagacgccgctgccgccagcacagccggagacctgagccgacactgggggcagtccgcgagccccgcactctctcgatgagtcggagaagtcccgttgtatcagagtaagatggacggtagctttgattgtgattgtggtgagctggagccacctgatcactaacaaaagacatcttctgttaaccaacagccgccagggcttcctgttgaaataaatatatagcaacaaaggaaaaaaagaagcaaaacggaaatagtgcttaccagcaccttagaatgatgctgctcaggaccagtccaacactgaatgtatctgcactgtgaggagaatgttcatagaagcctgttgtgtgcatatttattcacatttttgttaaatgttaaatcgtttagcacggtaatctgagtgcacagtatgtcatttcattccgtttgagtttcttgttttcgttaaatgtctgcagagttgctgcccctttcttgaactatgagtactgcaatctttttaattctcaatatgaatagagctttttgagctttaaatctaaggggaactcgacaggcctgtttggcatatgcaatgaacatcaagaaaccatcttgctgtggaagcataattatttttcttctccctttttgaaagatctttccttttgatgccagttttcttccttgtttacacaagttcaatttgaaaggaaaaggcaatagtaagggtttcaaaatggcagagaaatttgaaagtctcatgaacattcatggttttgatctgggttctaggtatatggacttaaaaccattgggttgtggaggcaatggcttggttttttctgctgtagacaatgactgtgacaaaagagtagccatcaagaaaattgtccttactgatccccagagtgtcaaacatgctctacgtgaaatcaaaattattagaagacttgaccatgataacattgtgaaagtgtttgagattcttggtcccagtggaagccaattaacagacgatgtgggctctcttacggaactgaacagtgtttacattgttcaggagtacatggagacagacttggctaatgtgctggagcagggccctttactggaagagcatgccaggcttttcatgtatcagctgctacgggggctcaagtatattcactctgcaaatgtactgcacagagatctcaaaccagctaatcttttcattaatacggaagacttggtgctgaagataggtgactttggtcttgcacggatcatggatcctcattattcccataagggtcatctttctgaaggattggttactaaatggtacagatctccacgtcttttactttctcctaataattatactaaagccattgacatgtgggctgcaggctgcatctttgctgaaatgctgactggtaaaaccctttttgcaggtgcacatgaacttgaacagatgcagctgattttagaatctattcctgttgtacatgaggaagatcgtcaggagcttctcagcgtaattccagtttacattagaaatgacatgactgagccacacaaacctttaactcagctgcttccaggaattagtcgagaagcactggatttcctggaacaaattttgacatttagccccatggatcggttaacagcagaagaagcactctcccatccttacatgagcatatattcttttccaatggatgagccaatttcaagccatccttttcatattgaagatgaagttgatgatattttgcttatggatgaaactcacagtcacatttataactgggaaaggtatcatgattgtcagttttcagagcatgattggcctgtacataacaactttgatattgatgaagttcagcttgatccaagagctctgtccgatgtcactgatgaagaagaagtacaagttgatccccgaaaatatttggatggagatcgggaaaagtatctggaggatcctgcttttgataccaattactctactgagccttgttggcaatactcagatcatcatgaaaacaaatattgtgatctggagtgtagccatacttgtaactacaaaacgaggtcatcatcatatttagataacttagtttggagagagagtgaagttaaccattactatgaacccaagcttattatagatctttccaattggaaagaacaaagcaaagaaaaatctgataagaaaggcaaatcaaaatgtgaaaggaatggattggttaaagcccagatagcgctagaggaagcatcacagcaactggctggaaaagaaagggaaaagaatcagggatttgattttgattcctttattgcaggaactattcagcttagttcccagcatgagcctactgatgttgttgataaattaaatgacttgaatagctcagtgtcccaactagaattgaaaagtttgatatcaaagtcagtaagccaagaaaaacaggaaaaaggaatggcaaatctggctcaattagaagccttgtaccagtcttcttgggacagccagtttgtgagtggtggggaggactgttttttcataaatcagttttgtgaggtaaggaaggatgaacaagttgagaaggaaaacacttacactagttacttggacaagttctttagcaggaaagaagatactgaaatgctagaaactgagccagtagaggatgggaagcttggggagagaggacatgaggaaggatttctgaacaacagtggggagttcctctttaacaagcagctcgagtccataggcatcccacagtttcacagtccagttgggtcaccacttaagtcaatacaggccacattaacaccttctgctatgaaatcttcccctcaaattcctcatcaaacatacagcagcattctgaaacatctgaactaaaacactcagcagacatttatctttgtattcttcatgaaatgtgttttgtctttttttattactagtgtttaagtcattttttacttgaatcagatggtgtcatttagtaaggattttatgagttcttgttttttaaaatccagactttctttttctacatgtgagatagttttcattttaactggcatgtcatttgcacacaaaaataaagactagagcaaaataatgcaacgcaggaggagaaaagaaatgcactaagacaagaacattctctcatagaacattgatctgttttacaggaaacaaaccttgccttgaaatttacacagtgagactgtacataattgcatgaaaatagctatttttttcctaagacatttttcattcatgaatattttcaagtttttcatactgtacacatttcttaaaacacatgataccagcagcaactgaaaatgaatgccgaatttggtacacatgtgttatctacctcaaggtaacaagagtatgtggcaaaacatataccacccatagtgcttcacaaaatgcacttctatttagccagcgtttattgtagtaaactattcttaataaaactcactcactgtttataaatgttctggtatgcattctttatagtgaagtgttaatacatcacatcttatttattttagcaaatcagtatattttctgtatttaattataaaaaattaacttagtttttaaaatttatttgcaaatatactttttccatttggcactatggtttgttgcctacctagctgcatctataatgtcagcttatcctaaggctgtccacgtacttaatttacttaagtgttcattttaagtaacgtgctcactgtgtataggaatttgtattttggaggtgcttgatctatctacaaagaaaaattaattaggaattactttattataaaatgctcctagaagtcttaattgtgtttattttttaaaaaaacaaatgttagacttgtgtgcatggaagtaattaaggtacatcattattgtagtttgaaagttgtacatgataagacattttgtttttactgtatgtttttactgaatgatctattccccatcccaaggcaagcatgaataaaattaggttaaacgtaaaaaaaaaaaaggggggcgacaaaaatatcccgagggccaaatagcgacccgttttttcaagggccctagggcaata

SEQ ID NO: 417678 - DNA, 680 bp, Homo sapiens
cgcgtggtcgtcgccaccgcagccgcccgagaggagctgggggaggacggtggcccgcgaggctcgtcgcagacaacgcggcggcgatgtccgcgagccaggcgagtgccgcggcggcagcggcggggccttgcgcgcggcagggcggcctgggcttcggcctccctccggttccctggaagcgggcccgcgaccagcgcgggagcagcagcagaggcggaggctccagcgcgtctctctcctccccctcagcctgagccgggggaagccaggcggcccgggtgtctggaggggggggggtccgctgcccgagaatgggaattctcttcactagaatatggagactgttcaatcaccaggccctttctttgctcaccagttgtgtttggacaccacatagaagtgctggggtcttctggaatgaaggttatagattgctgccctaaccgcaccactgagcgaccgagggttgcagaatgcggaaaacgggaggaatcgctcgacttgtccattacacctctggtttatgagcctgccctccactgccacccgtctttgtgtgtgttgggggcagggggggttcttctgcctcctgaatagagatggacttctctccatttgttttacttattatatctgtgtttaaggttaagcttaaggtcatttttctactcgtgtgg

SEQ ID NO: 417679 - DNA, 917 bp, Homo sapiens
cgcgtggtcgtcgccaccgcagccgcccgagaggagctgggggaggacggtggcccgcgaggctcgtcgcagacaacgcggcggcgatgtccgcgagccaggcgagtgccgcggcggcagcggcggggccttgcgcgcggcagggcggcctgggcttcggcctccctccggttccctggaagcgggcccgcgaccagcgcgggagcagcagcagaggcggaggctccagcgcgtctctctcctccccctcagcctgagccgggggaagtcgcaaaggcaggccaaattgagatcattgagggagggggaaactcgggacccagaaatagtataaagttgctcatgcagcaatgattgataaatatgacctatgtcggtacatccaagatgtgcgtgtaatttgatattgagatagattcatatggagagatgatccggtagaagagaactatccgatgtctgtaacctaagtgaatgccggagaatttatatgtgaagagtcggaacgttggaactctaactgaagaatgtgaaaacagagaggtgagatataaatgtgagatcatgatagacgtttgaacccagaagaatgatgataaatatttgggaggcgcaaaagaatggactatgcagatcggaggcttatgagaggactagtgacagaaagacagaatgacagtgagggaataaaagatgagataaataatgcagcttaatgcggatatcatgggcactaattattaccggtgggccaatgattgtaaaagcgtctataatatatcgttgaaattgggccgcgaaagagggatcgcaaattgaattaacgccaggtataaacgtgaaggggttaacttaaggaagtgccacataagagatggtgggattggcggaagccgaagttccgcgaaaaattgccg

SEQ ID NO: 417680 - DNA, 3148 bp, Homo sapiens
cgcgtggtcgtcgccaccgcagccgcccgagaggagctgggggaggacggtggcccgcgaggctcgtcgcagacaacgcggcggcgatgtccgcgagccaggcgagtgccgcggcggcagcggcggggccttgcgcgcggcagggcggcctgggcttcggcctccctccggttccctggaagcgggcccgcgaccagcgcgggagcagcagcagaggcggaggctccagcgcgtctctctcctccccctcagcctgagccgggggaagccaggcggcccgggtgtctggaggggggggggtccgctgcccgagaatgggaattctcttcactagaatatggagactgttcaatcaccaggagcacaaagttatcattgttgggctggataatgcagggaaaactaccattctttaccaattttctatgaatgaagttgtacatacatctcctacaataggaagtaatgtagaagagatagtgattaataatacacgtttcctaatgtgggatattggtggccaagaatctcttcgttcttcctggaacacttactatactaacacagagtttgtaatagttgttgtggacagtacagacagagagaggatttctgtaactagagaagaactctataaaatgttagcgcatgaggacctaagaaaagctggattgctgatttttgctaataaacaagatgttaaagaatgcatgactgtagcagaaatctcccagtttttgaagctaacttctattaaagatcaccagtggcatatccaggcatgctgtgctctaactggcgagggattgtgccaaggacttgaatggatgatgtcacgacttaagattagatgatctctactgacctcttctcatagattttgtataaatgaagtgctggactttacctgaaagctgcaaaaattaatggtttagatatatttataataaactgatttaaactttttctataagaagaaaaattaagaccacttatttgaaaacaaagatgaagtctcaccttccagtttgctttctcattagttttttccaaagtaagttattgaagctgtgattgacatttttctcataatgaatcctctcaggacattgtgtagcctatggtaagtacaaagggagaggaagacattttgaattttaagagctttattatcagtttaaccctccctagttgaatgttattttcttcttgttccattaagtcagaatacaaatcagcacagatattcgaatgtttccaatattttaaaatgtaatgttacttatgaaaagtattttgcttaaggttgtgtgtgtattgtgtatatacctcaagttcaagttaatggcattgatttatgttccagacaaaaataacacaaataataatatccttcgttataaccacaatgagataagtattggcattagtgttcagtgccattttatactttctctctgtgttctctgtattgtactaaccaacctcccaaatcgctgagctgcttgtttaaaaaaaaaaaaaaggaaaaggaaaaagcatgacattgtgtatcgattttttgttgttgaccaaaatcacacacatggaaacatgtaattcaacagagtgggaaagctagcagattcttggcttagtattactaataggcaggattgtacaatgagcaactatcagattattcctttcagtggttcttatggcatctaaattactgaataaattattaatccattaatcagtgaatcaaattatgattacaattatcaaatgaatgctcagcattaattgaaaactgttttgtgaaacatgtctacccagaaaagtagcattctataaatactattaaacaacttagctatattatttttaagtattaaattatatgtcaagcagttaaagtgaatttcagagtaaaagtaaggcatgtttctgagcaacattgataatttcttaatttgcaaatttcttcttattttggtacttggaatatagtgtgagattttttatttctaaattttgttgtatcttctattacataaatgcattgacaattataaaatgcaagtgttttttgaatgattttaagaatttggcttaaaaattgattgatacaacgtattatttgtactaagaagtaacttgacccaaaacaccttttatgtttgcttagggtatattttttcagtgtctgaaagtcaaaggtattcctgtcacaactgtaaacaaacttatcctaaatgtgttaaaacatattcttgggtactctatttatgtatctttcatgccttgaaaatctgaaggttaatccaaactcacatgttttagcatatttgagaaaaaaaaactaccttcaatatcagccttttaaatttcatgaagattttggtgaggaataatagtatatagtttaagtattgacaaaactttgaaagtttctttctttaaaatgggaaatactcaatatctaaatccaggtcaggcatgggatatcagtatttaacattggatgttttatgttttatatttataatgttcaaaatgcaagcataacatttaatatttgtccacatggttttacaaaagtaaatcttaaattactaagcttttcccatatgttctcgtactttctcaaatccctataaagaattacttgttatctattaaaaatctcctttacccaaatctgtattatggtttcgccagacaaatattatgtgatgtagcccagaaaatccacaccttttgtcctttttatgttttaatttgaataatcatgtgcttagtcccttggtttactgccacatcagtttaacacgatatcagcacattcccttgtcatcatcaaggtgttggctcagatttattcttaattggatgtttaaagcatgtactaccttgttacagttggtttagtgtagtggattattgacatgacatcatgagaagatgtgtaattttataccacatttataaaacatgattttgttttctacccttcaaggtaaacattaaaaataaggtggtacttgtgtacttgtacataaaaccaaaattatagttgggaaaaaaataaatttatatatgaaaatgtcaaaatcattttaaaagtattattttcaaataaaatggagaagctggtgaaaag

SEQ ID NO: 417681 - DNA, 3090 bp, Homo sapiens
cgcgtggtcgtcgccaccgcagccgcccgagaggagctgggggaggacggtggcccgcgaggctcgtcgcagacaacgcggcggcgatgtccgcgagccaggcgagtgccgcggcggcagcggcggggccttgcgcgcggcagggcggcctgggcttcggcctccctccggttccctggaagcgggcccgcgaccagcgcgggagcagcagcagaggcggaggctccagcgcgtctctctcctccccctcagcctgagccgggggaagccaggcggcccgggtgtctggaggggggggggtccgctgcccgagaatgggaattctcttcactagaatatggagactgttcaatcaccaggagcacaaagttatcattgttgggctggataatgcagggaaaactaccattctttaccaattttctatgaatgaagttgtacatacatctcctacaataggaagtaatgtagaagagatagtgattaataatacacgtttcctaatgtgggatattggtggccaagaatctcttcgttcttcctggaacacttactatactaacacagagtttgtaatagttgttgtggacagtacagacagagagaggatttctgtaactagagaagaactctataaaatgttagcgcatgaggacctaagaaaagctggattgctgatttttgctaataaacaagatgttaaagaatgcatgactgtagcagaaatctcccagtttttgaagctaacttctattaaagatcaccagtggcatatccaggcatgctgtgctctaactggcgagggattgtgccaaggacttgaatggatgatgtcacgacttaagattagatgatctctactgacctcttctcatagattttgtataaatgaagtgctggactttacctgaaagctgcaaaaattaatggtttagatatatttataataaactgatttaaactttttctataagaagaaaaattaagaccacttatttgaaaacaaagatgaagtctcaccttccagtttgctttctcattagttttttccaaagtaagttattgaagctgtgattgacatttttctcataatgaatcctctcaggacattgtgtagcctatggtaagtacaaagggagaggaagacattttgaattttaagagctttattatcagtttaaccctccctagttgaatgttattttcttcttgttccattaagtcagaatacaaatcagcacagatattcgaatgtttccaatattttaaaatgtaatgttacttatgaaaagtattttgcttaaggttgtgtgtgtattgtgtatatacctcaagttcaagttaatggcattgatttatgttccagacaaaaataacacaaataataatatccttcgttataaccacaatgagataagtattggcattagtgttcagtgccattttatactttctctctgtgttctctgtattgtactaaccaacctcccaaatcgctgagctgcttgtttaaaaaaaaaaaaaaggaaaaggaaaaagcatgacattgtgtatcgattttttgttgttgaccaaaatcacacacatggaaacatgtaattcaacagagtgggaaagctagcagattcttggcttagtattactaataggcaggattgtacaatgagcaactatcagattattcctttcagtggttcttatggcatctaaattactgaataaattattaatccattaatcagtgaatcaaattatgattacaattatcaaatgaatgctcagcattaattgaaaactgttttgtgaaacatgtctacccagaaaagtagcattctataaatactattaaacaacttagctatattatttttaagtattaaattatatgtcaagcagttaaagtgaatttcagagtaaaagtaaggcatgtttctgagcaacattgataatttcttaatttgcaaatttcttcttattttggtacttggaatatagtgtgagattttttatttctaaattttgttgtatcttctattacataaatgcattgacaattataaaatgcaagtgttttttgaatgattttaagaatttggcttaaaaattgattgatacaacgtattatttgtactaagaagtaacttgacccaaaacaccttttatgtttgcttagggtatattttttcagtgtctgaaagtcaaaggtattcctgtcacaactgtaaacaaacttatcctaaatgtgttaaaacatattcttgggtactctatttatgtatctttcatgccttgaaaatctgaaggttaatccaaactcacatgttttagcatatttgagaaatagtatatagtttaagtattgacaaaactttgaaagtttctttctttaaaatgggaaatactcaatatctaaatccaggtcaggcatgggatatcagtatttaacattggatgttttatgttttatatttataatgttcaaaatgcaagcataacatttaatatttgtccacatggttttacaaaagtaaatcttaaattactaagcttttcccatatgttctcgtactttctcaaatccctataaagaattacttgttatctattaaaaatctcctttacccaaatctgtattatggtttcgccagacaaatattatgtgatgtagcccagaaaatccacaccttttgtcctttttatgttttaatttgaataatcatgtgcttagtcccttggtttactgccacatcagtttaacacgatatcagcacattcccttgtcatcatcaaggtgttggctcagatttattcttaattggatgtttaaagcatgtactaccttgttacagttggtttagtgtagtggattattgacatgacatcatgagaagatgtgtaattttataccacatttataaaacatgattttgttttctacccttcaaggtaaacattaaaaataaggtggtacttgtgtacttgtacataaaaccaaaattatagttgggaaaaaaataaatttatatatgaaaatgtcaaaatcattttaaaagtattattttcaaataaaatggagaagctggtgaaaag

SEQ ID NO: 417682 - DNA, 2543 bp, Homo sapiens
  misc_feature (2151)..(2151): n is a, c, g, or t
cgcgtggtcgtcgccaccgcagccgcccgagaggagctgggggaggacggtggcccgcgaggctcgtcgcagacaacgcggcggcgatgtccgcgagccaggcgagtgccgcggcggcagcggcggggccttgcgcgcggcagggcggcctgggcttcggcctccctccggttccctggaagcgggcccgcgaccagcgcgggagcagcagcagaggcggaggctccagcgcgtctctctcctccccctcagcctgagccgggggaagccaggcggcccgggtgtctggaggggggggggtccgctgcccgagaatgggaattctcttcactagaatatggagactgttcaatcaccaggagcacaaagttatcattgttgggctggataatgcagggaaaactaccattctttaccaattttctatgaatgaagttgtacatacatctcctacaataggaagtaatgtagaagagatagtgattaataatacacgtttcctaatgtgggatattggtggccaagaatctcttcgttcttcctggaacacttactatactaacacagagtttgtaatagttgttgtggacagtacagacagagagaggatttctgtaactagagaagaactctataaaatgttagcgcatgaggacctaagaaaagctggattgctgatttttgctaataaacaagatgttaaagaatgcatgactgtagcagaaatctcccagtttttgaagctaacttctattaaagatcaccagtggcatatccaggcatgctgtgctctaactggcgagggattgtgccaaggacttgaatggatgatgtcacgacttaagattagatgatctctactgacctcttctcatagattttgtataaatgaagtgctggactttacctgaaagctgcaaaaattaatggtttagatatatttataataaactgatttaaactttttctataagaagaaaaattaagaccacttatttgaaaacaaagatgaagtctcaccttccagtttgctttctcattagttttttccaaagtaagttattgaagctgtgattgacatttttctcataatgaatcctctcaggacattgtgtagcctatggtaagtacaaagggagaggaagacattttgaattttaagagctttattatcagtttaaccctccctagttgaatgttattttcttcttgttccattaagtcagaatacaaatcagcacagatattcgaatgtttccaatattttaaaatgtaatgttacttatgaaaagtattttgcttaaggttgtgtgtgtattgtgtatatacctcaagttcaagttaatggcattgatttatgttccagacaaaaataacacaaataataatatccttcgttataaccacaatgagataagtattggcattagtgttcagtgccattttatactttctctctgtgttctctgtattgtactaaccaacctcccaaatcgctgagctgcttgtttaaaaaaaaaaaaaaggaaaaggaaaaagcatgacattgtgtatcgattttttgttgttgaccaaaatcacacacatggaaacatgtaattcaacagagtgggaaagctagcagattcttggcttagtattactaataggcaggattgtacaatgagcaactatcagattattcctttcagtggttcttatggcatctaaattactgaataaattattaatccattaatcagtgaatcaaattatgattacaattatcaaatgaatgctcagcattaattgaaaactgttttgtgaaacatgtctacccagaaaagtagcattctataaatactattaaacaacttagctatattatttttaagtattaaattatatgtcaagcagttaaagtgaatttcagagtaaaagtaaggcatgtttctgagcaacattgataatttcttaatttgcaaatttcttcttattttggtacttggaatatagtgtgagattttttatttctaaattttgttgtatcttctattacataaatgcattgacaattataaaatgcaagtgttttttgaatgattttaagaatttggcttaaaaattgattgatacaacgtattatttgtactaagaagtaacttgaccgcnctgcaaaaaaaaaaaaaaaaaaaaaaaaaaaaaaaaaaaaaaaaaaaaaaaagggggggggcaaaaatttcccggggggggcattggccaccattttttggaaaagggggccccttaaagggagctgctattatttataaaacagagcggcgcggggcgcgagttttaaaaaaagaggtgttgaagtggatgaaaaagttggctatgtgggggatatttgtgggaagaaagacaccattttctgggggggtgggacaaaatgttggcaacatatcatataaaggaatttaaagcgccagggggaacatataaacatgtaaggtgtttatgtggtcaaaaagggatatatgtggggagaaaaaatgtgacaggagattattttagaaatttcg

SEQ ID NO: 417683 - DNA, 1921 bp, Homo sapiens
  misc_feature (1529)..(1529): n is a, c, g, or t
cgcgtggtcgtcgccaccgcagccgcccgagaggagctgggggaggacggtggcccgcgaggctcgtcgcagacaacgcggcggcgatgtccgcgagccaggcgagtgccgcggcggcagcggcggggccttgcgcgcggcagggcggcctgggcttcggcctccctccggttccctggaagcgggcccgcgaccagcgcgggagcagcagcagaggcggaggctccagcgcgtctctctcctccccctcagcctgagccgggggaagccaggcggcccgggtgtctggaggggggggggtccgctgcccgagaatgggaattctcttcactagaatatggagactgttcaatcaccaggagcacaaagttatcattgttgggctggataatgcagggaaaactaccattctttaccaattttctatgaatgaagttgtacatacatctcctacaataggaagtaatgtagaagagatagtgattaataatacacgtttcctaatgtgggatattggtggccaagaatctcttcgttcttcctggaacacttactatactaacacagagtttgtaatagttgttgtggacagtacagacagagagaggatttctgtaactagagaagaactctataaaatgttagcgcatgaggacctaagaaaagctggattgctgatttttgctaataaacaagatgttaaagaatgcatgactgtagcagaaatctcccagtttttgaagctaacttctattaaagatcaccagtggcatatccaggcatgctgtgctctaactggcgagggattgtgccaaggacttgaatggatgatgtcacgacttaagattagatgatctctactgacctcttctcatagattttgtataaatgaagtgctggactttacctgaaagctgcaaaaattaatggtttagatatatttataataaactgatttaaactttttctataagaagaaaaattaagaccacttatttgaaaacaaagatgaagtctcaccttccagtttgctttctcattagttttttccaaagtaagttattgaagctgtgattgacatttttctcataatgaatcctctcaggacattgtgtagcctatggtaagtacaaagggagaggaagacattttgaattttaagagctttattatcagtttaaccctccctagttgaatgttattttcttcttgttccattaagtcagaatacaaatcagcacagatattcgaatgtttccaatattttaaaatgtaatgttacttatgaaaagtattttgcttaaggttgtgtgtgtattgtgtatatacctcaagttcaagttaatggcattgatttatgttccagacaaaaataacacaaataataatatccttcgttataaccacaatgagataagtattggcattagtgttcagtgccattttatactttctctctgtgttctctgtattgtactaaccaacctcccaaatcgctgagctgcttgtttaaaaaaaaaaaaaaggcnctgcaaaaaaaaaaaaaaaaaaaaaaaaaaaaaaaaaaaaaaaaaaaaaaaagggggggggcaaaaatttcccggggggggcattggccaccattttttggaaaagggggccccttaaagggagctgctattatttataaaacagagcggcgcggggcgcgagttttaaaaaaagaggtgttgaagtggatgaaaaagttggctatgtgggggatatttgtgggaagaaagacaccattttctgggggggtgggacaaaatgttggcaacatatcatataaaggaatttaaagcgccagggggaacatataaacatgtaaggtgtttatgtggtcaaaaagggatatatgtggggagaaaaaatgtgacaggagattattttagaaatttcg

SEQ ID NO: 417684 - DNA, 2889 bp, Homo sapiens
cgcgtggtcgtcgccaccgcagccgcccgagaggagctgggggaggacggtggcccgcgaggctcgtcgcagacaacgcggcggcgatgtccgcgagccagagcacaaagttatcattgttgggctggataatgcagggaaaactaccattctttaccaattttctatgaatgaagttgtacatacatctcctacaataggaagtaatgtagaagagatagtgattaataatacacgtttcctaatgtgggatattggtggccaagaatctcttcgttcttcctggaacacttactatactaacacagagtttgtaatagttgttgtggacagtacagacagagagaggatttctgtaactagagaagaactctataaaatgttagcgcatgaggacctaagaaaagctggattgctgatttttgctaataaacaagatgttaaagaatgcatgactgtagcagaaatctcccagtttttgaagctaacttctattaaagatcaccagtggcatatccaggcatgctgtgctctaactggcgagggattgtgccaaggacttgaatggatgatgtcacgacttaagattagatgatctctactgacctcttctcatagattttgtataaatgaagtgctggactttacctgaaagctgcaaaaattaatggtttagatatatttataataaactgatttaaactttttctataagaagaaaaattaagaccacttatttgaaaacaaagatgaagtctcaccttccagtttgctttctcattagttttttccaaagtaagttattgaagctgtgattgacatttttctcataatgaatcctctcaggacattgtgtagcctatggtaagtacaaagggagaggaagacattttgaattttaagagctttattatcagtttaaccctccctagttgaatgttattttcttcttgttccattaagtcagaatacaaatcagcacagatattcgaatgtttccaatattttaaaatgtaatgttacttatgaaaagtattttgcttaaggttgtgtgtgtattgtgtatatacctcaagttcaagttaatggcattgatttatgttccagacaaaaataacacaaataataatatccttcgttataaccacaatgagataagtattggcattagtgttcagtgccattttatactttctctctgtgttctctgtattgtactaaccaacctcccaaatcgctgagctgcttgtttaaaaaaaaaaaaaaggaaaaggaaaaagcatgacattgtgtatcgattttttgttgttgaccaaaatcacacacatggaaacatgtaattcaacagagtgggaaagctagcagattcttggcttagtattactaataggcaggattgtacaatgagcaactatcagattattcctttcagtggttcttatggcatctaaattactgaataaattattaatccattaatcagtgaatcaaattatgattacaattatcaaatgaatgctcagcattaattgaaaactgttttgtgaaacatgtctacccagaaaagtagcattctataaatactattaaacaacttagctatattatttttaagtattaaattatatgtcaagcagttaaagtgaatttcagagtaaaagtaaggcatgtttctgagcaacattgataatttcttaatttgcaaatttcttcttattttggtacttggaatatagtgtgagattttttatttctaaattttgttgtatcttctattacataaatgcattgacaattataaaatgcaagtgttttttgaatgattttaagaatttggcttaaaaattgattgatacaacgtattatttgtactaagaagtaacttgacccaaaacaccttttatgtttgcttagggtatattttttcagtgtctgaaagtcaaaggtattcctgtcacaactgtaaacaaacttatcctaaatgtgttaaaacatattcttgggtactctatttatgtatctttcatgccttgaaaatctgaaggttaatccaaactcacatgttttagcatatttgagaaaaaaaaactaccttcaatatcagccttttaaatttcatgaagattttggtgaggaataatagtatatagtttaagtattgacaaaactttgaaagtttctttctttaaaatgggaaatactcaatatctaaatccaggtcaggcatgggatatcagtatttaacattggatgttttatgttttatatttataatgttcaaaatgcaagcataacatttaatatttgtccacatggttttacaaaagtaaatcttaaattactaagcttttcccatatgttctcgtactttctcaaatccctataaagaattacttgttatctattaaaaatctcctttacccaaatctgtattatggtttcgccagacaaatattatgtgatgtagcccagaaaatccacaccttttgtcctttttatgttttaatttgaataatcatgtgcttagtcccttggtttactgccacatcagtttaacacgatatcagcacattcccttgtcatcatcaaggtgttggctcagatttattcttaattggatgtttaaagcatgtactaccttgttacagttggtttagtgtagtggattattgacatgacatcatgagaagatgtgtaattttataccacatttataaaacatgattttgttttctacccttcaaggtaaacattaaaaataaggtggtacttgtgtacttgtacataaaaccaaaattatagttgggaaaaaaataaatttatatatgaaaatgtcaaaatcattttaaaagtattattttcaaataaaatggagaagctggtgaaaag

SEQ ID NO: 417685 - DNA, 3332 bp, Homo sapiens
cgcgtggtcgtcgccaccgcagccgcccgagaggagctgggggaggacggtggcccgcgaggctcgtcgcagacaacgcggcggcgatgtccgcgagccaggcgagtgccgcggcggcagcggcggggccttgcgcgcggcagggcggcctgggcttcggcctccctccggttccctggaagcgggcccgcgaccagcgcgggagcagcagcagaggcggaggctccagcgcgtctctctcctccccctcagcctgagccgggggaagccaggcggcccgggtgtctggaggggggggggtccgctgcccgagaatgggaattctcttcactagaatatggagactgttcaatcaccaggagcacaaagttatcattgttgggctggataatgcagggaaaactaccattctttaccaattttctatgaatgaagttgtacatacatctcctacaataggaagtaatgtagaagagatagtgattaataatacacgtttcctaatgtgggatattggtggccaagaatctcttcgttcttcctggaacacttactatactaacacagagtttgtaatagttgttgtggacagtacagacagagagaggatttctgtaactagagaagaactctataaaatgttagcgcatgagaagtaaaaagaagacctaagtagggcctagttggaaagtgaaaggagactgaatgaggagatgaccagagaagaaaggaattacagatgaagttgggagtttgagcaaggtactcagtagggtcaagaagagccaaacaggcaaaattctgcagagagacaaatggatcaaagagtgagaatgtgacctaagaaaagctggattgctgatttttgctaataaacaagatgttaaagaatgcatgactgtagcagaaatctcccagtttttgaagctaacttctattaaagatcaccagtggcatatccaggcatgctgtgctctaactggcgagggattgtgccaaggacttgaatggatgatgtcacgacttaagattagatgatctctactgacctcttctcatagattttgtataaatgaagtgctggactttacctgaaagctgcaaaaattaatggtttagatatatttataataaactgatttaaactttttctataagaagaaaaattaagaccacttatttgaaaacaaagatgaagtctcaccttccagtttgctttctcattagttttttccaaagtaagttattgaagctgtgattgacatttttctcataatgaatcctctcaggacattgtgtagcctatggtaagtacaaagggagaggaagacattttgaattttaagagctttattatcagtttaaccctccctagttgaatgttattttcttcttgttccattaagtcagaatacaaatcagcacagatattcgaatgtttccaatattttaaaatgtaatgttacttatgaaaagtattttgcttaaggttgtgtgtgtattgtgtatatacctcaagttcaagttaatggcattgatttatgttccagacaaaaataacacaaataataatatccttcgttataaccacaatgagataagtattggcattagtgttcagtgccattttatactttctctctgtgttctctgtattgtactaaccaacctcccaaatcgctgagctgcttgtttaaaaaaaaaaaaaaggaaaaggaaaaagcatgacattgtgtatcgattttttgttgttgaccaaaatcacacacatggaaacatgtaattcaacagagtgggaaagctagcagattcttggcttagtattactaataggcaggattgtacaatgagcaactatcagattattcctttcagtggttcttatggcatctaaattactgaataaattattaatccattaatcagtgaatcaaattatgattacaattatcaaatgaatgctcagcattaattgaaaactgttttgtgaaacatgtctacccagaaaagtagcattctataaatactattaaacaacttagctatattatttttaagtattaaattatatgtcaagcagttaaagtgaatttcagagtaaaagtaaggcatgtttctgagcaacattgataatttcttaatttgcaaatttcttcttattttggtacttggaatatagtgtgagattttttatttctaaattttgttgtatcttctattacataaatgcattgacaattataaaatgcaagtgttttttgaatgattttaagaatttggcttaaaaattgattgatacaacgtattatttgtactaagaagtaacttgacccaaaacaccttttatgtttgcttagggtatattttttcagtgtctgaaagtcaaaggtattcctgtcacaactgtaaacaaacttatcctaaatgtgttaaaacatattcttgggtactctatttatgtatctttcatgccttgaaaatctgaaggttaatccaaactcacatgttttagcatatttgagaaaaaaaaactaccttcaatatcagccttttaaatttcatgaagattttggtgaggaataatagtatatagtttaagtattgacaaaactttgaaagtttctttctttaaaatgggaaatactcaatatctaaatccaggtcaggcatgggatatcagtatttaacattggatgttttatgttttatatttataatgttcaaaatgcaagcataacatttaatatttgtccacatggttttacaaaagtaaatcttaaattactaagcttttcccatatgttctcgtactttctcaaatccctataaagaattacttgttatctattaaaaatctcctttacccaaatctgtattatggtttcgccagacaaatattatgtgatgtagcccagaaaatccacaccttttgtcctttttatgttttaatttgaataatcatgtgcttagtcccttggtttactgccacatcagtttaacacgatatcagcacattcccttgtcatcatcaaggtgttggctcagatttattcttaattggatgtttaaagcatgtactaccttgttacagttggtttagtgtagtggattattgacatgacatcatgagaagatgtgtaattttataccacatttataaaacatgattttgttttctacccttcaaggtaaacattaaaaataaggtggtacttgtgtacttgtacataaaaccaaaattatagttgggaaaaaaataaatttatatatgaaaatgtcaaaatcattttaaaagtattattttcaaataaaatggagaagctggtgaaaag

SEQ ID NO: 417686 - DNA, 2078 bp, Homo sapiens
  misc_feature (19)..(20): n is a, c, g, or t
accctagaggatcccccgnntggctagtacaatacagagaacacatagagaaagtataaaatggcactgaactggtatgctaatacttatctcattgtggctataacccaggatattattattgaatgttattttcttcttgttccattaagtcagaatacaaatcagcacagatattcgaatgtttccaatattttaaaatgtaatgttacttatgaaaagtattttgcttaaggttgtgtgtgtattgtgtatatacctcaagttcaagttaatggcattgatttatgttccagacaaaaataacacaaataataatatccttcgttataaccacaatgagataagtattggcattagtgttcagtgccattttatactttctctctgtgttctctgtattgtactaaccaacctcccaaatcgctgagctgcttgtttaaaaaaaaaaaaaaggaaaaggaaaaagcatgacattgtgtatcgattttttgttgttgaccaaaatcacacacatggaaacatgtaattcaacagagtgggaaagctagcagattcttggcttagtattactaataggcaggattgtacaatgagcaactatcagattattcctttcagtggttcttatggcatctaaattactgaataaattattaatccattaatcagtgaatcaaattatgattacaattatcaaatgaatgctcagcattaattgaaaactgttttgtgaaacatgtctacccagaaaagtagcattctataaatactattaaacaacttagctatattatttttaagtattaaattatatgtcaagcagttaaagtgaatttcagagtaaaagtaaggcatgtttctgagcaacattgataatttcttaatttgcaaatttcttcttattttggtacttggaatatagtgtgagattttttatttctaaattttgttgtatcttctattacataaatgcattgacaattataaaatgcaagtgttttttgaatgattttaagaatttggcttaaaaattgattgatacaacgtattatttgtactaagaagtaacttgacccaaaacaccttttatgtttgcttagggtatattttttcagtgtctgaaagtcaaaggtattcctgtcacaactgtaaacaaacttatcctaaatgtgttaaaacatattcttgggtactctatttatgtatctttcatgccttgaaaatctgaaggttaatccaaactcacatgttttagcatatttgagaaaaaaaaactaccttcaatatcagccttttaaatttcatgaagattttggtgaggaataatagtatatagtttaagtattgacaaaactttgaaagtttctttctttaaaatgggaaatactcaatatctaaatccaggtcaggcatgggatatcagtatttaacattggatgttttatgttttatatttataatgttcaaaatgcaagcataacatttaatatttgtccacatggttttacaaaagtaaatcttaaattactaagcttttcccatatgttctcgtactttctcaaatccctataaagaattacttgttatctattaaaaatctcctttacccaaatctgtattatggtttcgccagacaaatattatgtgatgtagcccagaaaatccacaccttttgtcctttttatgttttaatttgaataatcatgtgcttagtcccttggtttactgccacatcagtttaacacgatatcagcacattcccttgtcatcatcaaggtgttggctcagatttattcttaattggatgtttaaagcatgtactaccttgttacagttggtttagtgtagtggattattgacatgacatcatgagaagatgtgtaattttataccacatttataaaacatgattttgttttctacccttcaaggtaaacattaaaaataaggtggtacttgtgtacttgtacataaaaccaaaattatagttgggaaaaaaataaatttatatatgaaaatgtcaaaatcattttaaaagtattattttcaaataaaatggagaagctggtgaaaag

SEQ ID NO: 417687 - DNA, 1644 bp, Homo sapiens
gcgactcctagaggacccccaggaaaaggaaaaagcatgacattgtgtatcgattttttgttgttgaccaaaatcacacacatggaaacatgtaattcaacagagtgggaaagctagcagattcttggcttagtattactaataggcaggattgtacaatgagcaactatcagattattcctttcagtggttcttatggcatctaaattactgaataaattattaatccattaatcagtgaatcaaattatgattacaattatcaaatgaatgctcagcattaattgaaaactgttttgtgaaacatgtctacccagaaaagtagcattctataaatactattaaacaacttagctatattatttttaagtattaaattatatgtcaagcagttaaagtgaatttcagagtaaaagtaaggcatgtttctgagcaacattgataatttcttaatttgcaaatttcttcttattttggtacttggaatatagtgtgagattttttatttctaaattttgttgtatcttctattacataaatgcattgacaattataaaatgcaagtgttttttgaatgattttaagaatttggcttaaaaattgattgatacaacgtattatttgtactaagaagtaacttgacccaaaacaccttttatgtttgcttagggtatattttttcagtgtctgaaagtcaaaggtattcctgtcacaactgtaaacaaacttatcctaaatgtgttaaaacatattcttgggtactctatttatgtatctttcatgccttgaaaatctgaaggttaatccaaactcacatgttttagcatatttgagaaaaaaaaactaccttcaatatcagccttttaaatttcatgaagattttggtgaggaataatagtatatagtttaagtattgacaaaactttgaaagtttctttctttaaaatgggaaatactcaatatctaaatccaggtcaggcatgggatatcagtatttaacattggatgttttatgttttatatttataatgttcaaaatgcaagcataacatttaatatttgtccacatggttttacaaaagtaaatcttaaattactaagcttttcccatatgttctcgtactttctcaaatccctataaagaattacttgttatctattaaaaatctcctttacccaaatctgtattatggtttcgccagacaaatattatgtgatgtagcccagaaaatccacaccttttgtcctttttatgttttaatttgaataatcatgtgcttagtcccttggtttactgccacatcagtttaacacgatatcagcacattcccttgtcatcatcaaggtgttggctcagatttattcttaattggatgtttaaagcatgtactaccttgttacagttggtttagtgtagtggattattgacatgacatcatgagaagatgtgtaattttataccacatttataaaacatgattttgttttctacccttcaaggtaaacattaaaaataaggtggtacttgtgtacttgtacataaaaccaaaattatagttgggaaaaaaataaatttatatatgaaaatgtcaaaatcattttaaaagtattattttcaaataaaatggagaagctggtgaaaag

SEQ ID NO: 417688 - DNA, 972 bp, Homo sapiens
cgcgtggtcgtcgccaccgcagccgcccgagaggagctgggggaggacggtggcccgcgaggctcgtcgcagacaacgcggcggcgatgtccgcgagccaggcgagtgccgcggcggcagcggcggggccttgcgcgcggcagggcggcctgggcttcggcctccctccggttccctggaagcgggcccgcgaccagcgcgggagcagcagcagaggcggaggctccagcgcgtctctctcctccccctcagcctgagccgggggaagccaggcggcccgggtgtctggaggggggggggtccgctgcccgagaatgggaattctcttcactagaatatggagactgttcaatcaccaggagcacaaagttatcattgttgggctggataatgcagggaaaactaccattctttaccaattttctatgaatgaagttgtacatacatctcctacaataggaagtaatgtagaagagatagtgattaataatacacgtttcctaatgtgggatattggtggccaagaatctcttcgttcttcctggaacacttactatactaacacagagtttgtaatagttgttgtggacagtacagacagagagaggatttctgtaactagagaagaactctataaaatgttagcgcatgaggacctaagaaaagctggattgctgatttttgctaataaacaagatgttaaagaatgcatgactgtagcagaaatctcccagtttttgaagctaacttctattaaagatcaccagtggcatatccaggcatgctgtgctctaactggcgagggattgtgccaaggacttgaatggatgatgtcacgacttaagattagatgatctctactgacctcttctcatagattttgtataaatgaagtgctggactttacctgaaagctgcaaaaattaatggtttagatatatttataataaactgatttaaactttttctata

SEQ ID NO: 417689 - DNA, 724 bp, Homo sapiens
ggaggtcacggctgccattgattgtgccattgcactccagcctgggtgacagagtgagaccctgtctaaaaaagaggaaagacaaaaaaagcacagatgtattgtgtatgagaatatggcttcactgcagcagcccaagcactgaatattattgatttttaaatctttgttatttagctaaatgaaaaatgctctcttttagtttgctgttcatagtttgctgctcatagcttcttagttcagaatttaatcaaatgattttgttttctttatagattgtgccaaggacttgaatggatgatgtcacgacttaagattagatgatctctactgacctcttctcatagattttgtataaatgaagtgctggactttacctgaaagctgcaaaaattaatggtttagatatatttataataaactgatttaaactttttctataagaagaaaaattaagaccacttatttgaaaacaaagatgaagtctcaccttccagtttgctttctcattagttttttccaaagtaagttattgaagctgtgattgacatttttctcataatgaatcctctcaggacattgtgtagcctatggtaagtacaaagggagaggaagacattttgaattttaagagctttattatcagtttaaccctccctagttgaatgttattttcttcttgttccattaagtcagaatacaaatcagcacagatattcgaatg

SEQ ID NO: 417690 - DNA, 2514 bp, Homo sapiens
ttttttttttttgctttctgccttctaaagtgcaacagtatatatcttgtagaactgtgggaggagagaagataatttttctaccttactccatattcttacttcaaactattttgaatagaggttcactgagccattgctgatagactgtgcatagctactagctgtcacactattgtaggttttttggagagattcatagggaagtgaatgtaaccaggaataaaggctctcactttagctctgggactatgcagtggatcttgggaacaaaataagatatctaatctattttccccattctggctagattttggttgttgtgatgctcctacttcctgtataggtttttgggatcatggtgcaggctagtaataggattcagaattgcttcccttttatatcgaccatgtaagggattctaaaggagggtaaatctcaaagtgctctgaaatcatccctctaaaatctgtcctgtggtgtgctaagatgtctgttgcctttttatgttaagctaaggaacttgaatgccttacctaataactcaactagtagtaagctcattttgtaaatatgaaaatggctgtaagaagtggcattcatgtatattcaatgttagtcaatagaccatagtggcctggatgctttaacaagccaaattccgcaattttttttccttttttccccttcatacttgtatgatctcacctgaccagtgatttcttttcctcctaaccccatgctaccaccattttctggaaatcaaagagatgtggtagtaaatcatacagtacacacgatcatctgagatcaatatgagcacaaaactcatcaagtaggtctgcctggaatgtatataaaaaatgtaaataaaaatttgtaaattagtgtgaactgtatcttgcatatgagactgtgtattgttttgcattctcttcccttttgtagaaatttttctgtaaggaaatgattcagcttgttggttttagagtaaaaatagccaacagttgtggctacacagtgagatcacaggaactggaaatagggtttgtcggctttggttaatgtcagtactcatttatttagcctctcagtgcttaataagacttttctttattttttagttagccgttaggttttgtgaggttagattcctggaagcagtgaatttatacactgttatattaatagagctccgttctttgagtcatgattccaagctaaaggaaattaaaaatgtaatttaataatttcctatttttagggttgttaatttttttctacaaaaaaaccttgaaattttagatatcccaatgtgaatctaatttccatatatacagaaattagacaaataataagtctttagttcaacttaagcatatctcaaatgacttctctaaatttaaagttgatcatgataggatcataaaagacagaaaagacttaagtaatcttgtaatgacaattatttccatttttgctgaactaaaaatatttaacttcataaatatgttactacagcttccagatttaaagaaaaaaagtttcccccactctcaattaaaagttagaaccctccacttttaaaattatacaaatatttcttttttacattacacagaagccttctgtaccattttacgaatttctgtcttcataatataagtgaaaatactgtcatttcaattttctgctttaaattgtttttaataagcattccaaagtgatacagacttaagcttttaatcaatcagtcattcagttgatagacaaagttagcgatgctttatgctaggaaacttgttgacagtaacctgtgcgactttatgcagaagacaaatgctagtaattattatgcacagaggaaaaatcattttaagtatgtggtaaagcagcttcatctttcaaaattgatttgctctggtttttctttagtccattagattccagaatgtccttttactgggaatttagttatgtattaagataacctgttttcagttctttttgaaaagaagacattatttatattgaaccaccttattttaaaatttttaacttttatataccacttgtgtgattccagtgtcatgtcttgggtttgatgtcgttggacagaaaagtgtatcaattattttaaatgaatttttccccatgtttgaggcttagtctgtaaatgtgttgctgtaacagaaaatacttgggtatgcattacttgaatacttgaaaactgaaattaataagatgtattacataatgaattagatttctctgaacagtttttacactgaaaatcttcatttctggattgcagtttgaaatggaatgaagacctgaattatttgggtagaaaaaattatgatagtgcttataagaactgtaaactgttttaaactattttgtgtttgacgcatcaaacttcaagttttttgtaagtttctctcctgaaattttctttctcttctatactttatgcacttactatactactgatgtaataaaagagcagggtta

SEQ ID NO: 417691 - DNA, 1962 bp, Homo sapiens
  misc_feature (1962)..(1962): n is a, c, g, or t
ttttttttttttgctttctgccttctaaagtgcaacagtatatatcttgtagaactgtgggaggagagaagataatttttctaccttactccatattcttacttcaaactattttgaatagaggttcactgagccattgctgatagactgtgcatagctactagctgtcacactattgtaggttttttggagagattcatagggaagtgaatgtaaccaggaataaaggctctcactttagctctgggactatgcagtggatcttgggaacaaaataagatatctaatctattttccccattctggctagattttggttgttgtgatgctcctacttcctgtataggtttttgggatcatggtgcaggctagtaataggattcagaattgcttcccttttatatcgaccatgtaagggattctaaaggagggtaaatctcaaagtgctctgaaatcatccctctaaaatctgtcctgtggtgtgctaagatgtctgttgcctttttatgttaagctaaggaacttgaatgccttacctaataactcaactagtagtaagctcattttgtaaatatgaaaatggctgtaagaagtggcattcatgtatattcaatgttagtcaatagaccatagtggcctggatgctttaacaagccaaattccgcaattttttttccttttttccccttcatacttgtatgatctcacctgaccagtgatttcttttcctcctaaccccatgctaccaccattttctggaaatcaaagagatgtggtagtaaatcatacagtacacacgatcatctgagatcaatatgagcacaaaactcatcaagtaggtctgcctggaatgtatataaaaaatgtaaataaaaatttgtaaattagtgtgaactgtatcttgcatatgagactgtgtattgttttgcattctcttcccttttgtagaaatttttctgtaaggaaatgattcagcttgttggttttagagtaaaaatagccaacagttgtggctacacagtgagatcacaggaactggaaatagggtttgtcggctttggttaatgtcagtactcatttatttagcctctcagtgcttaataagacttttctttattttttagttagccgttaggttttgtgaggttagattcctggaagcagtgaatttatacactgttatattaatagagctccgttctttgagtcatgattccaagctaaaggaaattaaaaatgtaatttaataatttcctatttttagggttgttaatttttttctacaaaaaaaccttgaaattttagatatcccaatgtgaatctaatttccatatatacagaaattagacaaataataagtctttagttcaacttaagcatatctcaaatgacttctctaaatttaaagttgatcatgataggatcataaaagacagaaaagacttaagtaatcttgtaatgacaattatttccatttttgctgaactaaaaatatttaacttcataaatatgttactacagcttccagatttaaagaaaaaaagtttcccccactctcatatttgttaataaaattttattggaacacaaaaaaaaaaaaaaaaaaaaaaaaaaaaaaaaaaaaaaaaaaagaggggggggggggaaaaaaaagggggggggcttggccctttttgggaaaggcgccccaaagagaggggttaaaaaagcaaggacgggggctaacacacggcgggggggacaggccgcgggggtctcgggaggaaccgttgctgggggtgcgcaccgggggaccacccacaggataaagggcaggaaaaaacctcggtagggacacacgctgccgcgacttgctcgtataaccacacacacaaacggacacaggggcgcggagacacagactgaatcgagtagcgcacacaccacaaccagccctgcagctgcagcaggcctcttcaccgn

SEQ ID NO: 417692 - DNA, 3798 bp, Homo sapiens
ttttttttttttgctttctgccttctaaagtgcaacagtatatatcttgtagaactgtgggaggagagaagataatttttctaccttactccatattcttacttcaaactattttgaatagaggttcactgagccattgctgatagactgtgcatagctactagctgtcacactattgtaggttttttggagagattcatagggaagtgaatgtaaccaggaataaaggctctcactttagctctgggactatgcagtggatcttgggaacaaaataagatatctaatctattttccccattctggctagattttggttgttgtgatgctcctacttcctgtataggtttttgggatcatggtgcaggctagtaataggattcagaattgcttcccttttatatcgaccatgtaagggattctaaaggagggtaaatctcaaagtgctctgaaatcatccctctaaaatctgtcctgtggtgtgctaagatgtctgttgcctttttatgttaagctaaggaacttgaatgccttacctaataactcaactagtagtaagctcattttgtaaatatgaaaatggctgtaagaagtggcattcatgtatattcaatgttagtcaatagaccatagtggcctggatgctttaacaagccaaattccgcaattttttttccttttttccccttcatacttgtatgatctcacctgaccagtgatttcttttcctcctaaccccatgctaccaccattttctggaaatcaaagagatgtggtagtaaatcatacagtacacacgatcatctgagatcaatatgagcacaaaactcatcaagtaggtctgcctggaatgtatataaaaaatgtaaataaaaatttgtaaattagtgtgaactgtatcttgcatatgagactgtgtattgttttgcattctcttcccttttgtagaaatttttctgtaaggaaatgattcagcttgttggttttagagtaaaaatagccaacagttgtggctacacagtgagatcacaggaactggaaatagggtttgtcggctttggttaatgtcagtactcatttatttagcctctcagtgcttaataagacttttctttattttttagttagccgttaggttttgtgaggttagattcctggaagcagtgaatttatacactgttatattaatagagctccgttctttgagtcatgattccaagctaaaggaaattaaaaatgtaatttaataatttcctatttttagggttgttaatttttttctacaaaaaaaccttgaaattttagatatcccaatgtgaatctaatttccatatatacagaaattagacaaataataagtctttagttcaacttaagcatatctcaaatgacttctctaaatttaaagttgatcatgataggatcataaaagacagaaaagacttaagtaatcttgtaatgacaattatttccatttttgctgaactaaaaatatttaacttcataaatatgttactacagcttccagatttaaagaaaaaaagtttcccccactctcaattaaaagttagaaccctccacttttaaaattatacaaatatttcttttttacattacacagaagccttctgtaccattttacgaatttctgtcttcataatataagtgaaaatactgtcatttcaattttctgctttaaattgtttttaataagcattccaaagtgatacagacttaagcttttaatcaatcagtcattcagttgatagacaaagttagcgatgctttatgctaggaaacttgttgacagtaacctgtgcgactttatgcagaagacaaatgctagtaattattatgcacagaggaaaaatcattttaagtatgtggtaaagcagcttcatctttcaaaattgatttgctctggtttttctttagtccattagattccagaatgtccttttactgggaatttagttatgtattaagataacctgttttcagttctttttgaaaagaagacattatttatattgaaccaccttattttaaaatttttaacttttatataccacttgtgtgattccagtgtcatgtcttgggtttgatgtcgttggacagaaaagtgtatcaattattttaaatgaatttttccccatgtttgaggcttagtctgtaaatgtgttgctgtaacagaaaatacttgggtatgcattacttgaatacttgaaaactgaaattaataagatgtattacataatgaattagatttctctgaacagtttttacactgaaaatcttcatttctggattgcagtttgaaatggaatgaagacctgaattatttgggtagaaaaaattatgatagtgcttataagaactgtaaactgttttaaactattttgtgtttgacgcatcaaacttcaagttttttgtaagtttctctcctgaaattttctttctcttctatactttatgcacttactatactactgatgtaataaaagagcagggttaaaaatattgtatctgtattcattgtgaatcctgtagcttttctagttaacaaaaaatcgctttctaaaatactcttaatcccattgttttggttaacatcttacccatttgttgtatttcaaatgccattaatcattttagtacaacacctatgtttataaaaatttgaaaacattacatattgtatttaaaactaattagtgaagagtaagaaaaaaactagccaacagaattgtaggtgatgcattagttaaatttcaaaactcataataaaggaactttcagagattggttgaaacccagtggtatccctgtaaattagctcctgtgactggaaaagaccccaaaaaggcagtagaggagattagtgtttacttgctgtggttgtggtgtgctgctacttaattataggtagtgacacactgaaattcttatttgtccaataatctgaagtagtttcctatatttatctgtactaaattgactataaattgagtctgcaaagaggaaactttttgactgtactgtatttaggagcctttgtacagcttggtcaaatttccatgatatgaagtatttgagttttaaaatatactgttattaaaaggaaaaagacatggccattattccatgtgcttaaatgataatttccttattcagtttcagaagaaaaagaatgaaattgggtaactgtcattgcgttagctttatgttgaattgggaaattgtggcataaagcttaaattcgtgtttatcaaatgtgaaccatagtagtataatgctgctttgtatataatgtaagtgctacaaatagtctcagcactgaaaatgtattgatacctcttaaatgaatgcaacttttgatgtaggtgttttgctatgcctcagaaaatatctgtctgagaatttgttaatctgtttgataatgaagatacttcctgttttcttgtttcatattttcatgttcaaaatttaagttttacatttttactactgttaatttaaataaaatttgttctgtggataaaatgaggttggcagtgaagaaaattaaaaacagcctcattcatgtaactggttaagtaaaaatacattttcactatgtgttcataaacttttaatgaagctgtttgtctttcagttcaaatataagtgatgtttaggctttatttctgttaataaggctttttaccattgattaaatgaaggaatgtatctttttgaagagatttatattctgtaaataaaaattcgttgtaacaataaagttgagttctaactaca

SEQ ID NO: 417693 - DNA, 3902 bp, Homo sapiens
ttttttttttttgctttctgccttctaaagtgcaacagtatatatcttgtagaactgtgggaggagagaagataatttttctaccttactccatattcttacttcaaactattttgaatagaggttcactgagccattgctgatagactgtgcatagctactagctgtcacactattgtaggttttttggagagattcatagggaagtgaatgtaaccaggaataaaggctctcactttagctctgggactatgcagtggatcttgggaacaaaataagatatctaatctattttccccattctggctagattttggttgttgtgatgctcctacttcctgtataggtttttgggatcatggtgcaggctagtaataggattcagaattgcttcccttttatatcgaccatgtaagggattctaaaggagggtaaatctcaaagtgctctgaaatcatccctctaaaatctgtcctgtggtgtgctaagatgtctgttgcctttttatgttaagctaaggaacttgaatgccttacctaataactcaactagtagtaagctcattttgtaaatatgaaaatggctgtaagaagtggcattcatgtatattcaatgttagtcaatagaccatagtggcctggatgctttaacaagccaaattccgcaattttttttccttttttccccttcatacttgtatgatctcacctgaccagtgatttcttttcctcctaaccccatgctaccaccattttctggaaatcaaagagatgtggtagtaaatcatacagtacacacgatcatctgagatcaatatgagcacaaaactcatcaagtaggtctgcctggaatgtatataaaaaatgtaaataaaaatttgtaaattagtgtgaactgtatcttgcatatgagactgtgtattgttttgcattctcttcccttttgtagaaatttttctgtaaggaaatgattcagcttgttggttttagagtaaaaatagccaacagttgtggctacacagtgagatcacaggaactggaaatagggtttgtcggctttggttaatgtcagtactcatttatttagcctctcagtgcttaataagacttttctttattttttagttagccgttaggttttgtgaggttagattcctggaagcagtgaatttatacactgttatattaatagagctccgttctttgagtcatgattccaagctaaaggaaattaaaaatgtaatttaataatttcctatttttagggttgttaatttttttctacaaaaaaaccttgaaattttagatatcccaatgtgaatctaatttccatatatacagaaattagacaaataataagtctttagttcaacttaagcatatctcaaatgacttctctaaatttaaagttgatcatgataggatcataaaagacagaaaagacttaagtaatcttgtaatgacaattatttccatttttgctgaactaaaaatatttaacttcataaatatgttactacagcttccagatttaaagaaaaaaagtttcccccactctcaattaaaagttagaaccctccacttttaaaattatacaaatatttcttttttacattacacagaagccttctgtaccattttacgaatttctgtcttcataatataagtgaaaatactgtcatttcaattttctgctttaaattgtttttaataagcattccaaagtgatacagacttaagcttttaatcaatcagtcattcagttgatagacaaagttagcgatgctttatgctaggaaacttgttgacagtaacctgtgcgactttatgcagaagacaaatgctagtaattattatgcacagaggaaaaatcattttaagtatgtggtaaagcagcttcatctttcaaaattgatttgctctggtttttctttagtccattagattccagaatgtccttttactgggaatttagttatgtattaagataacctgttttcagttctttttgaaaagaagacattatttatattgaaccaccttattttaaaatttttaacttttatataccacttgtgtgattccagtgtcatgtcttgggtttgatgtcgttggacagaaaagtgtatcaattattttaaatgaatttttccccatgtttgaggcttagtctgtaaatgtgttgctgtaacagaaaatacttgggtatgcattacttgaatacttgaaaactgaaattaataagatgtattacataatgaattagatttctctgaacagtttttacactgaaaatcttcatttctggattgcagtttgaaatggaatgaagacctgaattatttgggtagaaaaaattatgatagtgcttataagaactgtaaactgttttaaactattttgtgtttgacgcatcaaacttcaagttttttgtaagtttctctcctgaaattttctttctcttctatactttatgcacttactatactactgatgtaataaaagagcagggttaaaaatattgtatctgtattcattgtgaatcctgtagcttttctagttaacaaaaaatcgctttctaaaatactcttaatcccattgttttggttaacatcttacccatttgttgtatttcaaatgccattaatcattttagtacaacacctatgtttataaaaatttgaaaacattacatattgtatttaaaactaattagtgaagagtaagaaaaaaactagccaacagaattgtaggtgatgcattagttaaatttcaaaactcataataaaggaactttcagagattggttgaaacccagtggtatccctgtaaattagctcctgtgactggaaaagaccccaaaaaggcagtagaggagattagtgtttacttgctgtggttgtggtgtgctgctacttaattataggtagtgacacactgaaattcttatttgtccaataatctgaagtagtttcctatatttatctgtactaaattgactataaattgagtctgcaaagaggaaactttttgactgtactgtatttaggagcctttgtacagcttggtcaaatttccatgatatgaagtatttgagttttaaaatatactgttattaaaaggaaaaagacatggccattattccatgtgcttaaatgataatttccttattcagtttcagaagaaaaagaatgaaattgggtaactgtcattgcgttagctttatgttgaattgggaaattgtggcataaagcttaaattcgtgtttatcaaatgtgaaccatagtagtataatgctgctttgtatataatgtaagtgctacaaatagtctcagcactgaaaatgtattgatacctcttaaatgaatgcaacttttgatgtaggtgttttgctatgcctcagaaaatatctgtctgagaatttgttaatctgtttgataatgaagatacttcctgttttcttgtttcatattttcatgttcaaaatttaagttttacatttttactactgttaatttaaataaaatttgttctgtggataaaatgaggttggcagtgaagaaaattaaaaacagcctcattcatgtaactggttaagtaaaaatacattttcactatgtgttcataaacttttaatgaagctgtttgtctttcagttcaaatataagtgatgtttaggctttatttctgttaataaggctttttaccattgattaaatgaaggaatgtatctttttgaagagatttatattctgtaaataaaaattcgttgtaacaataaagttgagttctaactacaaaaaaaaaaagtcgacaccgccgggaatttaggtgtagtagtcccccgggaaattcggaccggttactgaaggcgatccagttttcccaaagttgggcgtattt

SEQ ID NO: 417694 - DNA, 3356 bp, Homo sapiens
ttttttttttttgctttctgccttctaaagtgcaacagtatatatcttgtagaactgtgggaggagagaagataatttttctaccttactccatattcttacttcaaactattttgaatagaggttcactgagccattgctgatagactgtgcatagctactagctgtcacactattgtaggttttttggagagattcatagggaagtgaatgtaaccaggaataaaggctctcactttagctctgggactatgcagtggatcttgggaacaaaataagatatctaatctattttccccattctggctagattttggttgttgtgatgctcctacttcctgtataggtttttgggatcatggtgcaggctagtaataggattcagaattgcttcccttttatatcgaccatgtaagggattctaaaggagggtaaatctcaaagtgctctgaaatcatccctctaaaatctgtcctgtggtgtgctaagatgtctgttgcctttttatgttaagctaaggaacttgaatgccttacctaataactcaactagtagtaagctcattttgtaaatatgaaaatggctgtaagaagtggcattcatgtatattcaatgttagtcaatagaccatagtggcctggatgctttaacaagccaaattccgcaattttttttccttttttccccttcatacttgtatgatctcacctgaccagtgatttcttttcctcctaaccccatgctaccaccattttctggaaatcaaagagatgtggtagtaaatcatacagtacacacgatcatctgagatcaatatgagcacaaaactcatcaagtaggtctgcctggaatgtatataaaaaatgtaaataaaaatttgtaaattagtgtgaactgtatcttgcatatgagactgtgtattgttttgcattctcttcccttttgtagaaatttttctgtaaggaaatgattcagcttgttggttttagagtaaaaatagccaacagttgtggctacacagtgagatcacaggaactggaaatagggtttgtcggctttggttaatgtcagtactcatttatttagcctctcagtgcttaataagacttttctttattttttagttagccgttaggttttgtgaggttagattcctggaagcagtgaatttatacactgttatattaatagagctccgttctttgagtcatgattccaagctaaaggaaattaaaaatgtaatttaataatttcctatttttagggttgttaatttttttctacaaaaaaaccttgaaattttagatatcccaatgtgaatctaatttccatatatacagaaattagacaaataataagtctttagttcaacttaagcatatctcaaatgacttctctaaatttaaagttgatcatgataggatcataaaagacagaaaagacttaagtaatcttgtaatgacaattatttccatttttgctgaactaaaaatatttaacttcataaatatgttactacagcttccagatttaaagaaaaaaagtttcccccactctcaattaaaagttagaaccctccacttttaaaattatacaaatatttcttttttacattacacagaagccttctgtaccattttacgaatttctgtcttcataatataagtgaaaatactgtcatttcaattttctgctttaaattgtttttaataagcattccaaagtgatacagacttaagcttttaatcaatcagtcattcagttgatagacaaagttagcgatgctttatgctaggaaacttgttgacagtaacctgtgcgactttatgcagaagacaaatgctagtaattattatgcacagaggaaaaatcattttaagtatgtggtaaagcagcttcatctttcaaaattgatttgctctggtttttctttagtccattagattccagaatgtccttttactgggaatttagttatgtattaagataacctgttttcagttctttttgaaaagaagacattatttatattgaaccaccttattttaaaatttttaacttttatataccacttgtgtgattccagtgtcatgtcttgggtttgatgtcgttggacagaaaagtgtatcaattattttaaatgaatttttccccatgtttgaggcttagtctgtaaatgtgttgctgtaacagaaaatacttgggtatgcattacttgaatacttgaaaactgaaattaataagatgtattacataatgaattagatttctctgaacagtttttacactgaaaatcttcatttctggattgcagtttgaaatggaatgaagacctgaattatttgggtagaaaaaattatgatagtgcttataagaactgtaaactgttttaaactattttgtgtttgacgcatcaaacttcaagttttttgtaagtttctctcctgaaattttctttctcttctatactttatgcacttactatactactgatgtaataaaagagcagggttaaaaatattgtatctgtattcattgtgaatcctgtagcttttctagttaacaaaaaatcgctttctaaaatactcttaatcccattgttttggttaacatcttacccatttgttgtatttcaaatgccattaatcattttagtacaacacctatgtttataaaaatttgaaaacattacatattgtatttaaaactaattagtgaagagtaagaaaaaaactagccaacagaattgtaggtgatgcattagttaaatttcaaaactcataataaaggaactttcagagattggttgaaacccagtggtatccctgtaaattagctcctgtgactggaaaagaccccaaaaaggcagtagaggagattagtgtttacttgctgtggttgtggtgtgctgctacttaattataggtagtgacacactgaaattcttatttgtccaataatctgaagtagtttcctatatttatctgtactaaattgactataaattgagtctgcaaagaggaaactttttgactgtactgtatttaggagcctttgtacagcttggtcaaatttccatgatatgaagtatttgagttttaaaatatactgttattaaaaggaaaaagacatggccattattccatgtgcttaaatgataatttccttattcagtttcagaagaaaaagaatgaaattgggtaactgtcattgcgttagctttatgttgaattgggaaattgtggcataaagcttaaattcgtgtttatcaaatgtgaaccatagtagtataatgctgctttgtatataatgtaagtgctacaaatagtcagcagcgggatcctcagatcgcctgg

SEQ ID NO: 417695 - DNA, 3551 bp, Homo sapiens
ttttttttttttgctttctgccttctaaagtgcaacagtatatatcttgtagaactgtgggaggagagaagataatttttctaccttactccatattcttacttcaaactattttgaatagaggttcactgagccattgctgatagactgtgcatagctactagctgtcacactattgtaggttttttggagagattcatagggaagtgaatgtaaccaggaataaaggctctcactttagctctgggactatgcagtggatcttgggaacaaaataagatatctaatctattttccccattctggctagattttggttgttgtgatgctcctacttcctgtataggtttttgggatcatggtgcaggctagtaataggattcagaattgcttcccttttatatcgaccatgtaagggattctaaaggagggtaaatctcaaagtgctctgaaatcatccctctaaaatctgtcctgtggtgtgctaagatgtctgttgcctttttatgttaagctaaggaacttgaatgccttacctaataactcaactagtagtaagctcattttgtaaatatgaaaatggctgtaagaagtggcattcatgtatattcaatgttagtcaatagaccatagtggcctggatgctttaacaagccaaattccgcaattttttttccttttttccccttcatacttgtatgatctcacctgaccagtgatttcttttcctcctaaccccatgctaccaccattttctggaaatcaaagagatgtggtagtaaatcatacagtacacacgatcatctgagatcaatatgagcacaaaactcatcaagtaggtctgcctggaatgtatataaaaaatgtaaataaaaatttgtaaattagtgtgaactgtatcttgcatatgagactgtgtattgttttgcattctcttcccttttgtagaaatttttctgtaaggaaatgattcagcttgttggttttagagtaaaaatagccaacagttgtggctacacagtgagatcacaggaactggaaatagggtttgtcggctttggttaatgtcagtactcatttatttagcctctcagtgcttaataagacttttctttattttttagttagccgttaggttttgtgaggttagattcctggaagcagtgaatttatacactgttatattaatagagctccgttctttgagtcatgattccaagctaaaggaaattaaaaatgtaatttaataatttcctatttttagggttgttaatttttttctacaaaaaaaccttgaaattttagatatcccaatgtgaatctaatttccatatatacagaaattagacaaataataagtctttagttcaacttaagcatatctcaaatgacttctctaaatttaaagttgatcatgataggatcataaaagacagaaaagacttaagtaatcttgtaatgacaattatttccatttttgctgaactaaaaatatttaacttcataaatatgttactacagcttccagatttaaagaaaaaaagtttcccccactctcaattaaaagttagaaccctccacttttaaaattatacaaatatttcttttttacattacacagaagccttctgtaccattttacgaatttctgtcttcataatataagtgaaaatactgtcatttcaattttctgctttaaattgtttttaataagcattccaaagtgatacagacttaagcttttaatcaatcagtcattcagttgatagacaaagttagcgatgctttatgctaggaaacttgttgacagtaacctgtgcgactttatgcagaagacaaatgctagtaattattatgcacagaggaaaaatcattttaagtatgtggtaaagcagcttcatctttcaaaattgatttgctctggtttttctttagtccattagattccagaatgtccttttactgggaatttagttatgtattaagataacctgttttcagttctttttgaaaagaagacattatttatattgaaccaccttattttaaaatttttaacttttatataccacttgtgtgattccagtgtcatgtcttgggtttgatgtcgttggacagaaaagtgtatcaattattttaaatgaatttttccccatgtttgaggcttagtctgtaaatgtgttgctgtaacagaaaatacttgggtatgcattacttgaatacttgaaaactgaaattaataagatgtattacataatgaattagatttctctgaacagtttttacactgaaaatcttcatttctggattgcagtttgaaatggaatgaagacctgaattatttgggtagaaaaaattatgatagtgcttataagaactgtaaactgttttaaactattttgtgtttgacgcatcaaacttcaagttttttgtaagtttctctcctgaaattttctttctcttctatactttatgcacttactatactactgatgtaataaaagagcagggttaaaaatattgtatctgtattcattgtgaatcctgtagcttttctagttaacaaaaaatcgctttctaaaatactcttaatcccattgttttggttaacatcttacccatttgttgtatttcaaatgccattaatcattttagtacaacacctatgtttataaaaatttgaaaacattacatattgtatttaaaactaattagtgaagagtaagaaaaaaactagccaacagaattgtaggtgatgcattagttaaatttcaaaactcataataaaggaactttcagagattggttgaaacccagtggtatccctgtaaattagctcctgtgactggaaaagaccccaaaaaggcagtagaggagattagtgtttacttgctgtggttgtggtgtgctgctacttaattataggtagtgacacactgaaattcttatttgtccaataatctgaagtagtttcctatatttatctgtactaaattgactataaattgagtctgcaaagaggaaactttttgactgtactgtatttaggagcctttgtacagcttggtcaaatttccatgatatgaagtatttgagttttaaaatatactgttattaaaaggaaaaagacatggccattattccatgtgcttaaatgataatttccttattcagtttcagaagaaaaagaatgaaattgggtaactgtcattgcgttagctttatgttgaattgggaaattgtggcataaagcttaaattcgtgtttatcaaatgtgaaccatagtagtataatgctgctttgtatataatgtaagtgctacaaatagtctcagcactgaaaatgtattgatacctcttaatgatggacttgaggtagttttgtatgcgtcgaatttgtggaatgggacggtgaagaaaaacccggttgggcaattcagtacaaaggcctcacggcatcaaaccgcggtacggggagaaaaaagcctttaggaaactactttcaacacgaaagggtttggcagttttttattcttattcattgtgtcttgg

SEQ ID NO: 417696 - DNA, 1545 bp, Homo sapiens
ttggcttgtgtttttgttcctttctccttttaaaccccagacagatacgattcagctcggtacccttgcgatgaattgacctgaattatttgggtagaaaaaattatgatagtgcttataagaactgtaaactgttttaaactattttgtgtttgacgcatcaaacttcaagttttttgtaagtttctctcctgaaattttctttctcttctatactttatgcacttactatactactgatgtaataaaagagcagggttaaaaatattgtatctgtattcattgtgaatcctgtagcttttctagttaacaaaaaatcgctttctaaaatactcttaatcccattgttttggttaacatcttacccatttgttgtatttcaaatgccattaatcattttagtacaacacctatgtttataaaaatttgaaaacattacatattgtatttaaaactaattagtgaagagtaagaaaaaaactagccaacagaattgtaggtgatgcattagttaaatttcaaaactcataataaaggaactttcagagattggttgaaacccagtggtatccctgtaaattagctcctgtgactggaaaagaccccaaaaaggcagtagaggagattagtgtttacttgctgtggttgtggtgtgctgctacttaattataggtagtgacacactgaaattcttatttgtccaataatctgaagtagtttcctatatttatctgtactaaattgactataaattgagtctgcaaagaggaaactttttgactgtactgtatttaggagcctttgtacagcttggtcaaatttccatgatatgaagtatttgagttttaaaatatactgttattaaaaggaaaaagacatggccattattccatgtgcttaaatgataatttccttattcagtttcagaagaaaaagaatgaaattgggtaactgtcattgcgttagctttatgttgaattgggaaattgtggcataaagcttaaattcgtgtttatcaaatgtgaaccatagtagtataatgctgctttgtatataatgtaagtgctacaaatagtctcagcactgaaaatgtattgatacctcttaaatgaatgcaacttttgatgtaggtgttttgctatgcctcagaaaatatctgtctgagaatttgttaatctgtttgataatgaagatacttcctgttttcttgtttcatattttcatgttcaaaatttaagttttacatttttactactgttaatttaaataaaatttgttctgtggataaaatgaggttggcagtgaagaaaattaaaaacagcctcattcatgtaactggttaagtaaaaatacattttcactatgtgttcataaacttttaatgaagctgtttgtctttcagttcaaatataagtgatgtttaggctttatttctgttaataaggctttttaccattgattaaatgaaggaatgtatctttttgaagagatttatattctgtaaataaaaattcgttgtaacaataaagttgagttctaactaca

SEQ ID NO: 417697 - DNA, 3103 bp, Homo sapiens
ttttttttttttgctttctgccttctaaagtgcaacagtatatatcttgtagaactgtgggaggagagaagataatttttctaccttactccatattcttacttcaaactattttgaatagaggttcactgagccattgctgatagactgtgcatagctactagctgtcacactattgtaggttttttggagagattcatagggaagtgaatgtaaccaggaataaaggctctcactttagctctgggactatgcagtggatcttgggaacaaaataagatatctaatctattttccccattctggctagattttggttgttgtgatgctcctacttcctgtataggtttttgggatcatggtgcaggctagtaataggattcagaattgcttcccttttatatcgaccatgtaagggattctaaaggagggtaaatctcaaagtgctctgaaatcatccctctaaaatctgtcctgtggtgtgctaagatgtctgttgcctttttatgttaagctaaggaacttgaatgccttacctaataactcaactagtagtaagctcattttgtaaatatgaaaatggctgtaagaagtggcattcatgtatattcaatgttagtcaatagaccatagtggcctggatgctttaacaagccaaattccgcaattttttttccttttttccccttcatacttgtatgatctcacctgaccagtgatttcttttcctcctaaccccatgctaccaccattttctggaaatcaaagagatgtggtagtaaatcatacagtacacacgatcatctgagatcaatatgagcacaaaactcatcaagtaggtctgcctggaatgtatataaaaaatgtaaataaaaatttgtaaattagtgtgaactgtatcttgcatatgagactgtgtattgttttgcattctcttcccttttgtagaaatttttctgtaaggaaatgattcagcttgttggttttagagtaaaaatagccaacagttgtggctacacagtgagatcacaggaactggaaatagggtttgtcggctttggttaatgtcagtactcatttatttagcctctcagtgcttaataagacttttctttattttttagttagccgttaggttttgtgaggttagattcctggaagcagtgaatttatacactgttatattaatagagctccgttctttgagtcatgattccaagctaaaggaaattaaaaatgtaatttaataatttcctatttttagggttgttaatttttttctacaaaaaaaccttgaaattttagatatcccaatgtgaatctaatttccatatatacagaaattagacaaataataagtctttagttcaacttaagcatatctcaaatgacttctctaaatttaaagttgatcatgataggatcataaaagacagaaaagacttaagtaatcttgtaatgacaattatttccatttttgctgaactaaaaatatttaacttcataaatatgttactacagcttccagatttaaagaaaaaaagtttcccccactctcaattaaaagttagaaccctccacttttaaaattatacaaatatttcttttttacattacacagaagccttctgtaccattttacgaatttctgtcttcataatataagtgaaaatactgtcatttcaattttctgctttaaattgtttttaataagcattccaaagtgatacagacttaagcttttaatcaatcagtcattcagttgatagacaaagttagcgatgctttatgctaggaaacttgttgacagtaacctgtgcgactttatgcagaagacaaatgctagtaattattatgcacagaggaaaaatcattttaagtatgtggtaaagcagcttcatctttcaaaattgatttgctctggtttttctttagtccattagattccagaatgtccttttactgggaatttagttatgtattaagataacctgttttcagttctttttgaaaagaagacattatttatattgaaccaccttattttaaaatttttaacttttatataccacttgtgtgattccagtgtcatgtcttgggtttgatgtcgttggacagaaaagtgtatcaattattttaaatgaatttttccccatgtttgaggcttagtctgtaaatgtgttgctgtaacagaaaatacttgggtatgcattacttgaatacttgaaaactgaaattaataagatgtattacataatgaattagatttctctgaacagtttttacactgaaaatcttcatttctggattgcagtttgaaatggaatgaagacctgaattatttgggtagaaaaaattatgatagtgcttataagaactgtaaactgttttaaactattttgtgtttgacgcatcaaacttcaagttttttgtaagtttctctcctgaaattttctttctcttctatactttatgcacttactatactactgatgtaataaaagagcagggttaaaaatattgtatctgtattcattgtgaatcctgtagcttttctagttaacaaaaaatcgctttctaaaatactcttaatcccattgttttggttaacatcttacccatttgttgtatttcaaatgccattaatcattttagtacaacacctatgtttataaaaatttgaaaacattacatattgtatttaaaactaattagtgaagagtaagaaaaaaactagccaacagaattgtaggtgatgcattagttaaatttcaaaactcataataaaggaactttcagagattggttgaaacccagtggtatccctgtaaattagctcctgtgactggaaaagaccccaaaaaggcagtagaggagattagtgtttacttgctgtggttgtggtgtgctgctacttaattataggtagtgacacactgaaattcttatttgtccaataatctgaagtagtttcctatatttatctgtactaaattgactataaattgagtctgcaaagaggaaactttttgactgtactgtatttaggagcctttgtacagcttggtcaaatccatcgcaaagggatcctctagacgaaccc

SEQ ID NO: 417698 - DNA, 3148 bp, Homo sapiens
  misc_feature (2972)..(2973): n is a, c, g, or t
  misc_feature (2987)..(2987): n is a, c, g, or t
  misc_feature (2990)..(2990): n is a, c, g, or t
  misc_feature (3013)..(3013): n is a, c, g, or t
  misc_feature (3026)..(3026): n is a, c, g, or t
  misc_feature (3045)..(3045): n is a, c, g, or t
  misc_feature (3050)..(3050): n is a, c, g, or t
  misc_feature (3100)..(3100): n is a, c, g, or t
  misc_feature (3120)..(3120): n is a, c, g, or t
  misc_feature (3143)..(3143): n is a, c, g, or t
ttttttttttttgctttctgccttctaaagtgcaacagtatatatcttgtagaactgtgggaggagagaagataatttttctaccttactccatattcttacttcaaactattttgaatagaggttcactgagccattgctgatagactgtgcatagctactagctgtcacactattgtaggttttttggagagattcatagggaagtgaatgtaaccaggaataaaggctctcactttagctctgggactatgcagtggatcttgggaacaaaataagatatctaatctattttccccattctggctagattttggttgttgtgatgctcctacttcctgtataggtttttgggatcatggtgcaggctagtaataggattcagaattgcttcccttttatatcgaccatgtaagggattctaaaggagggtaaatctcaaagtgctctgaaatcatccctctaaaatctgtcctgtggtgtgctaagatgtctgttgcctttttatgttaagctaaggaacttgaatgccttacctaataactcaactagtagtaagctcattttgtaaatatgaaaatggctgtaagaagtggcattcatgtatattcaatgttagtcaatagaccatagtggcctggatgctttaacaagccaaattccgcaattttttttccttttttccccttcatacttgtatgatctcacctgaccagtgatttcttttcctcctaaccccatgctaccaccattttctggaaatcaaagagatgtggtagtaaatcatacagtacacacgatcatctgagatcaatatgagcacaaaactcatcaagtaggtctgcctggaatgtatataaaaaatgtaaataaaaatttgtaaattagtgtgaactgtatcttgcatatgagactgtgtattgttttgcattctcttcccttttgtagaaatttttctgtaaggaaatgattcagcttgttggttttagagtaaaaatagccaacagttgtggctacacagtgagatcacaggaactggaaatagggtttgtcggctttggttaatgtcagtactcatttatttagcctctcagtgcttaataagacttttctttattttttagttagccgttaggttttgtgaggttagattcctggaagcagtgaatttatacactgttatattaatagagctccgttctttgagtcatgattccaagctaaaggaaattaaaaatgtaatttaataatttcctatttttagggttgttaatttttttctacaaaaaaaccttgaaattttagatatcccaatgtgaatctaatttccatatatacagaaattagacaaataataagtctttagttcaacttaagcatatctcaaatgacttctctaaatttaaagttgatcatgataggatcataaaagacagaaaagacttaagtaatcttgtaatgacaattatttccatttttgctgaactaaaaatatttaacttcataaatatgttactacagcttccagatttaaagaaaaaaagtttcccccactctcaattaaaagttagaaccctccacttttaaaattatacaaatatttcttttttacattacacagaagccttctgtaccattttacgaatttctgtcttcataatataagtgaaaatactgtcatttcaattttctgctttaaattgtttttaataagcattccaaagtgatacagacttaagcttttaatcaatcagtcattcagttgatagacaaagttagcgatgctttatgctaggaaacttgttgacagtaacctgtgcgactttatgcagaagacaaatgctagtaattattatgcacagaggaaaaatcattttaagtatgtggtaaagcagcttcatctttcaaaattgatttgctctggtttttctttagtccattagattccagaatgtccttttactgggaatttagttatgtattaagataacctgttttcagttctttttgaaaagaagacattatttatattgaaccaccttattttaaaatttttaacttttatataccacttgtgtgattccagtgtcatgtcttgggtttgatgtcgttggacagaaaagtgtatcaattattttaaatgaatttttccccatgtttgaggcttagtctgtaaatgtgttgctgtaacagaaaatacttgggtatgcattacttgaatacttgaaaactgaaattaataagatgtattacataatgaattagatttctctgaacagtttttacactgaaaatcttcatttctggattgcagtttgaaatggaatgaagacctgaattatttgggtagaaaaaattatgatagtgcttataagaactgtaaactgttttaaactattttgtgtttgacgcatcaaacttcaagttttttgtaagtttctctcctgaaattttctttctcttctatactttatgcacttactatactactgatgtaataaaagagcagggttaaaaatattgtatctgtattcattgtgaatcctgtagcttttctagttaacaaaaaatcgctttctaaaatactcttaatcccattgttttggttaacatcttacccatttgttgtatttcaaatgccattaatcattttagtacaacacctatgtttataaaaatttgaaaacattacatattgtatttaaaactaattagtgaagagtaagaaaaaaactagccaacagaattgtaggtgatgcattagttaaatttcaaaactcataataaaggaactttcagagattggttgaaacccagtggtatccctgtaaattagctcctgtgactggaaaagaccccaaaaaggcagtagaggagattagtgtctgtgggtgggggtgtctatatggaggccctgatctatgcatacgagagtcttttttgcatgttatggcgaggactttgtgcgtagnnctgcgtgcattctnttnagttggttaaatcgttaaggaancgcttctgctatntattcttcgtagagaaganaatgnactgctggagtttgtgatggaatgggataagttatcggttaatggacctngagatatgtgttgattatgnaggctcaatgctacctgaaatgnttgtc

SEQ ID NO: 417699 - DNA, 6231 bp, Homo sapiens
aagcgggggcggcagcggtggtagcagctggtacctcccgccgcctctgttcggagggtcgcggggcaccgaggtgctttccggccgccctctggtcggccacccaaagccgcgggcgctgatgatgggtgaggagggggcggcaagatttcgggcgcccctgccctgaacgccctcagctgctgccgccggggccgctccagtgcctgcgaactctgaggagccgaggcgccggtgagagcaaggacgctgcaaacttgcgcagcgcgggggctgggattcacgcccagaagttcagcaggcagacagtccgaagccttcccgcagcggagagatagcttgagggtgcgcaagacggcagcctccgccctcggttcccgcccagaccgggcagaagagcttggaggagccacaaggaacgcaaaaggcggccaggacagcgtgcagcagctgggagccgccgttctcagccttaaaagttgcagagattggaggctgccccgagaggggacagaccccagctccgactgcggggggcaggagaggacggtacccaactgccacctcccttcaaccatagtagttcctctgtaccgagcgcagcgagctacagacgggggcgcggcactcggcgcggagagcgggaggctcaaggtcccagccagtgagcccagtgtgcttgagtgtctctggactcgcccctgagcttccaggtctgtttcatttagactcctgctcgcctccgtgcagttgggggaaagcaagagacttgcgcgcacgcacagtcctctggagatcaggtggaaggagccgctgggtaccaaggactgttcagagcctcttcccatctcggggagagcgaagggtgaggctgggcccggagagcagtgtaaacggcctcctccggcgggatgggagccatcgggctcctgtggctgctgccgctgctgctttccacggcagctgtgggctccgggatggggaccggccagcgcgcgggctccccagctgcggggccgccgctgcagccccgggagccactcagctactcgcgcctgcagaggaagagtctggcagttgacttcgtggtgccctcgctcttccgtgtctacgcccgggacctactgctgccaccatcctcctcggagctgaaggctggcaggcccgaggcccgcggctcgctagctctggactgcgccccgctgctcaggttgctggggccggcgccgggggtctcctggaccgccggttcaccagccccggcagaggcccggacgctgtccagggtgctgaagggcggctccgtgcgcaagctccggcgtgccaagcagttggtgctggagctgggcgaggaggcgatcttggagggttgcgtcgggccccccggggaggcggctgtggggctgctccagttcaatctcagcgagctgttcagttggtggattcgccaaggcgaagggcgactgaggatccgcctgatgcccgagaagaaggcgtcggaagtgggcagagagggaaggctgtccgcggcaattcgcgcctcccagccccgccttctcttccagatcttcgggactggtcatagctccttggaatcaccaacaaacatgccttctccttctcctgattattttacatggaatctcacctggataatgaaagactccttccctttcctgtctcatcgcagccgatatggtctggagtgcagctttgacttcccctgtgagctggagtattcccctccactgcatgacctcaggaaccagagctggtcctggcgccgcatcccctccgaggaggcctcccagatggacttgctggatgggcctggggcagagcgttctaaggagatgcccagaggctcctttctccttctcaacacctcagctgactccaagcacaccatcctgagtccgtggatgaggagcagcagtgagcactgcacactggccgtctcggtgcacaggcacctgcagccctctggaaggtacattgcccagctgctgccccacaacgaggctgcaagagagatcctcctgatgcccactccagggaagcatggttggacagtgctccagggaagaatcgggcgtccagacaacccatttcgagtggccctggaatacatctccagtggaaaccgcagcttgtctgcagtggacttctttgccctgaagaactgcagtgaaggaacatccccaggctccaagatggccctgcagagctccttcacttgttggaatgggacagtcctccagcttgggcaggcctgtgacttccaccaggactgtgcccagggagaagatgagagccagatgtgccggaaactgcctgtgggtttttactgcaactttgaagatggcttctgtggctggacccaaggcacactgtcaccccacactcctcagtggcaggtcaggaccctaaaggatgcccggttccaggaccaccaagaccatgctctattgctcagtaccactgatgtccccgcttctgaaagtgctacagtgaccagtgctacgtttcctgcaccgatcaagagctctccatgtgagctccgaatgtcctggctcattcgtggagtcttgaggggaaacgtgtccttggtgctagtggagaacaaaaccgggaaggagcaaggcaggatggtctggcatgtcgccgcctatgaaggcttgagcctgtggcagtggatggtgttgcctctcctcgatgtgtctgacaggttctggctgcagatggtcgcatggtggggacaaggatccagagccatcgtggcttttgacaatatctccatcagcctggactgctacctcaccattagcggagaggacaagatcctgcagaatacagcacccaaatcaagaaacctgtttgagagaaacccaaacaaggagctgaaacccggggaaaattcaccaagacagacccccatctttgaccctacagttcattggctgttcaccacatgtggggccagcgggccccatggccccacccaggcacagtgcaacaacgcctaccagaactccaacctgagcgtggaggtggggagcgagggccccctgaaaggcatccagatctggaaggtgccagccaccgacacctacagcatctcgggctacggagctgctggcgggaaaggcgggaagaacaccatgatgcggtcccacggcgtgtctgtgctgggcatcttcaacctggagaaggatgacatgctgtacatcctggttgggcagcagggagaggacgcctgccccagtacaaaccagttaatccagaaagtctgcattggagagaacaatgtgatagaagaagaaatccgtgtgaacagaagcgtgcatgagtgggcaggaggcggaggaggagggggtggagccacctacgtatttaagatgaaggatggagtgccggtgcccctgatcattgcagccggaggtggtggcagggcctacggggccaagacagacacgttccacccagagagactggagaataactcctcggttctagggctaaacggcaattccggagccgcaggtggtggaggtggctggaatgataacacttccttgctctgggccggaaaatctttgcaggagggtgccaccggaggacattcctgcccccaggccatgaagaagtgggggtgggagacaagagggggtttcggagggggtggaggggggtgctcctcaggtggaggaggcggaggatatataggcggcaatgcagcctcaaacaatgaccccgaaatggatggggaagatggggtttccttcatcagtccactgggcatcctgtacaccccagctttaaaagtgatggaaggccacggggaagtgaatattaagcattatctaaactgcagtcactgtgaggtagacgaatgtcacatggaccctgaaagccacaaggtcatctgcttctgtgaccacgggacggtgctggctgaggatggcgtctcctgcattgtgtcacccaccccggagccacacctgccactctcgctgatcctctctgtggtgacctctgccctcgtggccgccctggtcctggctttctccggcatcatgattgtgtaccgccggaagcaccaggagctgcaagccatgcagatggagctgcagagccctgagtacaagctgagcaagctccgcacctcgaccatcatgaccgactacaaccccaactactgctttgctggcaagacctcctccatcagtgacctgaaggaggtgccgcggaaaaacatcaccctcattcggggtctgggccatggcgcctttggggaggtgtatgaaggccaggtgtccggaatgcccaacgacccaagccccctgcaagtggctgtgaagacgctgcctgaagtgtgctctgaacaggacgaactggatttcctcatggaagccctgatcatcagcaaattcaaccaccagaacattgttcgctgcattggggtgagcctgcaatccctgccccggttcatcctgctggagctcatggcggggggagacctcaagtccttcctccgagagacccgccctcgcccgagccagccctcctccctggccatgctggaccttctgcacgtggctcgggacattgcctgtggctgtcagtatttggaggaaaaccacttcatccaccgagacattgctgccagaaactgcctcttgacctgtccaggccctggaagagtggccaagattggagacttcgggatggcccgagacatctacagggcgagctactatagaaagggaggctgtgccatgctgccagttaagtggatgcccccagaggccttcatggaaggaatattcacttctaaaacagacacatggtcctttggagtgctgctatgggaaatcttttctcttggatatatgccataccccagcaaaagcaaccaggaagttctggagtttgtcaccagtggaggccggatggacccacccaagaactgccctgggcctgtataccggataatgactcagtgctggcaacatcagcctgaagacaggcccaactttgccatcattttggagaggattgaatactgcacccaggacccggatgtaatcaacaccgctttgccgatagaatatggtccacttgtggaagaggaagagaaagtgcctgtgaggcccaaggaccctgagggggttcctcctctcctggtctctcaacaggcaaaacgggaggaggagcgcagcccagctgccccaccacctctgcctaccacctcctctggcaaggctgcaaagaaacccacagctgcagaggtctctgttcgagtccctagagggccggccgtggaagggggacacgtgaatatggcattctctcagtccaaccctccttcggagttgcacaaggtccacggatccagaaacaagcccaccagcttgtggaacccaacgtacggctcctggtttacagagaaacccaccaaaaagaataatcctatagcaaagaaggagccacacgacaggggtaacctggggctggagggaagctgtactgtcccacctaacgttgcaactgggagacttccgggggcctcactgctcctagagccctcttcgctgactgccaatatgaaggaggtacctctgttcaggctacgtcacttcccttgtgggaatgtcaattacggctaccagcaacagggcttgcccttagaagccgctactgcccctggagctggtcattacgaggataccattctgaaaagcaagaatagcatgaaccagcctgggccctgagctcggtcgcacactcacttctcttccttgggatccctaagaccgtggaggagagagaggcaatggctccttcacaaaccagagaccaaatgtcacgttttgttttgtgccaacctattttgaagtaccaccaaaaaagctgtattttgaaaatgctttagaaaggttttgagcatgggttcatcctattctttcgaaagaagaaaatatcataaaaatgagtgataaatacaaggcccagatgtggttgcataaggtttttatgcatgtttgttgtatacttccttatgcttcttttaaattgtgtgtgctctgcttcaatgtagtcagaattagctgcttctatgtttcatagttggggtcatagatgtttccttgccttgttgatgtggacatgagccatttgaggggagagggaacggaaataaaggagttatttgtaatgactaaaaatggg

SEQ ID NO: 417700 - DNA, 6994 bp, Homo sapiens
aagcgggggcggcagcggtggtagcagctggtacctcccgccgcctctgttcggagggtcgcggggcaccgaggtgctttccggccgccctctggtcggccacccaaagccgcgggcgctgatgatgggtgaggagggggcggcaagatttcgggcgcccctgccctgaacgccctcagctgctgccgccggggccgctccagtgcctgcgaactctgaggagccgaggcgccggtgagagcaaggacgctgcaaacttgcgcagcgcgggggctgggattcacgcccagaagttcagcaggcagacagtccgaagccttcccgcagcggagagatagcttgagggtgcgcaagacggcagcctccgccctcggttcccgcccagaccgggcagaagagcttggaggagccacaaggaacgcaaaaggcggccaggacagcgtgcagcagctgggagccgccgttctcagccttaaaagttgcagagattggaggctgccccgagaggggacagaccccagctccgactgcggggggcaggagaggacggtacccaactgccacctcccttcaaccatagtagttcctctgtaccgagcgcagcgagctacagacgggggcgcggcactcggcgcggagagcgggaggctcaaggtcccagccagtgagcccagtgtgcttgagtgtctctggactcgcccctgagcttccaggtctgtttcatttagactcctgctcgcctccgtgcagttgggggaaagcaagagacttgcgcgcacgcacagtcctctggagatcaggtggaaggagccgctgggtaccaaggactgttcagagcctcttcccatctcggggagagcgaagggtgaggctgggcccggagagcagtgtaaacggcctcctccggcgggatgggagccatcgggctcctgtggctgctgccgctgctgctttccacggcagctgtgggctccgggatggggaccggccagcgcgcgggctccccagctgcggggccgccgctgcagccccgggagccactcagctactcgcgcctgcagaggaagagtctggcagttgacttcgtggtgccctcgctcttccgtgtctacgcccgggacctactgctgccaccatcctcctcggagctgaaggctggcaggcccgaggcccgcggctcgctagctctggactgcgccccgctgctcaggttgctggggccggcgccgggggtctcctggaccgccggttcaccagccccggcagaggcccggacgctgtccagggtgctgaagggcggctccgtgcgcaagctccggcgtgccaagcagttggtgctggagctgggcgaggaggcgatcttggagggttgcgtcgggccccccggggaggcggctgtggggctgctccagttcaatctcagcgagctgttcagttggtggattcgccaaggcgaagggcgactgaggatccgcctgatgcccgagaagaaggcgtcggaagtgggcagagagggaaggctgtccgcggcaattcgcgcctcccagccccgccttctcttccagatcttcgggactggtcatagctccttggaatcaccaacaaacatgccttctccttctcctgattattttacatggaatctcacctggataatgaaagactccttccctttcctgtctcatcgcagccgatatggtctggagtgcagctttgacttcccctgtgagctggagtattcccctccactgcatgacctcaggaaccagagctggtcctggcgccgcatcccctccgaggaggcctcccagatggacttgctggatgggcctggggcagagcgttctaaggagatgcccagaggctcctttctccttctcaacacctcagctgactccaagcacaccatcctgagtccgtggatgaggagcagcagtgagcactgcacactggccgtctcggtgcacaggcacctgcagccctctggaaggtacattgcccagctgctgccccacaacgaggctgcaagagagatcctcctgatgcccactccagggaagcatggttggacagtgctccagggaagaatcgggcgtccagacaacccatttcgagtggccctggaatacatctccagtggaaaccgcagcttgtctgcagtggacttctttgccctgaagaactgcagtgaaggaacatccccaggctccaagatggccctgcagagctccttcacttgttggaatgggacagtcctccagcttgggcaggcctgtgacttccaccaggactgtgcccagggagaagatgagagccagatgtgccggaaactgcctgtgggtttttactgcaactttgaagatggcttctgtggctggacccaaggcacactgtcaccccacactcctcagtggcaggtcaggaccctaaaggatgcccggttccaggaccaccaagaccatgctctattgctcagtaccactgatgtccccgcttctgaaagtgctacagtgaccagtgctacgtttcctgcaccgatcaagagctctccatgtgagctccgaatgtcctggctcattcgtggagtcttgaggggaaacgtgtccttggtgctagtggagaacaaaaccgggaaggagcaaggcaggatggtctggcatgtcgccgcctatgaaggcttgagcctgtggcagtggatggtgttgcctctcctcgatgtgtctgacaggttctggctgcagatggtcgcatggtggggacaaggatccagagccatcgtggcttttgacaatatctccatcagcctggactgctacctcaccattagcggagaggacaagatcctgcagaatacagcacccaaatcaagaaacctgtttgagagaaacccaaacaaggagctgaaacccggggaaaattcaccaagacagacccccatctttgaccctacagttcattggctgttcaccacatgtggggccagcgggccccatggccccacccaggcacagtgcaacaacgcctaccagaactccaacctgagcgtggaggtggggagcgagggccccctgaaaggcatccagatctggaaggtgccagccaccgacacctacagcatctcgggctacggagctgctggcgggaaaggcgggaagaacaccatgatgcggtcccacggcgtgtctgtgctgggcatcttcaacctggagaaggatgacatgctgtacatcctggttgggcagcagggagaggacgcctgccccagtacaaaccagttaatccagaaagtctgcattggagagaacaatgtgatagaagaagaaatccgtgtgaacagaagcgtgcatgagtgggcaggaggcggaggaggagggggtggagccacctacgtatttaagatgaaggatggagtgccggtgcccctgatcattgcagccggaggtggtggcagggcctacggggccaagacagacacgttccacccagagagactggagaataactcctcggttctagggctaaacggcaattccggagccgcaggtggtggaggtggctggaatgataacacttccttgctctgggccggaaaatctttgcaggagggtgccaccggaggacattcctgcccccaggccatgaagaagtgggggtgggagacaagagggggtttcggagggggtggaggggggtgctcctcaggtggaggaggcggaggatatataggcggcaatgcagcctcaaacaatgaccccgaaatggatggggaagatggggtttccttcatcagtccactgggcatcctgtacaccccagctttaaaagtgatggaaggccacggggaagtgaatattaagcattatctaaactgcagtcactgtgaggtagacgaatgtcacatggaccctgaaagccacaaggtcatctgcttctgtgaccacgggacggtgctggctgaggatggcgtctcctgcattgtgtcacccaccccggagccacacctgccactctcgctgatcctctctgtggtgacctctgccctcgtggccgccctggtcctggctttctccggcatcatgattgtgtaccgccggaagcaccaggagctgcaagccatgcagatggagctgcagagccctgagtacaagctgagcaagctccgcacctcgaccatcatgaccgactacaaccccaactactgctttgctggcaagacctcctccatcagtgacctgaaggaggtgccgcggaaaaacatcaccctcattcggggtctgggccatggcgcctttggggaggtgtatgaaggccaggtgtccggaatgcccaacgacccaagccccctgcaagtggctgtgaagacgctgcctgaagtgtgctctgaacaggacgaactggatttcctcatggaagccctgatcatcagcaaattcaaccaccagaacattgttcgctgcattggggtgagcctgcaatccctgccccggttcatcctgctggagctcatggcggggggagacctcaagtccttcctccgagagacccgccctcgcccgagccagccctcctccctggccatgctggaccttctgcacgtggctcgggacattgcctgtggctgtcagtatttggaggaaaaccacttcatccaccgagacattgctgccagaaactgcctcttgacctgtccaggccctggaagagtggccaagattggagacttcgggatggcccgagacatctacagggcgagctactatagaaagggaggctgtgccatgctgccagttaagtggatgcccccagaggccttcatggaaggaatattcacttctaaaacagacacatggtcctttggagtgctgctatgggaaatcttttctcttggatatatgccataccccagcaaaagcaaccaggaagttctggagtttgtcaccagtggaggccggatggacccacccaagaactgccctgggcctgtataccggataatgactcagtgctggcaacatcagcctgaagacaggcccaactttgccatcattttggagaggattgaatactgcacccaggacccggatgtaatcaacaccgctttgccgatagaatatggtccacttgtggaagaggaagagaaagtgcctgtgaggcccaaggaccctgagggggttcctcctctcctggtctctcaacaggcaaaacgggaggaggagcgcagcccagctgccccaccacctctgcctaccacctcctctggcaaggctgcaaagaaacccacagctgcagaggtctctgttcgagtccctagagggccggccgtggaagggggacacgtgaatatggcattctctcagtccaaccctccttcggagttgcacagggtccacggatccagaaataagcccaccagcttgtggaacccaacgtacggctcctggtttacagagaaacccaccaaaaagaataatcctatagcaaagaaggagccacacgagaggggtaacctggggctggagggaagctgtactgtcccacctaacgttgcaactgggagacttccgggggcctcactgctcctagagccctcttcgctgactgccaatatgaaggaggtacctctgttcaggctacgtcacttcccttgtgggaatgtcaattacggctaccagcaacagggcttgcccttagaagccgctactgcccctggagctggtcattacgaggataccattctgaaaagcaagaatagcatgaaccagcctgggccctgagctcggtcgcacactcacttctcttccttgggatccctaagaccgtggaggagagagaggcaatcaatggctcctttcacaaaccagagaccaaatgtcacgttttgttttgtgccaacctattttgaagtaccaccaaaaaagctgtattttgaaaatgctttagaaaggttttgagcatgggttcatcctattctttcgaaagaagaaaatatcataaaaatgagtgataaatacaaggccagatgtggttgcataaggtttttatgcatgtttgttgtactctgttcgagtccctagagggccggccgtggaagggggacacgtgaatatggcattctctcagtccaaccctccttcggagttgcacaaggtccacggatccagaaacaagcccaccagcttgtggaacccaacgtacggctcctggtttacagagaaacccaccaaaaagaataatcctatagcaaagaaggagccacacgacaggggtaacctggggctggagggaagctgtactgtcccacctaacgttgcaactgggagacttccgggggcctcactgctcctagagccctcttcgctgactgccaatatgaaggaggtacctctgttcaggctacgtcacttcccttgtgggaatgtcaattacggctaccagcaacagggcttgcccttagaagccgctactgcccctggagctggtcattacgaggataccattctgaaaagcaagaatagcatgaaccagcctgggccctgagctcggtcgcacactcacttctcttccttgggatccctaagaccgtggaggagagagaggcaatggctccttcacaaaccagagaccaaatgtcacgttttgttttgtgccaacctattttgaagtaccaccaaaaaagctgtattttgaaaatgctttagaaaggttttgagcatgggttcatcctattctttcgaaagaagaaaatatcataaaaatgagtgataaatacaaggcccagatgtggttgcataaggtttttatgcatgtttgttgtatacttccttatgcttcttttaaattgtgtgtgctctgcttcaatgtagtcagaattagctgcttctatgtttcatagttggggtcatagatgtttccttgccttgttgatgtggacatgagccatttgaggggagagggaacggaaataaaggagttatttgtaatgactaaaaatggg

SEQ ID NO: 417701 - DNA, 2589 bp, Homo sapiens
gtgattccgtcctgcgcggttgttctctggagcagcgttcttttatctccgtccgccttctctcctacctaagtgcgtgccgccacccgatggaagattcgatggacatggacatgagccccctgaggccccagaactatcttttcggttgtgaactaaaggccgacaaagattatcactttaaggtggataatgatgaaaatgagcaccagttatctttaagaacggtcagtttaggggctggtgcaaaggatgagttgcacattgttgaagcagaggcaatgaattacgaaggcagtccaattaaagtaacactggcaactttgaaaatgtctgtacagccaacggtttcccttgggggctttgaaataacaccaccagtggtcttaaggttgaagtgtggttcagggccagtgcatattagtggacagcacttagtagtgtaccgccggaagcaccaggagctgcaagccatgcagatggagctgcagagccctgagtacaagctgagcaagctccgcacctcgaccatcatgaccgactacaaccccaactactgctttgctggcaagacctcctccatcagtgacctgaaggaggtgccgcggaaaaacatcaccctcattcggggtctgggccatggcgcctttggggaggtgtatgaaggccaggtgtccggaatgcccaacgacccaagccccctgcaagtggctgtgaagacgctgcctgaagtgtgctctgaacaggacgaactggatttcctcatggaagccctgatcatcagcaaattcaaccaccagaacattgttcgctgcattggggtgagcctgcaatccctgccccggttcatcctgctggagctcatggcggggggagacctcaagtccttcctccgagagacccgccctcgcccgagccagccctcctccctggccatgctggaccttctgcacgtggctcgggacattgcctgtggctgtcagtatttggaggaaaaccacttcatccaccgagacattgctgccagaaactgcctcttgacctgtccaggccctggaagagtggccaagattggagacttcgggatggcccgagacatctacagggcgagctactatagaaagggaggctgtgccatgctgccagttaagtggatgcccccagaggccttcatggaaggaatattcacttctaaaacagacacatggtcctttggagtgctgctatgggaaatcttttctcttggatatatgccataccccagcaaaagcaaccaggaagttctggagtttgtcaccagtggaggccggatggacccacccaagaactgccctgggcctgtataccggataatgactcagtgctggcaacatcagcctgaagacaggcccaactttgccatcattttggagaggattgaatactgcacccaggacccggatgtaatcaacaccgctttgccgatagaatatggtccacttgtggaagaggaagagaaagtgcctgtgaggcccaaggaccctgagggggttcctcctctcctggtctctcaacaggcaaaacgggaggaggagcgcagcccagctgccccaccacctctgcctaccacctcctctggcaaggctgcaaagaaacccacagctgcagaggtctctgttcgagtccctagagggccggccgtggaagggggacacgtgaatatggcattctctcagtccaaccctccttcggagttgcacaaggtccacggatccagaaacaagcccaccagcttgtggaacccaacgtacggctcctggtttacagagaaacccaccaaaaagaataatcctatagcaaagaaggagccacacgacaggggtaacctggggctggagggaagctgtactgtcccacctaacgttgcaactgggagacttccgggggcctcactgctcctagagccctcttcgctgactgccaatatgaaggaggtacctctgttcaggctacgtcacttcccttgtgggaatgtcaattacggctaccagcaacagggcttgcccttagaagccgctactgcccctggagctggtcattacgaggataccattctgaaaagcaagaatagcatgaaccagcctgggccctgagctcggtcgcacactcacttctcttccttgggatccctaagaccgtggaggagagagaggcaatggctccttcacaaaccagagaccaaatgtcacgttttgttttgtgccaacctattttgaagtaccaccaaaaaagctgtattttgaaaatgctttagaaaggttttgagcatgggttcatcctattctttcgaaagaagaaaatatcataaaaatgagtgataaatacaaggcccagatgtggttgcataaggtttttatgcatgtttgttgtatacttccttatgcttcttttaaattgtgtgtgctctgcttcaatgtagtcagaattagctgcttctatgtttcatagttggggtcatagatgtttccttgccttgttgatgtggacatgagccatttgaggggagagggaacggaaataaaggagttatttgtaatgactaaaaatggg

SEQ ID NO: 417702 - DNA, 2784 bp, Homo sapiens
cctccgcaagccgtctttctctagagttgtatatatagaacatcctggagtccaccatgaacggacagttggatctaagtgggaagctaatcatcaaagctcaacttggggaggatattcggcgaattcctattcataatgaagatattacttatgatgaattagtgctaatgatgcaacgagttttcagaggaaaacttctgagtaatgatgaagtaacaataaagtataaagatgaagatggagatcttataacaatttttgatagttctgacctttcctttgcaattcagtgcagtaggatactgaaactgacattatttgttaatggccagccaagaccccttgaatcaagtcaggtgaaatatctccgtcgagaactgatagaacttcgaaataaagtgaatcgtttattggatagcttggaaccacctggagaaccaggaccttccaccaatattcctgaaaatgatactgtggatggtagggaagaaaagtctgcttctgattcttctggaaaacagtctactcaggttatggcagcaagtatgtctgcttttgatcctttaaaaaaccaagatgaaatcaataaaaatgttatgtcagcgtttggcttaacagatgatcaggtttcagtgtaccgccggaagcaccaggagctgcaagccatgcagatggagctgcagagccctgagtacaagctgagcaagctccgcacctcgaccatcatgaccgactacaaccccaactactgctttgctggcaagacctcctccatcagtgacctgaaggaggtgccgcggaaaaacatcaccctcattcggggtctgggccatggcgcctttggggaggtgtatgaaggccaggtgtccggaatgcccaacgacccaagccccctgcaagtggctgtgaagacgctgcctgaagtgtgctctgaacaggacgaactggatttcctcatggaagccctgatcatcagcaaattcaaccaccagaacattgttcgctgcattggggtgagcctgcaatccctgccccggttcatcctgctggagctcatggcggggggagacctcaagtccttcctccgagagacccgccctcgcccgagccagccctcctccctggccatgctggaccttctgcacgtggctcgggacattgcctgtggctgtcagtatttggaggaaaaccacttcatccaccgagacattgctgccagaaactgcctcttgacctgtccaggccctggaagagtggccaagattggagacttcgggatggcccgagacatctacagggcgagctactatagaaagggaggctgtgccatgctgccagttaagtggatgcccccagaggccttcatggaaggaatattcacttctaaaacagacacatggtcctttggagtgctgctatgggaaatcttttctcttggatatatgccataccccagcaaaagcaaccaggaagttctggagtttgtcaccagtggaggccggatggacccacccaagaactgccctgggcctgtataccggataatgactcagtgctggcaacatcagcctgaagacaggcccaactttgccatcattttggagaggattgaatactgcacccaggacccggatgtaatcaacaccgctttgccgatagaatatggtccacttgtggaagaggaagagaaagtgcctgtgaggcccaaggaccctgagggggttcctcctctcctggtctctcaacaggcaaaacgggaggaggagcgcagcccagctgccccaccacctctgcctaccacctcctctggcaaggctgcaaagaaacccacagctgcagaggtctctgttcgagtccctagagggccggccgtggaagggggacacgtgaatatggcattctctcagtccaaccctccttcggagttgcacaaggtccacggatccagaaacaagcccaccagcttgtggaacccaacgtacggctcctggtttacagagaaacccaccaaaaagaataatcctatagcaaagaaggagccacacgacaggggtaacctggggctggagggaagctgtactgtcccacctaacgttgcaactgggagacttccgggggcctcactgctcctagagccctcttcgctgactgccaatatgaaggaggtacctctgttcaggctacgtcacttcccttgtgggaatgtcaattacggctaccagcaacagggcttgcccttagaagccgctactgcccctggagctggtcattacgaggataccattctgaaaagcaagaatagcatgaaccagcctgggccctgagctcggtcgcacactcacttctcttccttgggatccctaagaccgtggaggagagagaggcaatggctccttcacaaaccagagaccaaatgtcacgttttgttttgtgccaacctattttgaagtaccaccaaaaaagctgtattttgaaaatgctttagaaaggttttgagcatgggttcatcctattctttcgaaagaagaaaatatcataaaaatgagtgataaatacaaggcccagatgtggttgcataaggtttttatgcatgtttgttgtatacttccttatgcttcttttaaattgtgtgtgctctgcttcaatgtagtcagaattagctgcttctatgtttcatagttggggtcatagatgtttccttgccttgttgatgtggacatgagccatttgaggggagagggaacggaaataaaggagttatttgtaatgactaaaaatggg

SEQ ID NO: 417703 - DNA, 2818 bp, Homo sapiens
cgcgccatggccggcctcaactccctggaggcggtgaaacgcaagatccaggccctgcagcagcaggcggacgaggcggaagaccgcgcgcagggcctgcagcgggagctggacggcgagcgcgagcggcgcgagaaagctgaaggtgatgtggccgccctcaaccgacgcatccagctcgttgaggaggagttggacagggctcaggaacgactggccacggccctgcagaagctggaggaggcagaaaaagctgcagatgagagtgagagaggaatgaaggtgatagaaaaccgggccatgaaggatgaggagaagatggagattcaggagatgcagctcaaagaggccaagcacattgcggaagaggctgaccgcaaatacgaggaggtagctcgtaagctggtcatcctggagggtgagctggagagggcagaggagcgtgcggaggtgtctgaactaaaatgtggtgacctggaagaagaactcaagaatgttactaacaatctgaaatctctggaggctgcatctgaaaagtattctgaaaaggaggacaaatatgaagaagaaattaaacttctgtctgacaaactgaaagaggctgagacccgtgctgaatttgcagagagaacggttgcaaaactggaaaagacaattgatgacctggaagtgtaccgccggaagcaccaggagctgcaagccatgcagatggagctgcagagccctgagtacaagctgagcaagctccgcacctcgaccatcatgaccgactacaaccccaactactgctttgctggcaagacctcctccatcagtgacctgaaggaggtgccgcggaaaaacatcaccctcattcggggtctgggccatggcgcctttggggaggtgtatgaaggccaggtgtccggaatgcccaacgacccaagccccctgcaagtggctgtgaagacgctgcctgaagtgtgctctgaacaggacgaactggatttcctcatggaagccctgatcatcagcaaattcaaccaccagaacattgttcgctgcattggggtgagcctgcaatccctgccccggttcatcctgctggagctcatggcggggggagacctcaagtccttcctccgagagacccgccctcgcccgagccagccctcctccctggccatgctggaccttctgcacgtggctcgggacattgcctgtggctgtcagtatttggaggaaaaccacttcatccaccgagacattgctgccagaaactgcctcttgacctgtccaggccctggaagagtggccaagattggagacttcgggatggcccgagacatctacagggcgagctactatagaaagggaggctgtgccatgctgccagttaagtggatgcccccagaggccttcatggaaggaatattcacttctaaaacagacacatggtcctttggagtgctgctatgggaaatcttttctcttggatatatgccataccccagcaaaagcaaccaggaagttctggagtttgtcaccagtggaggccggatggacccacccaagaactgccctgggcctgtataccggataatgactcagtgctggcaacatcagcctgaagacaggcccaactttgccatcattttggagaggattgaatactgcacccaggacccggatgtaatcaacaccgctttgccgatagaatatggtccacttgtggaagaggaagagaaagtgcctgtgaggcccaaggaccctgagggggttcctcctctcctggtctctcaacaggcaaaacgggaggaggagcgcagcccagctgccccaccacctctgcctaccacctcctctggcaaggctgcaaagaaacccacagctgcagaggtctctgttcgagtccctagagggccggccgtggaagggggacacgtgaatatggcattctctcagtccaaccctccttcggagttgcacaaggtccacggatccagaaacaagcccaccagcttgtggaacccaacgtacggctcctggtttacagagaaacccaccaaaaagaataatcctatagcaaagaaggagccacacgacaggggtaacctggggctggagggaagctgtactgtcccacctaacgttgcaactgggagacttccgggggcctcactgctcctagagccctcttcgctgactgccaatatgaaggaggtacctctgttcaggctacgtcacttcccttgtgggaatgtcaattacggctaccagcaacagggcttgcccttagaagccgctactgcccctggagctggtcattacgaggataccattctgaaaagcaagaatagcatgaaccagcctgggccctgagctcggtcgcacactcacttctcttccttgggatccctaagaccgtggaggagagagaggcaatggctccttcacaaaccagagaccaaatgtcacgttttgttttgtgccaacctattttgaagtaccaccaaaaaagctgtattttgaaaatgctttagaaaggttttgagcatgggttcatcctattctttcgaaagaagaaaatatcataaaaatgagtgataaatacaaggcccagatgtggttgcataaggtttttatgcatgtttgttgtatacttccttatgcttcttttaaattgtgtgtgctctgcttcaatgtagtcagaattagctgcttctatgtttcatagttggggtcatagatgtttccttgccttgttgatgtggacatgagccatttgaggggagagggaacggaaataaaggagttatttgtaatgactaaaaatggg

SEQ ID NO: 417704 - DNA, 2485 bp, Homo sapiens
cgagaagttgagggagaaaggcgggcccgggaacaggctgaggctgaggtggcctccttgaaccgtaggatccagctggttgaagaagagctggaccgtgctcaggagcgtgcggaggtgtctgaactaaaatgtggtgacctggaagaagaactcaagaatgttactaacaatctgaaatctctggaggctgcatctgaaaagtattctgaaaaggaggacaaatatgaagaagaaattaaacttctgtctgacaaactgaaagaggctgagacccgtgctgaatttgcagagagaacggttgcaaaactggaaaagacaattgatgacctggaagtgtaccgccggaagcaccaggagctgcaagccatgcagatggagctgcagagccctgagtacaagctgagcaagctccgcacctcgaccatcatgaccgactacaaccccaactactgctttgctggcaagacctcctccatcagtgacctgaaggaggtgccgcggaaaaacatcaccctcattcggggtctgggccatggcgcctttggggaggtgtatgaaggccaggtgtccggaatgcccaacgacccaagccccctgcaagtggctgtgaagacgctgcctgaagtgtgctctgaacaggacgaactggatttcctcatggaagccctgatcatcagcaaattcaaccaccagaacattgttcgctgcattggggtgagcctgcaatccctgccccggttcatcctgctggagctcatggcggggggagacctcaagtccttcctccgagagacccgccctcgcccgagccagccctcctccctggccatgctggaccttctgcacgtggctcgggacattgcctgtggctgtcagtatttggaggaaaaccacttcatccaccgagacattgctgccagaaactgcctcttgacctgtccaggccctggaagagtggccaagattggagacttcgggatggcccgagacatctacagggcgagctactatagaaagggaggctgtgccatgctgccagttaagtggatgcccccagaggccttcatggaaggaatattcacttctaaaacagacacatggtcctttggagtgctgctatgggaaatcttttctcttggatatatgccataccccagcaaaagcaaccaggaagttctggagtttgtcaccagtggaggccggatggacccacccaagaactgccctgggcctgtataccggataatgactcagtgctggcaacatcagcctgaagacaggcccaactttgccatcattttggagaggattgaatactgcacccaggacccggatgtaatcaacaccgctttgccgatagaatatggtccacttgtggaagaggaagagaaagtgcctgtgaggcccaaggaccctgagggggttcctcctctcctggtctctcaacaggcaaaacgggaggaggagcgcagcccagctgccccaccacctctgcctaccacctcctctggcaaggctgcaaagaaacccacagctgcagaggtctctgttcgagtccctagagggccggccgtggaagggggacacgtgaatatggcattctctcagtccaaccctccttcggagttgcacaaggtccacggatccagaaacaagcccaccagcttgtggaacccaacgtacggctcctggtttacagagaaacccaccaaaaagaataatcctatagcaaagaaggagccacacgacaggggtaacctggggctggagggaagctgtactgtcccacctaacgttgcaactgggagacttccgggggcctcactgctcctagagccctcttcgctgactgccaatatgaaggaggtacctctgttcaggctacgtcacttcccttgtgggaatgtcaattacggctaccagcaacagggcttgcccttagaagccgctactgcccctggagctggtcattacgaggataccattctgaaaagcaagaatagcatgaaccagcctgggccctgagctcggtcgcacactcacttctcttccttgggatccctaagaccgtggaggagagagaggcaatggctccttcacaaaccagagaccaaatgtcacgttttgttttgtgccaacctattttgaagtaccaccaaaaaagctgtattttgaaaatgctttagaaaggttttgagcatgggttcatcctattctttcgaaagaagaaaatatcataaaaatgagtgataaatacaaggcccagatgtggttgcataaggtttttatgcatgtttgttgtatacttccttatgcttcttttaaattgtgtgtgctctgcttcaatgtagtcagaattagctgcttctatgtttcatagttggggtcatagatgtttccttgccttgttgatgtggacatgagccatttgaggggagagggaacggaaataaaggagttatttgtaatgactaaaaatggg

SEQ ID NO: 417705 - DNA, 251 bp, Homo sapiens
ccaagattggagacttcgggatggcccgagacatctacaggtgagtaaagactgcctcacccctccgggcctgtctcttccacctcagcccctcaagaatggggtgtggctgcttgtcccttacatcatctcctggtaccctgtcaactttctacctaaaatttcactaagttccttttcaggctatgggaaaccttaattagtgaccatgcccgaaggcctaaatctgggatcacacttcctgcagtaat

SEQ ID NO: 417706 - DNA, 2619 bp, Homo sapiens
cctccgcaagccgtctttctctagagttgtatatatagaacatcctggagtccaccatgaacggacagttggatctaagtgggaagctaatcatcaaagctcaacttggggaggatattcggcgaattcctattcataatgaagatattacttatgatgaattagtgctaatgatgcaacgagttttcagaggaaaacttctgagtaatgatgaagtaacaataaagtataaagatgaagatggagatcttataacaatttttgatagttctgacctttcctttgcaattcagtgcagtaggatactgaaactgacattatttgttaatggccagccaagaccccttgaatcaagtcaggtgaaatatctccgtcgagaactgatagaacttcgaaataaagtgaatcgtttattggatagcttggaaccacctggagaaccaggaccttccaccaatattcctgaaaatgtgtaccgccggaagcaccaggagctgcaagccatgcagatggagctgcagagccctgagtacaagctgagcaagctccgcacctcgaccatcatgaccgactacaaccccaactactgctttgctggcaagacctcctccatcagtgacctgaaggaggtgccgcggaaaaacatcaccctcattcggggtctgggccatggcgcctttggggaggtgtatgaaggccaggtgtccggaatgcccaacgacccaagccccctgcaagtggctgtgaagacgctgcctgaagtgtgctctgaacaggacgaactggatttcctcatggaagccctgatcatcagcaaattcaaccaccagaacattgttcgctgcattggggtgagcctgcaatccctgccccggttcatcctgctggagctcatggcggggggagacctcaagtccttcctccgagagacccgccctcgcccgagccagccctcctccctggccatgctggaccttctgcacgtggctcgggacattgcctgtggctgtcagtatttggaggaaaaccacttcatccaccgagacattgctgccagaaactgcctcttgacctgtccaggccctggaagagtggccaagattggagacttcgggatggcccgagacatctacagggcgagctactatagaaagggaggctgtgccatgctgccagttaagtggatgcccccagaggccttcatggaaggaatattcacttctaaaacagacacatggtcctttggagtgctgctatgggaaatcttttctcttggatatatgccataccccagcaaaagcaaccaggaagttctggagtttgtcaccagtggaggccggatggacccacccaagaactgccctgggcctgtataccggataatgactcagtgctggcaacatcagcctgaagacaggcccaactttgccatcattttggagaggattgaatactgcacccaggacccggatgtaatcaacaccgctttgccgatagaatatggtccacttgtggaagaggaagagaaagtgcctgtgaggcccaaggaccctgagggggttcctcctctcctggtctctcaacaggcaaaacgggaggaggagcgcagcccagctgccccaccacctctgcctaccacctcctctggcaaggctgcaaagaaacccacagctgcagaggtctctgttcgagtccctagagggccggccgtggaagggggacacgtgaatatggcattctctcagtccaaccctccttcggagttgcacaaggtccacggatccagaaacaagcccaccagcttgtggaacccaacgtacggctcctggtttacagagaaacccaccaaaaagaataatcctatagcaaagaaggagccacacgacaggggtaacctggggctggagggaagctgtactgtcccacctaacgttgcaactgggagacttccgggggcctcactgctcctagagccctcttcgctgactgccaatatgaaggaggtacctctgttcaggctacgtcacttcccttgtgggaatgtcaattacggctaccagcaacagggcttgcccttagaagccgctactgcccctggagctggtcattacgaggataccattctgaaaagcaagaatagcatgaaccagcctgggccctgagctcggtcgcacactcacttctcttccttgggatccctaagaccgtggaggagagagaggcaatggctccttcacaaaccagagaccaaatgtcacgttttgttttgtgccaacctattttgaagtaccaccaaaaaagctgtattttgaaaatgctttagaaaggttttgagcatgggttcatcctattctttcgaaagaagaaaatatcataaaaatgagtgataaatacaaggcccagatgtggttgcataaggtttttatgcatgtttgttgtatacttccttatgcttcttttaaattgtgtgtgctctgcttcaatgtagtcagaattagctgcttctatgtttcatagttggggtcatagatgtttccttgccttgttgatgtggacatgagccatttgaggggagagggaacggaaataaaggagttatttgtaatgactaaaaatggg

SEQ ID NO: 417707 - DNA, 2743 bp, Homo sapiens
ctctcagccaggcggattgaaggatggaattccaacgaggctcccccgcctcgtcccaccttggctgaaggtgatgtggccgccctcaaccgacgcatccagctcgttgaggaggagttggacagggctcaggaacgactggccacggccctgcagaagctggaggaggcagaaaaagctgcagatgagagtgagagaggaatgaaggtgatagaaaaccgggccatgaaggatgaggagaagatggagattcaggagatgcagctcaaagaggccaagcacattgcggaagaggctgaccgcaaatacgaggaggtagctcgtaagctggtcatcctggagggtgagctggagagggcagaggagcgtgcggaggtgtctgaactaaaatgtggtgacctggaagaagaactcaagaatgttactaacaatctgaaatctctggaggctgcatctgaaaagtattctgaaaaggaggacaaatatgaagaagaaattaaacttctgtctgacaaactgaaagaggctgagacccgtgctgaatttgcagagagaacggttgcaaaactggaaaagacaattgatgacctggaagtgtaccgccggaagcaccaggagctgcaagccatgcagatggagctgcagagccctgagtacaagctgagcaagctccgcacctcgaccatcatgaccgactacaaccccaactactgctttgctggcaagacctcctccatcagtgacctgaaggaggtgccgcggaaaaacatcaccctcattcggggtctgggccatggcgcctttggggaggtgtatgaaggccaggtgtccggaatgcccaacgacccaagccccctgcaagtggctgtgaagacgctgcctgaagtgtgctctgaacaggacgaactggatttcctcatggaagccctgatcatcagcaaattcaaccaccagaacattgttcgctgcattggggtgagcctgcaatccctgccccggttcatcctgctggagctcatggcggggggagacctcaagtccttcctccgagagacccgccctcgcccgagccagccctcctccctggccatgctggaccttctgcacgtggctcgggacattgcctgtggctgtcagtatttggaggaaaaccacttcatccaccgagacattgctgccagaaactgcctcttgacctgtccaggccctggaagagtggccaagattggagacttcgggatggcccgagacatctacagggcgagctactatagaaagggaggctgtgccatgctgccagttaagtggatgcccccagaggccttcatggaaggaatattcacttctaaaacagacacatggtcctttggagtgctgctatgggaaatcttttctcttggatatatgccataccccagcaaaagcaaccaggaagttctggagtttgtcaccagtggaggccggatggacccacccaagaactgccctgggcctgtataccggataatgactcagtgctggcaacatcagcctgaagacaggcccaactttgccatcattttggagaggattgaatactgcacccaggacccggatgtaatcaacaccgctttgccgatagaatatggtccacttgtggaagaggaagagaaagtgcctgtgaggcccaaggaccctgagggggttcctcctctcctggtctctcaacaggcaaaacgggaggaggagcgcagcccagctgccccaccacctctgcctaccacctcctctggcaaggctgcaaagaaacccacagctgcagaggtctctgttcgagtccctagagggccggccgtggaagggggacacgtgaatatggcattctctcagtccaaccctccttcggagttgcacaaggtccacggatccagaaacaagcccaccagcttgtggaacccaacgtacggctcctggtttacagagaaacccaccaaaaagaataatcctatagcaaagaaggagccacacgacaggggtaacctggggctggagggaagctgtactgtcccacctaacgttgcaactgggagacttccgggggcctcactgctcctagagccctcttcgctgactgccaatatgaaggaggtacctctgttcaggctacgtcacttcccttgtgggaatgtcaattacggctaccagcaacagggcttgcccttagaagccgctactgcccctggagctggtcattacgaggataccattctgaaaagcaagaatagcatgaaccagcctgggccctgagctcggtcgcacactcacttctcttccttgggatccctaagaccgtggaggagagagaggcaatggctccttcacaaaccagagaccaaatgtcacgttttgttttgtgccaacctattttgaagtaccaccaaaaaagctgtattttgaaaatgctttagaaaggttttgagcatgggttcatcctattctttcgaaagaagaaaatatcataaaaatgagtgataaatacaaggcccagatgtggttgcataaggtttttatgcatgtttgttgtatacttccttatgcttcttttaaattgtgtgtgctctgcttcaatgtagtcagaattagctgcttctatgtttcatagttggggtcatagatgtttccttgccttgttgatgtggacatgagccatttgaggggagagggaacggaaataaaggagttatttgtaatgactaaaaatggg

SEQ ID NO: 417708 - DNA, 1320 bp, Homo sapiens
cagtttttggttaaaagaacccggaaagagaaggactatgggggaactgatggcgttcctgttacctctcatcattgtgttaatggtgaagcacagcgattcccggacgcactctctgagatattttcgcctgggcgtttcggatcccatccatggggtccctgaatttatttcggttgggtacgtggactcgcaccctatcaccacatatgacagtgtcactcggcagaaggagccacgggccccatggatggcagagaacctcgcgcctgatcactgggagaggtacactcagctgctgaggggctggcagcagatgttcaaggtggaactgaagcgcctacagaggcactacaatcactcagggtctcacacttaccagagaatgattggctgtgagctgctggaggatggaagcaccacaggatttctgcagtatgcatatgacgggcaggatttcctgatcttcaataaagacaccctctcctggctggctgtagataatgtggctcacaccatcaagcaggcatgggaggccaatcagcatgagttgctgtatcaaaagaattggctggaagaagaatgtattgcctggctaaagagattcctggagtatgggaaagacaccctacaaagaacagagcccccactggtcagagtaaatcgcaaagaaacttttccaggggttacagctctcttctgcaaagctcatggcttttaccccccagaaatttacatgacatggatgaaaaacggggaagaaattgtccaagaaattgattatggagacattcttcccagtggggatggaacctatcaggcgtgggcatcaattgagcttgatcctcagagcagcaacctttactcctgtcatgtggagcactgcggtgtccacatggttcttcaggtcccccaggaatcagaaactatccctcttgtgatgaaagctgtctctgggtccattgtccttgtcattgtgctggctggagttggtgttctagtctggagaagaaggccccgagagcaaaatggagccatctaccttccaacaccagatcgatgattgcagatccctcttttccagttctccttcctctaggagccatgttatcctctgtcccccatagagtcaagcctagtgcttgaaggtcctgacgacacccacaacatacatgagagtaatgggattgagcatttatggcagcaacagaggagccacaaaatgttctttgttctttggctccaaaaagactgtcagctttcagtctcttttgatggactgttttatcagagttgactttaaatacagcttgtctcatg

SEQ ID NO: 417709 - DNA, 1185 bp, Homo sapiens
cagtttttggttaaaagaacccggaaagagaaggactatgggggaactgatggcgttcctgttacctctcatcattgtgttaatggtgaagcacagcgattcccggacgcactctctgagatattttcgcctgggcgtttcggatcccatccatggggtccctgaatttatttcggttgggtacgtggactcgcaccctatcaccacatatgacagtgtcactcggcagaaggagccacgggccccatggatggcagagaacctcgcgcctgatcactgggagaggtacactcagctgctgaggggctggcagcagatgttcaaggtggaactgaagcgcctacagaggcactacaatcactcagataatgtggctcacaccatcaagcaggcatgggaggccaatcagcatgagttgctgtatcaaaagaattggctggaagaagaatgtattgcctggctaaagagattcctggagtatgggaaagacaccctacaaagaacagagcccccactggtcagagtaaatcgcaaagaaacttttccaggggttacagctctcttctgcaaagctcatggcttttaccccccagaaatttacatgacatggatgaaaaacggggaagaaattgtccaagaaattgattatggagacattcttcccagtggggatggaacctatcaggcgtgggcatcaattgagcttgatcctcagagcagcaacctttactcctgtcatgtggagcactgcggtgtccacatggttcttcaggtcccccaggaatcagaaactatccctcttgtgatgaaagctgtctctgggtccattgtccttgtcattgtgctggctggagttggtgttctagtctggagaagaaggccccgagagcaaaatggagccatctaccttccaacaccagatcgatgattgcagatccctcttttccagttctccttcctctaggagccatgttatcctctgtcccccatagagtcaagcctagtgcttgaaggtcctgacgacacccacaacatacatgagagtaatgggattgagcatttatggcagcaacagaggagccacaaaatgttctttgttctttggctccaaaaagactgtcagctttcagtctcttttgatggactgttttatcagagttgactttaaatacagcttgtctcatg

SEQ ID NO: 417710 - DNA, 586 bp, Homo sapiens
cagtttttggttaaaagaacccggaaagagaaggactatgggggaactgatggcgttcctgttacctctcatcattgtgttaatggtgaagcacagcgattcccgtgagtatcccacgtcctcttctctcctaactccaaagtcgaggcagcctagaaggcacagcttttcttcctaaaacttgtggtgaaaaatatagaagccaggggcagaaacgtgtatgtattacactcagactccaggagcaatggattgcctgaacagtttcccagttcatatttgtaggattttgatgtcaccaccttctgagggagggggagccgttctagaaagactctggaacttcctcactttccctctgagcatggcctcctttcttttctgctcatattttttcttttacttttgtttctcctcttttctaacttccagagtctcatgaggatgtagtcagagtttcaggggcattaacagtggagtagatccattgttcaggtttatttatgtttttcctcaacacaagccctacctgtaataaaagatccaagaaagataaaaccatggctctgggtttgtttactgactg

SEQ ID NO: 417711 - DNA, 2059 bp, Homo sapiens
cagtttttggttaaaagaacccggaaagagaaggactatgggggaactgatggcgttcctgttacctctcatcattgtgttaatggtgaagcacagcgattcccggacgcactctctgagatattttcgcctgggcgtttcggatcccatccatggggtccctgaatttatttcggttgggtacgtggactcgcaccctatcaccacatatgacagtgtcactcggcagaaggagccacgggccccatggatggcagagaacctcgcgcctgatcactgggagaggtacactcagctgctgaggggctggcagcagatgttcaaggtggaactgaagcgcctacagaggcactacaatcactcagggtctcacacttaccagagaatgattggctgtgagctgctggaggatggaagcaccacaggatttctgcagtatgcatatgacgggcaggatttcctgatcttcaataaagacaccctctcctggctggctgtagataatgtggctcacaccatcaagcaggcatgggaggccaatcagcatgagttgctgtatcaaaagaattggctggaagaagaatgtattgcctggctaaagagattcctggagtatgggaaagacaccctacaaagaacagaatcagaaactatccctcttgtgatgaaagctgtctctgggtccattgtccttgtcattgtgctggctggagttggtgttctagtctggagaagaaggccccgagagcaaaatggagccatctaccttccaacaccagatcgatgattgcagatccctcttttccagttctccttcctctaggagccatgttatcctctgtcccccatagagtcaagcctagtgcttgaaggtcctgacgacacccacaacatacatgagagtaatgggattgagcatttatggcagcaacagaggagccacaaaatgttctttgttctttggctccaaaaagactgtcagctttcagtctcttttgatggactgttttatcagagttgactttaaatacagcttgtctcatgacacaacgcttccctacattctatttgtcaatgatgatttgcaactagttggagattctcagagcaggaaggaatcttttcaaccagagcaggaactgtcttctgcaatgccttggacttgagcctccagcctccacttgaacaccatgtgaagggaacctcagtacttcataaaatggcctttctcattcatctttcatgggaacatttattgtacaagcgctttgaatatcatgggcaccatgactgtgaccctacaggtaggattggatcactccatgagagtagccggcaggtttctacaatggcctgggaatggactgattatttttatacattttctggcctgagagaaagccaaagtcccctgctgttcacagcaaccctgcctgggagcttggaatcttggtaatctgcccggttggatctatggaggtagtctcaccctttttgtcttttgtgggaaattaagagaaataattatcagacatatcatcacctccagtggaactacagagacctggacccagctgcactattttaatgtaaaaataacagtatggccaggtgcagtggctcacgcctgtaatcccatcactttgagcagccaaggcgggcggatcacgaggtcaggagattaagaccatcctggccaatatggtgaaaccctgtctctactaaaatacaaaaaattagctgggcatggtgttgcgtgcctgtagtcccagctacttgggaggctgagacaggggaattgcttgaacccgggaggcagagattgcagtgagccgagatcacgccactgcactccagcctggcgacagagtgagactctatctcaaaataataataataataataataataatagtatatttggtgtcaggagagggctcaattctcatttctgcctttcctgtgctggctcatggtagctgggcatgacttgccttcctacataggttgtcttcatacatatgcactgggaatcaataaaagcccatggtgagaatga

SEQ ID NO: 417712 - DNA, 1044 bp, Homo sapiens
cagtttttggttaaaagaacccggaaagagaaggactatgggggaactgatggcgttcctgttacctctcatcattgtgttaatggtgaagcacagcgattcccggacgcactctctgagatattttcgcctgggcgtttcggatcccatccatggggtccctgaatttatttcggttgggtacgtggactcgcaccctatcaccacatatgacagtgtcactcggcagaaggagccacgggccccatggatggcagagaacctcgcgcctgatcactgggagaggtacactcagctgctgaggggctggcagcagatgttcaaggtggaactgaagcgcctacagaggcactacaatcactcagggtctcacacttaccagagaatgattggctgtgagctgctggaggatggaagcaccacaggatttctgcagtatgcatatgacgggcaggatttcctgatcttcaataaagacaccctctcctggctggctgtagataatgtggctcacaccatcaagcaggcatgggaggccaatcagcatgagttgctgtatcaaaagaattggctggaagaagaatgtattgcctggctaaagagattcctggagtatgggaaagacaccctacaaagaacagaatcagaaactatccctcttgtgatgaaagctgtctctgggtccattgtccttgtcattgtgctggctggagttggtgttctagtctggagaagaaggccccgagagcaaaatggagccatctaccttccaacaccagatcgatgattgcagatccctcttttccagttctccttcctctaggagccatgttatcctctgtcccccatagagtcaagcctagtgcttgaaggtcctgacgacacccacaacatacatgagagtaatgggattgagcatttatggcagcaacagaggagccacaaaatgttctttgttctttggctccaaaaagactgtcagctttcagtctcttttgatggactgttttatcagagttgactttaaatacagcttgtctcatg

SEQ ID NO: 417713 - DNA, 1120 bp, Homo sapiens
cttggcagtgctggaaggagcaagaaacaggaagaaaaagagggacgcactctctgagatattttcgcctgggcgtttcggatcccatccatggggtccctgaatttatttcggttgggtacgtggactcgcaccctatcaccacatatgacagtgtcactcggcagaaggagccacgggccccatggatggcagagaacctcgcgcctgatcactgggagaggtacactcagctgctgaggggctggcagcagatgttcaaggtggaactgaagcgcctacagaggcactacaatcactcagggtctcacacttaccagagaatgattggctgtgagctgctggaggatggaagcaccacaggatttctgcagtatgcatatgacgggcaggatttcctgatcttcaataaagacaccctctcctggctggctgtagataatgtggctcacaccatcaagcaggcatgggaggccaatcagcatgagttgctgtatcaaaagaattggctggaagaagaatgtattgcctggctaaagagattcctggagtatgggaaagacaccctacaaagaacagagcccccactggtcagagtaaatcgcaaagaaacttttccaggggttacagctctcttctgcaaagctcatggcttttaccccccagaaatttacatgacatggatgaaaaacggggaagaaattgtccaagaaattgattatggagacattcttcccagtggggatggaacctatcaggcgtgggcatcaattgagcttgatcctcagagcagcaacctttactcctgtcatgtggagcactgcggtgtccacatggttcttcaggtcccccagggtaaggacggggatcgtggctgtctagggagagagcctggagaaaggggtgagcaggaaaccatgctcgctgccagggaggggaggatagatcactgcctcactcagtgtgccttagaatgggtcttttaaataagtggttctcacactttttggaaccaggacgccttcatactattaaaaaattattgaggaccccagagagcttttgctgatgtgggttatatctattgctatttactacattacaaattaaaaatttaaaa

SEQ ID NO: 417714 - DNA, 1029 bp, Homo sapiens
ctagttgcaaatcatcattgacaaatagaatgtagggaagcgttgtgtcatgagacaagcagtatttaaagtcaactctgagtaaaacagtccatcaaaagagactgaaagctgacagtcttttaggagacaaagaacgaagaacatattgtggctcctctgttacttcataaaatggcctttctcattcatctttcatgggaacatttattgtacaagcgctttgaatatcatgggcaccatgactgtgaccctacaggtaggattggatcactccatgagagtagccggcaggtttctacaatggcctgggaatggactgattatttttatacattttctggcctgagagaaagccaaagtcccctgctgttcacagcaaccctgcctgggagcttggaatcttggtaatctgcccggttggatctatggaggtagtctcaccctttttgtcttttgtgggaaattaagagaaataattatcagacatatcatcacctccagtggaactacagagacctggacccagctgcactattttaatgtaaaaataacagtatggccaggtgcagtggctcacgcctgtaatcccatcactttgagcagccaaggcgggcggatcacgaggtcaggagattaagaccatcctggccaatatggtgaaaccctgtctctactaaaatacaaaaaattagctgggcatggtgttgcgtgcctgtagtcccagctacttgggaggctgagacaggggaattgcttgaacccgggaggcagagattgcagtgagccgagatcacgccactgcactccagcctggcgacagagtgagactctatctcaaaataataataataataataataataataataataataataacagtatatttggtgtcaggagagggctcaattctcatttctgcctttcctgtgctggctcatggtagctgggcatgacttgccttcctacataggttgtcttcatacatatgcactgggaatcaataaaagcccatggtgagaatga

SEQ ID NO: 417715 - DNA, 395 bp, Homo sapiens
gtcattgtgctggctggagttggtgttctagtctggagaagaaggccccgaggtgagaggcacatggaagggatccagggggctgcagactctcctgcatctctccagttttattttctgcacctgctgctccctcctccattcagaaatggcttggctctcaggctgggatcacagaaggacctgggacaaccctcccaccatgtaggggacacaaagcatggataaagcttacagggagagtggtctcttttcataggtgatgcctgacatcaacaaactagtacatctgtccaggggaactgtccccctagaagttgggtcagagaagatatggggatcttgatttgtctttttccaaaccatctttttattattaattactattgacttct

SEQ ID NO: 417716 - DNA, 2074 bp, Homo sapiens
cagtttttggttaaaagaacccggaaagagaaggactatgggggaactgatggcgttcctgttacctctcatcattgtgttaatggtgaagcacagcgattcccggacgcactctctgagatattttcgcctgggcgtttcggatcccatccatggggtccctgaatttatttcggttgggtacgtggactcgcaccctatcaccacatatgacagtgtcactcggcagaaggagccacgggccccatggatggcagagaacctcgcgcctgatcactgggagaggtacactcagctgctgaggggctggcagcagatgttcaaggtggaactgaagcgcctacagaggcactacaatcactcagggtctcacacttaccagagaatgattggctgtgagctgctggaggatggaagcaccacaggatttctgcagtatgcatatgacgggcaggatttcctgatcttcaataaagacaccctctcctggctggctgtagataatgtggctcacaccatcaagcaggcatgggaggccaatcagcatgagttgctgtatcaaaagaattggctggaagaagaatgtattgcctggctaaagagattcctggagtatgggaaagacaccctacaaagaacagaatcagaaactatccctcttgtgatgaaagctgtctctgggtccattgtccttgtcattgtgctggctggagttggtgttctagtctggagaagaaggccccgagagcaaaatggagccatctaccttccaacaccagatcgatgattgcagatccctcttttccagttctccttcctctaggagccatgttatcctctgtcccccatagagtcaagcctagtgcttgaaggtcctgacgacacccacaacatacatgagagtaatgggattgagcatttatggcagcaacagaggagccacaaaatgttctttgttctttggctccaaaaagactgtcagctttcagtctcttttgatggactgttttatcagagttgactttaaatacagcttgtctcatgacacaacgcttccctacattctatttgtcaatgatgatttgcaactagttggagattctcagagcaggaaggaatcttttcaaccagagcaggaactgtcttctgcaatgccttggacttgagcctccagcctccacttgaacaccatgtgaagggaacctcagtacttcataaaatggcctttctcattcatctttcatgggaacatttattgtacaagcgctttgaatatcatgggcaccatgactgtgaccctacaggtaggattggatcactccatgagagtagccggcaggtttctacaatggcctgggaatggactgattatttttatacattttctggcctgagagaaagccaaagtcccctgctgttcacagcaaccctgcctgggagcttggaatcttggtaatctgcccggttggatctatggaggtagtctcaccctttttgtcttttgtgggaaattaagagaaataattatcagacatatcatcacctccagtggaactacagagacctggacccagctgcactattttaatgtaaaaataacagtatggccaggtgcagtggctcacgcctgtaatcccatcactttgagcagccaaggcgggcggatcacgaggtcaggagattaagaccatcctggccaatatggtgaaaccctgtctctactaaaatacaaaaaattagctgggcatggtgttgcgtgcctgtagtcccagctacttgggaggctgagacaggggaattgcttgaacccgggaggcagagattgcagtgagccgagatcacgccactgcactccagcctggcgacagagtgagactctatctcaaaataataataataataataataataataataataataataacagtatatttggtgtcaggagagggctcaattctcatttctgcctttcctgtgctggctcatggtagctgggcatgacttgccttcctacataggttgtcttcatacatatgcactgggaatcaataaaagcccatggtgagaatga

SEQ ID NO: 417717 - DNA, 1618 bp, Homo sapiens
cagtttttggttaaaagaacccggaaagagaaggactatgggggaactgatggcgttcctgttacctctcatcattgtgttaatggtgaagcacagcgattcccggacgcactctctgagatattttcgcctgggcgtttcggatcccatccatggggtccctgaatttatttcggttgggtacgtggactcgcaccctatcaccacatatgacagtgtcactcggcagaaggagccacgggccccatggatggcagagaacctcgcgcctgatcactgggagaggtacactcagctgctgaggggctggcagcagatgttcaaggtggaactgaagcgcctacagaggcactacaatcactcagggtctcacacttaccagagaatgattggctgtgagctgctggaggatggaagcaccacaggatttctgcagtatgcatatgacgggcaggatttcctgatcttcaataaagacaccctctcctggctggctgtagataatgtggctcacaccatcaagcaggcatgggaggccaatcagcatgagttgctgtatcaaaagaattggctggaagaagaatgtattgcctggctaaagagattcctggagtatgggaaagacaccctacaaagaacaggtaaagagaaagagaaggcctcattcccacattgcctgaacaactgtttttatacgtaactcttttaatctaggttatatccactgtatcctgaaagccatctctttagttggcctattgtgatctcatggctagagcccccacgaaaactttccctggttacttttgagcagcatcttgacaagatttgacagttccccttgtcttgacagagtggagtacctccaagggcaccttgtttttagggatctattgaggcaaattcttccattccgtcaatgataagctgggaaattctttgggagatagagcaattcttacaaactgtttagttaacaaagggctcacacaccaccagtaggagtaaaaatctggatttaccaagacaaacagaaggtctctgctttactaaaggattaatgaggttgggcatgatggctcatgcctgtaatcctagcactttgggaggctgaggcaggaggattgcttaaggccaggagtttaagactggcctgggtaacattgtgagaccctgtctctattaaaaaaaaaattagctgagcatggtggcacatgactgtagtcccagatactcaggaggctgaggtgggaggatctcttgagcctggaaggtcaaggctgcagtgagccatgatcatgatcagcctgggtcacagagcaagaccctatttaaaaaaaaaaaaaagtattaatgataagattcctttcagcaaagagctcctcttataccttaaagatatgattcagttggtcaacttttagttcatatagaacttttcatgtatggtcttgttattcaaaattaatcacacctgtatgatgctacaggaaactcctagatacaatgtgtgtgggaagagtatgggaagctcccctctccaggcctctgtctacattcagtgtcctaatggattttcaaccttttggtcaaaacacactcctaaaaaaacaaacaa

SEQ ID NO: 417718 - DNA, 2288 bp, Homo sapiens
cttggcagtgctggaaggagcaagaaacaggaagaaaaagagggacgcactctctgagatattttcgcctgggcgtttcggatcccatccatggggtccctgaatttatttcggttgggtacgtggactcgcaccctatcaccacatatgacagtgtcactcggcagaaggagccacgggccccatggatggcagagaacctcgcgcctgatcactgggagaggtacactcagctgctgaggggctggcagcagatgttcaaggtggaactgaagcgcctacagaggcactacaatcactcagggtctcacacttaccagagaatgattggctgtgagctgctggaggatggaagcaccacaggatttctgcagtatgcatatgacgggcaggatttcctgatcttcaataaagacaccctctcctggctggctgtagataatgtggctcacaccatcaagcaggcatgggaggccaatcagcatgagttgctgtatcaaaagaattggctggaagaagaatgtattgcctggctaaagagattcctggagtatgggaaagacaccctacaaagaacagagcccccactggtcagagtaaatcgcaaagaaacttttccaggggttacagctctcttctgcaaagctcatggcttttaccccccagaaatttacatgacatggatgaaaaacggggaagaaattgtccaagaaattgattatggagacattcttcccagtggggatggaacctatcaggcgtgggcatcaattgagcttgatcctcagagcagcaacctttactcctgtcatgtggagcactgcggtgtccacatggttcttcaggtcccccaggaatcagaaactatccctcttgtgatgaaagctgtctctgggtccattgtccttgtcattgtgctggctggagttggtgttctagtctggagaagaaggccccgagagcaaaatggagccatctaccttccaacaccagatcgatgattgcagatccctcttttccagttctccttcctctaggagccatgttatcctctgtcccccatagagtcaagcctagtgcttgaaggtcctgacgacacccacaacatacatgagagtaatgggattgagcatttatggcagcaacagaggagccacaaaatgttctttgttctttggctccaaaaagactgtcagctttcagtctcttttgatggactgttttatcagagttgactttaaatacagcttgtctcatgacacaacgcttccctacattctatttgtcaatgatgatttgcaactagttggagattctcagagcaggaaggaatcttttcaaccagagcaggaactgtcttctgcaatgccttggacttgagcctccagcctccacttgaacaccatgtgaagggaacctcagtacttcataaaatggcctttctcattcatctttcatgggaacatttattgtacaagcgctttgaatatcatgggcaccatgactgtgaccctacaggtaggattggatcactccatgagagtagccggcaggtttctacaatggcctgggaatggactgattatttttatacattttctggcctgagagaaagccaaagtcccctgctgttcacagcaaccctgcctgggagcttggaatcttggtaatctgcccggttggatctatggaggtagtctcaccctttttgtcttttgtgggaaattaagagaaataattatcagacatatcatcacctccagtggaactacagagacctggacccagctgcactattttaatgtaaaaataacagtatggccaggtgcagtggctcacgcctgtaatcccatcactttgagcagccaaggcgggcggatcacgaggtcaggagattaagaccatcctggccaatatggtgaaaccctgtctctactaaaatacaaaaaattagctgggcatggtgttgcgtgcctgtagtcccagctacttgggaggctgagacaggggaattgcttgaacccgggaggcagagattgcagtgagccgagatcacgccactgcactccagcctggcgacagagtgagactctatctcaaaataataataataataataataataataataataataataacagtatatttggtgtcaggagagggctcaattctcatttctgcctttcctgtgctggctcatggtagctgggcatgacttgccttcctacataggttgtcttcatacatatgcactgggaatcaataaaagcccatggtgagaatga

SEQ ID NO: 417719 - DNA, 804 bp, Homo sapiens
cagtttttggttaaaagaacccggaaagagaaggactatgggggaactgatggcgttcctgttacctctcatcattgtgttaatggtgaagcacagcgattcccggacgcactctctgagatattttcgcctgggcgtttcggatcccatccatggggtccctgaatttatttcggttgggtacgtggactcgcaccctatcaccacatatgacagtgtcactcggcagaaggagccacgggccccatggatggcagagaacctcgcgcctgatcactgggagaggtacactcagctgctgaggggctggcagcagatgttcaaggtggaactgaagcgcctacagaggcactacaatcactcaggtgtgcatgcggcagagacagacgcttcccccatcccaccccaacccgcagagacccctgggctggcctccaataagcggatgctgaattgcacctgctgtagctttggcaaagcctgaggaatcaggttggtggagttcagggcctcccatctgcctgtgcatcttctggactgtccctctctcccccaggagcactctgtcatttgccccacccactcttccccatctctgtatccgtatctgcatcccatttccactcaggcttctgatatgcatctccttttccattctaaatttgcccattctgcgtctcacttcctggtagccaggcctagtgacttgcttatgagtatcgacagtaactttcccaggggtatttctggctcctgcatctctctccctccttctcgcagtctctaatcactagtgaattcgct

SEQ ID NO: 417720 - DNA, 334 bp, Homo sapiens
acatctgcagccatatatgaggtccctcatgagacttagcaacaaggtgtgttttaatgtgacagtgtgtctgatgtgtccccagcacattgggaccagtacacagtgttatttgtacatctgctgagtaacattgagtgtgtgggtaactaaagccctcagtaattattttacttaatgttttcaagcttaattctgatcttgtacttgcatgatttattattccttgtgctaaattcttcaatgttcttgccttgattgatctttcattatctatcacttaactaaaatattaaattctttaattaagtcatgtttaaatgaggacttgttt

SEQ ID NO: 417721 - DNA, 2491 bp, Homo sapiens
agctggccctggctgtgagagtcagatctgtccccaaggctccaggtcagaacttggacccaggtgccttctgaggcaccgccaaggacacatcccagcgccttaggcacctgtaggctagaatgacaccttccaggccagccccagaggccctcagggctccccctccaagccgggagggcaggcaggcacaggccccgctcactacctcagcacccagtgcagccccaggctcccggacgtgctcggcccggtggcctcttgtgtgacaggccctctgccatgtctgtccgcagagccgggtggggagcctccgtgtgggtcctcctctgtccctttgcagctcgcattcgccagagcggagcgcagcccttgtttccttctttcctcttcagctctgacttaaaaacacactatgttccaaatcgttgtgggatcggaaactagaactgcttgtttccaggagagaccaccttttcatattttttttaaaaggaatttgtgcttcaaaagaaactccaaaaaataaatttattgttagtctagcatatgctcattgaaattgacttatgttttattttaaaaaatcatgtaggatctggtacatggggcgggcaaaagggtatcatcagcttaagaagtaaagaagtgagccttccatttgtgtgggtgataacatctttttcctagatcgtacctcaaaattcaggctctccatgaaaacaaagataatctgaataaaaattgtgtgttgggaaatgtatcaagtgaccttcagttaagaaaagcacaggctgtttattagcacaacttgcttcattaaataattcgtggctttttctgccactggggttcttttcgttttgaattcagcttgtgtttggttcctcggtcttgtaccccttcagttcgccggcgacgtaatggtgataccctttgttttttgtatcataccttttgtgaattgtgacaaccatcccgtaatcattgtggcctcagcagaagttttgaacaatctttgcagccactgttggggtgtgtaccagcagcctggaagtgaccagcagagctgacaaaagcaccccctgctctgcccacctccgcagagtcctgtcctcatcagaaacggtatcgcggatgctcctcaggtaggcgtaggcagacttcattgtgtgttagcagtgacagtgatgtctgtacctatctgtgagtgagacccattcatgacacactagaaatgtgtacattcttttgttttccatcacgggtataggtcttctgccatgaaagagaactatcaaggaaattcctgaaaacaagatttgtaaattcgatttgaccctcccaaattcagggctgctctttgcagtggtccctggcccagcaggtggccggcgtggctcctgttggctcatgccagtgttgtgctggaccctcgagtatgtgactgtcacccttgtccaagactggtttttaacagtcttgatttgtcattttgatgctttgaatactataaggaaaatgccacgaataccatataaataccacaccaatctgttgaacatatctgtgttttctgacatgggacctgcagaatagtatttcttttaaatcctgcaactttattatctagtagaattccaagtaggtctgcttagacacatattcagtgaagattgtattgtgtgtgatattatcctatctttaataaagtcctactactgaaaaacagggatttgcaatgaaaatcatagctaaataggcaggtttagaaagttcaaaatattggaagtgctagaaggctgcaacttgtaaaattgtactccccaagttcagtaggatagtagagaagtcgtgctaagttgatttcattgaaatgtcacgtctcacatcctgtggtccaaaggtactagtttgttttgtggaataattttctgttcacttgctgataagaaatttagcagtcagaagtaatttttaattaataacctttctttttaaaagttgctttatggtttacaagtaatactgatgcaaaaaggatttgttaacctaaattaagtagcacgcactttgtttacatgcttcagtatattgtggggttggtcccttctcacgaacccaggacctgtgcttggggaacattttgccatcatgctgttctcttgtaccaaggatcagtgaaagtgttttatcttttttatgtagtttgtattgactggattttataactgtaagaaaacagaaacagagtgttgtattttgatctgaaatttgtgtatgctaaagtaattttgttttatgtattggaagttcacttaaaaacttgaaatattttctagaagggtaccacacaaaaggaatcatctttaagctgtttaattaacctaataaaataatttgatggggaaggcattctaattgtttctgatttttagagtggttcctgctaaatcatcattatcaatacagcttgatttgatttaagaat

SEQ ID NO: 417722 - DNA, 325 bp, Homo sapiens
tgtatggatgtaccataatttatgtaaccagttttttattgttggttatttaaattgttttcaatattttgcccttacaatcaatactgtaatgaatatctttgggtatatctgttgaacacctatgtgaattatgtggaataaattctcataagtagaatttcttgttcaaaaggttttttttttaattgtataaatattgccaaatgcaatagaggtttttaccagttaacacttccaactaataatgtgtgaataaactttttcttaaataaaactgattctacaaaccgagtcttaggagaaaataaaatttataaataat

SEQ ID NO: 417723 - DNA, 473 bp, Homo sapiens
ggacactcatctgtgccccacgtccagatccctggaggcagctgaccaatgatgggcggtgacccggtaaccgaggcggcaaggaggccaggtagtcccggcacctctcactctgcagagaccagcggcttcgtgggaggcctgtgggtcacacgtaggggctagagccagcctgcatcctgcccaccgggctccacttggagatcagcaggagggccagtgtgggacccctgctgccacctctcctgggcctgtgtcctttctggaaattaagaaggtgtgctccagagccaagaggagcaataagaaacctcgtgtgccagcttctgagggtggcagtgccagaccccacctgccagcggtgctgcccctttctcagacccccatgcccagtgcaggcagggccctggaaagggtcagctctccctgacagagaccagcagagtgaaggactgagcactggccaggctcaa

SEQ ID NO: 417724 - DNA, 178 bp, Homo sapiens
cattgcaagtatgtgtggtacagtaaaatgttgctaattgtatctgcgctgataagatgccatttgctctaggtcagtttcctaccccctcccccaactattcctagccagtggtagcatgcttcttacttccaaatatatgtgtgtgtgtgtgtgtgtgtgtgtgtgtgtgtgtgcc

SEQ ID NO: 417725 - DNA, 5262 bp, Homo sapiens
ggctcctgaggcgcacagcgccgagcgcggcgccgcgcacccgcgcgccggacgccagtgaccgcgatggtgaactccagtcgcgtgcagcctcagcagcccggggacgccaagcggccgcccgcgccccgcgcgccggacccgggccggctgatggctggctgcgcggccgtgggcgccagcctcgccgccccgggcggcctctgcgagcagcggggcctggagatcgagatgcagcgcatccggcaggcggccgcgcgggaccccccggccggagccgcggcctccccttctcctccgctctcgtcgtgctcccggcaggcgtggagccgcgataaccccggcttcgaggccgaggaggaggaggaggaggtggaaggggaagaaggcggaatggtggtggagatggacgtagagtggcgcccgggcagccggaggtcggccgcctcctcggccgtgagctccgtgggcgcgcggagccgggggcttgggggctaccacggcgcgggccacccgagcgggaggcggcgccggcgagaggaccagggcccgccgtgccccagcccagtcggcggcggggacccgctgcatcgccacctccccctggaagggcagccgccccgagtggcctgggcggagaggctggttcgcgggctgcgaggtctctggggaacaagactcatggaggaaagcagcactaaccgagagaaataccttaaaagtgttttacgggaactggtcacatacctcctttttctcatagtcttgtgcatcttgacctacggcatgatgagctccaatgtgtactactacacccggatgatgtcacagctcttcctagacacccccgtgtccaaaacggagaaaactaactttaaaactctgtcttccatggaagacttctggaagttcacagaaggctccttattggatgggctgtactggaagatgcagcccagcaaccagactgaagctgacaaccgaagtttcatcttctatgagaacctgctgttaggggttccacgaatacggcaactccgagtcagaaatggatcctgctctatcccccaggacttgagagatgaaattaaagagtgctatgatgtctactctgtcagtagtgaagatagggctccctttgggccccgaaatggaaccgcttggatctacacaagtgaaaaagacttgaatggtagtagccactggggaatcattgcaacttatagtggagctggctattatctggatttgtcaagaacaagagaggaaacagctgcacaagttgctagcctcaagaaaaatgtctggctggaccgaggaaccagggcaacttttattgacttctcagtgtacaacgccaacattaacctgttctgtgtggtcaggttattggttgaattcccagcaacaggtggtgtgattccatcttggcaatttcagcctttaaagctgatccgatatgtcacaacttttgatttcttcctggcagcctgtgagattatcttttgtttctttatcttttactatgtggtggaagagatattggaaattcgcattcacaaactacactatttcaggagtttctggaattgtctggatgttgtgatcgttgtgctgtcagtggtagctataggaattaacatatacagaacatcaaatgtggaggtgctactacagtttctggaagatcaaaatactttccccaactttgagcatctggcatattggcagatacagttcaacaatatagctgctgtcacagtattttttgtctggattaagctcttcaaattcatcaattttaacaggaccatgagccagctctcgacaaccatgtctcgatgtgccaaagacctgtttggctttgctattatgttcttcattattttcctagcgtatgctcagttggcataccttgtctttggcactcaggtcgatgacttcagtactttccaagagtgtatcttcactcaattccgtatcattttgggcgatatcaactttgcagagattgaggaagctaatcgagttttgggaccaatttatttcactacatttgtgttctttatgttcttcattcttttgaatatgtttttggctatcatcaatgatacttactctgaagtgaaatctgacttggcacagcagaaagctgaaatggaactctcagatcttatcagaaagggctaccataaagctttggtcaaactaaaactgaaaaaaaataccgtggatgacatttcagagagtctgcggcaaggaggaggcaagttaaactttgacgaacttcgacaagatctcaaagggaagggccatactgatgcagagattgaggcaatattcacaaagtacgaccaagatggagaccaagaactgaccgaacatgaacatcagcagatgagagacgacttggagaaagagagggaggacctggatttggatcacagttctttaccacgtcccatgagcagccgaagtttccctcgaagcctggatgactctgaggaggatgacgatgaagatagcggacatagctccagaaggaggggaagcatttctagtggcgtttcttacgaagagtttcaagtcctggtgagacgagtggaccggatggagcattccatcggcagcatagtgtccaagattgacgccgtgatcgtgaagctagagattatggagcgagccaaactgaagaggagggaggtgctgggaaggctgttggatggggtggccgaggatgaaaggctgggtcgtgacagtgaaatccatagggaacagatggaacggctagtacgtgaagagttggaacgctgggaatccgatgatgcagcttcccagatcagtcatggtttaggcacgccagtgggactaaatggtcaacctcgccccagaagctcccgcccatcttcctcccaatctacagaaggcatggaaggtgcaggtggaaatgggagttctaatgtccacgtatgatatgtgtgtttcagtatgtgtgtttctaataagtgaggaagtggctgtcctgaattgctgtaacaagcacactatttatatgccctgaccaccataggatgctagtctttgtgaccgattgctaatcttctgcactttaatttattttatataaactttacccatggttcaaagatttttttttctttttctcatataagaaatctaggtgtaaatattgagtacagaaaaaaaatcttcatgatgtgtattgagcggtacgcccagttgccaccatgactgagtcttctcagttgacaatgaagtagccttttaaagctagaaaactgtcaaagggcttctgagtttcatttccagtcacaaaaatcagtattgttatttttttccaagagtgtgaaggaaaatggggcattcctttccactctggcatagttcatgagcttaatacatagctttcttttaagaaaggagccttttttttcaactagcttcctggggtaaacttttctaaaagataaaatggaaaggaactccaaactatgatagaatctgtgtgaatggttaagatgaatgttaaatactatgcttttttgtaagttgatcgtatctgatgtctgtgggactaactgtatcacttaatttttaccttattttggctctaatttgaataagctgagtaaaaccaccaaagatcagttataggataaaatggcatctctaaccataacacaggagaattggaaggagccctaagttgtcactcagtttaatttcttttaatggttagtttagcctaaagatttatctgcatattctttttcccatgtggctctactcatttgcaactgaatttaatgttataactcatctagtgagaccaacttactaaatttttagtatgcactgaaagtttttatccaacaattatgttcattttaagcaaaattttaagaaagttttgaaattcataaagcatttggttttaaactattttaagaatatagtactcggtcaggtatgacggctcacgcctgtaatcccagcactttgggaggccgaaacaggcgaatcacttgagcccaggagttcaagaccaacatgggcaatgtggcgaaactccatctctacaaaaaatgcaaaaataaaaaatatagtactcaagtattcttgatcctgtgtttcaaaactagaatttgtaatgcaaatggagctcagtctaataaaaaagaggttttggtattaaaagttcatacattagacagtatcagccaaaatttgagttagcaacactgttttctttacgagagggtctcacccaaatttatggggagaaatctatttctcaaaaaaaaaaatcttcttttacagaaatgttgagtaaggtgacattttgagcgctaataagcaaaagagcatgcagtgctgttgaataaccctcacttggagaaccaagagaatcctgtcgtttaatgctatattttaatttcacaagttgttcatttaactggtagaatgtcagtccaatctccaatgagaacatgagcaaatagacctttccaggttgaaagtgaaacatactgggtttctgtaagtttttcctcatggcttcatctctatctttactttctcttgaatatgctacacaaagttctttattactacatactaaagtttgcattccagggatattgactgtacatatttatgtatatgtaccatgttgttacatgtaaacaaacttcaatttgaagtgcagctattatgtggtatccatgtgtatcgaccatgtgccatatatcaattatggtcactagaaagtctctttatgatactttttattgtactgtttttcatttcacttgcaaaattttgcagaattcctcctttctacccataaattacatatatttttcttctttagtcatggagaactccccccctcatctcttccctattatctttccctgtgtactggtattattaaaaagacattacatacgcaagtctttctcgacaatcaagaatgttattaatgtgtaatactgagcactttacttcttaataaaaacttgatatagtagcaaaaaaaaaaacaaggggggggtcaaatttcctcgggcccactagcctcccgttttgccaggcccaaggagtctttaacaagcgccccttaaggtcgacggaaggcttgtctcggaccctcggctcatggacaccacaataagcggaaaaagtttgacacctggcttggttaaacgaaaacggaagaacaagacaacacaccaataa

SEQ ID NO: 417726 - DNA, 5195 bp, Homo sapiens
ggctcctgaggcgcacagcgccgagcgcggcgccgcgcacccgcgcgccggacgccagtgaccgcgatggtgaactccagtcgcgtgcagcctcagcagcccggggacgccaagcggccgcccgcgccccgcgcgccggacccgggccggctgatggctggctgcgcggccgtgggcgccagcctcgccgccccgggcggcctctgcgagcagcggggcctggagatcgagatgcagcgcatccggcaggcggccgcgcgggaccccccggccggagccgcggcctccccttctcctccgctctcgtcgtgctcccggcaggcgtggagccgcgataaccccggcttcgaggccgaggaggaggaggaggaggtggaaggggaagaaggcggaatggtggtggagatggacgtagagtggcgcccgggcagccggaggtcggccgcctcctcggccgtgagctccgtgggcgcgcggagccgggggcttgggggctaccacggcgcgggccacccgagcgggaggcggcgccggcgagaggaccagggcccgccgtgccccagcccagtcggcggcggggacccgctgcatcgccacctccccctggaagggcagccgccccgagtggcctgggcggagaggctggttcgcgggctgcgaggtctctggggaacaagactcatggaggaaagcagcactaaccgagagaaataccttaaaagtgttttacgggaactggtcacatacctcctttttctcatagtcttgtgcatcttgacctacggcatgatgagctccaatgtgtactactacacccggatgatgtcacagctcttcctagacacccccgtgtccaaaacggagaaaactaactttaaaactctgtcttccatggaagacttctggaagttcacagaaggctccttattggatgggctgtactggaagatgcagcccagcaaccagactgaagctgacaaccgaagtttcatcttctatgagaacctgctgttaggggttccacgaatacggcaactccgagtcagaaatggatcctgctctatcccccaggacttgagagatgaaattaaagagtgctatgatgtctactctgtcagtagtgaagatagggctccctttgggccccgaaatggaaccgcttggatctacacaagtgaaaaagacttgaatggtagtagccactggggaatcattgcaacttatagtggagctggctattatctggatttgtcaagaacaagagaggaaacagctgcacaagttgctagcctcaagaaaaatgtctggctggaccgaggaaccagggcaacttttattgacttctcagtgtacaacgccaacattaacctgttctgtgtggtcaggttattggttgaattcccagcaacaggtggtgtgattccatcttggcaatttcagcctttaaagctgatccgatatgtcacaacttttgatttcttcctggcagcctgtgagattatcttttgtttctttatcttttactatgtggtggaagagatattggaaattcgcattcacaaactacactatttcaggagtttctggaattgtctggatgttgtgatcgttgtgctgtcagtggtagctataggaattaacatatacagaacatcaaatgtggaggtgctactacagtttctggaagatcaaaatactttccccaactttgagcatctggcatattggcagatacagttcaacaatatagctgctgtcacagtattttttgtctggattaagctcttcaaattcatcaattttaacaggaccatgagccagctctcgacaaccatgtctcgatgtgccaaagacctgtttggctttgctattatgttcttcattattttcctagcgtatgctcagttggcataccttgtctttggcactcaggtcgatgacttcagtactttccaagagtgtatcttcactcaattccgtatcattttgggcgatatcaactttgcagagattgaggaagctaatcgagttttgggaccaatttatttcactacatttgtgttctttatgttcttcattcttttgaatatgtttttggctatcatcaatgatacttactctgaagtgaaatctgacttggcacagcagaaagctgaaatggaactctcagatcttatcagaaagggctaccataaagctttggtcaaactaaaactgaaaaaaaataccgtggatgacatttcagagagtctgcggcaaggaggaggcaagttaaactttgacgaacttcgacaagatctcaaagggaagggccatactgatgcagagattgaggcaatattcacaaagtacgaccaagatggagaccaagaactgaccgaacatgaacatcagcagatgagagacgacttggagaaagagagggaggacctggatttggatcacagttctttaccacgtcccatgagcagccgaagtttccctcgaagcctggatgactctgaggaggatgacgatgaagatagcggacatagctccagaaggaggggaagcatttctagtggcgtttcttacgaagagtttcaagtcctggtgagacgagtggaccggatggagcattccatcggcagcatagtgtccaagattgacgccgtgatcgtgaagctagagattatggagcgagccaaactgaagaggagggaggtgctgggaaggctgttggatggggtggccgaggatgaaaggctgggtcgtgacagtgaaatccatagggaacagatggaacggctagtacgtgaagagttggaacgctgggaatccgatgatgcagcttcccagatcagtcatggtttaggcacgccagtgggactaaatggtcaacctcgccccagaagctcccgcccatcttcctcccaatctacagaaggcatggaaggtgcaggtggaaatgggagttctaatgtccacgtatgatatgtgtgtttcagtatgtgtgtttctaataagtgaggaagtggctgtcctgaattgctgtaacaagcacactatttatatgccctgaccaccataggatgctagtctttgtgaccgattgctaatcttctgcactttaatttattttatataaactttacccatggttcaaagatttttttttctttttctcatataagaaatctaggtgtaaatattgagtacagaaaaaaaatcttcatgatgtgtattgagcggtacgcccagttgccaccatgactgagtcttctcagttgacaatgaagtagccttttaaagctagaaaactgtcaaagggcttctgagtttcatttccagtcacaaaaatcagtattgttatttttttccaagagtgtgaaggaaaatggggcattcctttccactctggcatagttcatgagcttaatacatagctttcttttaagaaaggagccttttttttcaactagcttcctggggtaaacttttctaaaagataaaatggaaaggaactccaaactatgatagaatctgtgtgaatggttaagatgaatgttaaatactatgcttttttgtaagttgatcgtatctgatgtctgtgggactaactgtatcacttaatttttaccttattttggctctaatttgaataagctgagtaaaaccaccaaagatcagttataggataaaatggcatctctaaccataacacaggagaattggaaggagccctaagttgtcactcagtttaatttcttttaatggttagtttagcctaaagatttatctgcatattctttttcccatgtggctctactcatttgcaactgaatttaatgttataactcatctagtgagaccaacttactaaatttttagtatgcactgaaagtttttatccaacaattatgttcattttaagcaaaattttaagaaagttttgaaattcataaagcatttggttttaaactattttaagaatatagtactcggtcaggtatgacggctcacgcctgtaatcccagcactttgggaggccgaaacaggcgaatcacttgagcccaggagttcaagaccaacatgggcaatgtggcgaaactccatctctacaaaaaatgcaaaaataaaaaatatagtactcaagtattcttgatcctgtgtttcaaaactagaatttgtaatgcaaatggagctcagtctaataaaaaagaggttttggtattaaaagttcatacattagacagtatcagccaaaatttgagttagcaacactgttttctttacgagagggtctcacccaaatttatggggagaaatctatttctcaaaaaaaaaaatcttcttttacagaaatgttgagtaaggtgacattttgagcgctaataagcaaaagagcatgcagtgctgttgaataaccctcacttggagaaccaagagaatcctgtcgtttaatgctatattttaatttcacaagttgttcatttaactggtagaatgtcagtccaatctccaatgagaacatgagcaaatagacctttccaggttgaaagtgaaacatactgggtttctgtaagtttttcctcatggcttcatctctatctttactttctcttgaatatgctacacaaagttctttattactacatactaaagtttgcattccagggatattgactgtacatatttatgtatatgtaccatgttgttacatgtaaacaaacttcaatttgaagtgcagctattatgtggtatccatgtgtatcgaccatgtgccatatatcaattatggtcactagaaagtctctttatgatactttttattgtactgtttttcatttcacttgcaaaattttgcagaattcctcctttctacccataaattacatatatttttcttctttagtcatggagaactccccccctcatctcttccctattatctttccctgtgtactggtattattaaaaagacattacatacgcaagtctttctcgacaatcaagaatgttattaatgtgtaatactgagcactttacttcttaataacattccctattatctttccctgtgtactggtatttatttaaaaagacattacatacgcaagtctttctcgacaatcaagaatgttattaatgtgtaatactgagcactttacttcttaataaaacttgatatagttaagtgctcagtacacacatta

SEQ ID NO: 417727 - DNA, 3143 bp, Homo sapiens
ggctcctgaggcgcacagcgccgagcgcggcgccgcgcacccgcgcgccggacgccagtgaccgcgatggtgaactccagtcgcgtgcagcctcagcagcccggggacgccaagcggccgcccgcgccccgcgcgccggacccgggccggctgatggctggctgcgcggccgtgggcgccagcctcgccgccccgggcggcctctgcgagcagcggggcctggagatcgagatgcagcgcatccggcaggcggccgcgcgggaccccccggccggagccgcggcctccccttctcctccgctctcgtcgtgctcccggcaggcgtggagccgcgataaccccggcttcgaggccgaggaggaggaggaggaggtggaaggggaagaaggcggaatggtggtggagatggacgtagagtggcgcccgggcagccggaggtcggccgcctcctcggccgtgagctccgtgggcgcgcggagccgggggcttgggggctaccacggcgcgggccacccgagcgggaggcggcgccggcgagaggaccagggcccgccgtgccccagcccagtcggcggcggggacccgctgcatcgccacctccccctggaagggcagccgccccgagtggcctgggcggagaggctggttcgcgggctgcgaggtctctggggaacaagactcatggaggaaagcagcactaaccgagagaaataccttaaaagtgttttacgggaactggtcacatacctcctttttctcatagtcttgtgcatcttgacctacggcatgatgagctccaatgtgtactactacacccggatgatgtcacagctcttcctagacacccccgtgtccaaaacggagaaaactaactttaaaactctgtcttccatggaagacttctggaagttcacagaaggctccttattggatgggctgtactggaagatgcagcccagcaaccagactgaagctgacaaccgaagtttcatcttctatgagaacctgctgttaggggttccacgaatacggcaactccgagtcagaaatggatcctgctctatcccccaggacttgagagatgaaattaaagagtgctatgatgtctactctgtcagtagtgaagatagggctccctttgggccccgaaatggaaccgcttggatctacacaagtgaaaaagacttgaatggtagtagccactggggaatcattgcaacttatagtggagctggctattatctggatttgtcaagaacaagagaggaaacagctgcacaagttgctagcctcaagaaaaatgtctggctggaccgaggaaccagggcaacttttattgacttctcagtgtacaacgccaacattaacctgttctgtgtggtcaggttattggttgaattcccagcaacaggtggtgtgattccatcttggcaatttcagcctttaaagctgatccgatatgtcacaacttttgatttcttcctggcagcctgtgagattatcttttgtttctttatcttttactatgtggtggaagagatattggaaattcgcattcacaaactacactatttcaggagtttctggaattgtctggatgttgtgatcgttgtgctgtcagtggtagctataggaattaacatatacagaacatcaaatgtggaggtgctactacagtttctggaagatcaaaatactttccccaactttgagcatctggcatattggcagatacagttcaacaatatagctgctgtcacagtattttttgtctggattaagctcttcaaattcatcaattttaacaggaccatgagccagctctcgacaaccatgtctcgatgtgccaaagacctgtttggctttgctattatgttcttcattattttcctagcgtatgctcagttggcataccttgtctttggcactcaggtcgatgacttcagtactttccaagagtgtatcttcactcaattccgtatcattttgggcgatatcaactttgcagagattgaggaagctaatcgagttttgggaccaatttatttcactacatttgtgttctttatgttcttcattcttttgaatatgtttttggctatcatcaatgatacttactctgaagtgaaatctgacttggcacagcagaaagctgaaatggaactctcagatcttatcagaaagggctaccataaagctttggtcaaactaaaactgaaaaaaaataccgtggatgacatttcagagagtctgcggcaaggaggaggcaagttaaactttgacgaacttcgacaagatctcaaagggaagggccatactgatgcagagattgaggcaatattcacaaagtacgaccaagatggagaccaagaactgaccgaacatgaacatcagcagatgagagacgacttggagaaagagagggaggacctggatttggatcacagttctttaccacgtcccatgagcagccgaagtttccctcgaagcctggatgactctgaggaggatgacgatgaagatagcggacatagctccagaaggaggggaagcatttctagtggcgtttcttacgaagagtttcaagtcctggtgagacgagtggaccggatggagcattccatcggcagcatagtgtccaagattgacgccgtgatcgtgaagctagagattatggagcgagccaaactgaagaggagggaggtgctgggaaggctgttggatggggtggccgaggatgaaaggctgggtcgtgacagtgaaatccatagggaacagatggaacggctagtacgtgaagagttggaacgctgggaatccgatgatgcagcttcccagatcagtcatggtttaggcacgccagtgggactaaatggtcaacctcgccccagaagctcccgcccatcttcctcccaatctacagaaggcatggaaggtgcaggtggaaatgggagttctaatgtccacgtatgatatgtgtgtttcagtatgtgtgtttctaataagtgaggaagtggctgtcctgaattgctgtaacaagcacactatttatatgccctgaccaccataggatgctagtctttgtgaccgattgctaatcttctgcactttaatttattttatataaactttacccatggttc

SEQ ID NO: 417728 - DNA, 1694 bp, Homo sapiens
ggctcctgaggcgcacagcgccgagcgcggcgccgcgcacccgcgcgccggacgccagtgaccgcgatggtgaactccagtcgcgtgcagcctcagcagcccggggacgccaagcggccgcccgcgccccgcgcgccggacccgggccggctgatggctggctgcgcggccgtgggcgccagcctcgccgccccgggcggcctctgcgagcagcggggcctggagatcgagatgcagcgcatccggcaggcggccgcgcgggaccccccggccggagccgcggcctccccttctcctccgctctcgtcgtgctcccggcaggcgtggagccgcgataaccccggcttcgaggccgaggaggaggaggaggaggtggaaggggaagaaggcggaatggtggtggagatggacgtagagtggcgcccgggcagccggaggtcggccgcctcctcggccgtgagctccgtgggcgcgcggagccgggggcttgggggctaccacggcgcgggccacccgagcgggaggcggcgccggcgagaggaccagggcccgccgtgccccagcccagtcggcggcggggacccgctgcatcgccacctccccctggaagggcagccgccccgagtggcctgggcggagaggctggttcgcgggctgcgaggtctctggggaacaagactcatggaggaaagcagcactaaccgagagaaataccttaaaagtgttttacgggaactggtcacatacctcctttttctcatagtcttgtgcatcttgacctacggcatgatgagctccaatgtgtactactacacccggatgatgtcacagctcttcctagacacccccgtgtccaaaacggagaaaactaactttaaaactctgtcttccatggaagacttctggaagttcacagaaggctccttattggatgggctgtactggaagatgcagcccagcaaccagactgaagctgacaaccgaagtttcatcttctatgagaacctgctgttaggggttccacgaatacggcaactccgagtcagaaatggatcctgctctatcccccaggacttgagagatgaaattaaagagtgctatgatgtctactctgtcagtagtgaagatagggctccctttgggccccgaaatggaaccgcttggatctacacaagtgaaaaagacttgaatggtagtagccactggggaatcattgcaacttatagtggagctggctattatctggatttgtcaagaacaagagaggaaacagctgcacaagttgctagcctcaagaaaaatgtctggctggaccgaggaaccagggcaacttttattgacttctcagtgtacaacgccaacattaacctgttctgtgtggtcagacaaacgtgcagatatctgatagcccttttcgttgcactcaagaggaagcaagatcattagttgaatcggtatcatcttcaccaaataaagaaagtaatgaagaagagcaagtgtggcacttccttggcaagtgattgaaacatctgaaattctgctgtcaagattcccatctctaaggactccaagactctttttccccaagtgctagagacaagggggtctatgagcatttactgacttcctgttaaaacttcattttttcaaactttttgagctatgcaatatataaataaacagtaagaatttta

SEQ ID NO: 417729 - DNA, 459 bp, Homo sapiens
aaatttttttggcccaagcacattctcccttccccttgttccctaaacccgcgattaaaatgtaccaattacatatatttttcttctttagtcatggagaactccccccctcatctcttccctattatctttccctgtgtactggtattattaaaaagacattacatacgcaagtctttctcgacaatcaagaatgttattaatgtgtaatactgagcactttacttcttaataaaaacttgatatagtagcaaaaaaaaaaacaaggggggggtcaaatttcctcgggcccactagcctcccgttttgccaggcccaaggagtctttaacaagcgccccttaaggtcgacggaaggcttgtctcggaccctcggctcatggacaccacaataagcggaaaaagtttgacacctggcttggttaaacgaaaacggaagaacaagacaacacaccaataa

SEQ ID NO: 417730 - DNA, 3910 bp, Homo sapiens
aattgtagatagcataaaacctactgttttaaccatgcttaagtgtacaattcagtggcattaagtacattcacagtgttgtgcagccatcgccattatgctgcattattttcagaactttttcattattctaaactgaaactttgtatccattgaacactaactcccaattcccccagtccctggtaacctccattctactttctgtcactgtgagtttgactattctaagtacctaatttaagtggaatcatacagtatttgtccttttgtgtcaggcttatttcactttgcatgatgttttcaaggttcatccatgttgtaacctgtcagaatttaatttcttttcaggatgaaataatgttttattatatacagtcacaccattttgtttatccattcatctattgatgtcttctctctcttacagctcttcaaattcatcaattttaacaggaccatgagccagctctcgacaaccatgtctcgatgtgccaaagacctgtttggctttgctattatgttcttcattattttcctagcgtatgctcagttggcataccttgtctttggcactcaggtcgatgacttcagtactttccaagagtgtatcttcactcaattccgtatcattttgggcgatatcaactttgcagagattgaggaagctaatcgagttttgggaccaatttatttcactacatttgtgttctttatgttcttcattcttttgaatatgtttttggctatcatcaatgatacttactctgaagtgaaatctgacttggcacagcagaaagctgaaatggaactctcagatcttatcagaaagggctaccataaagctttggtcaaactaaaactgaaaaaaaataccgtggatgacatttcagagagtctgcggcaaggaggaggcaagttaaactttgacgaacttcgacaagatctcaaagggaagggccatactgatgcagagattgaggcaatattcacaaagtacgaccaagatggagaccaagaactgaccgaacatgaacatcagcagatgagagacgacttggagaaagagagggaggacctggatttggatcacagttctttaccacgtcccatgagcagccgaagtttccctcgaagcctggatgactctgaggaggatgacgatgaagatagcggacatagctccagaaggaggggaagcatttctagtggcgtttcttacgaagagtttcaagtcctggtgagacgagtggaccggatggagcattccatcggcagcatagtgtccaagattgacgccgtgatcgtgaagctagagattatggagcgagccaaactgaagaggagggaggtgctgggaaggctgttggatggggtggccgaggatgaaaggctgggtcgtgacagtgaaatccatagggaacagatggaacggctagtacgtgaagagttggaacgctgggaatccgatgatgcagcttcccagatcagtcatggtttaggcacgccagtgggactaaatggtcaacctcgccccagaagctcccgcccatcttcctcccaatctacagaaggcatggaaggtgcaggtggaaatgggagttctaatgtccacgtatgatatgtgtgtttcagtatgtgtgtttctaataagtgaggaagtggctgtcctgaattgctgtaacaagcacactatttatatgccctgaccaccataggatgctagtctttgtgaccgattgctaatcttctgcactttaatttattttatataaactttacccatggttcaaagatttttttttctttttctcatataagaaatctaggtgtaaatattgagtacagaaaaaaaatcttcatgatgtgtattgagcggtacgcccagttgccaccatgactgagtcttctcagttgacaatgaagtagccttttaaagctagaaaactgtcaaagggcttctgagtttcatttccagtcacaaaaatcagtattgttatttttttccaagagtgtgaaggaaaatggggcattcctttccactctggcatagttcatgagcttaatacatagctttcttttaagaaaggagccttttttttcaactagcttcctggggtaaacttttctaaaagataaaatggaaaggaactccaaactatgatagaatctgtgtgaatggttaagatgaatgttaaatactatgcttttttgtaagttgatcgtatctgatgtctgtgggactaactgtatcacttaatttttaccttattttggctctaatttgaataagctgagtaaaaccaccaaagatcagttataggataaaatggcatctctaaccataacacaggagaattggaaggagccctaagttgtcactcagtttaatttcttttaatggttagtttagcctaaagatttatctgcatattctttttcccatgtggctctactcatttgcaactgaatttaatgttataactcatctagtgagaccaacttactaaatttttagtatgcactgaaagtttttatccaacaattatgttcattttaagcaaaattttaagaaagttttgaaattcataaagcatttggttttaaactattttaagaatatagtactcggtcaggtatgacggctcacgcctgtaatcccagcactttgggaggccgaaacaggcgaatcacttgagcccaggagttcaagaccaacatgggcaatgtggcgaaactccatctctacaaaaaatgcaaaaataaaaaatatagtactcaagtattcttgatcctgtgtttcaaaactagaatttgtaatgcaaatggagctcagtctaataaaaaagaggttttggtattaaaagttcatacattagacagtatcagccaaaatttgagttagcaacactgttttctttacgagagggtctcacccaaatttatggggagaaatctatttctcaaaaaaaaaaatcttcttttacagaaatgttgagtaaggtgacattttgagcgctaataagcaaaagagcatgcagtgctgttgaataaccctcacttggagaaccaagagaatcctgtcgtttaatgctatattttaatttcacaagttgttcatttaactggtagaatgtcagtccaatctccaatgagaacatgagcaaatagacctttccaggttgaaagtgaaacatactgggtttctgtaagtttttcctcatggcttcatctctatctttactttctcttgaatatgctacacaaagttctttattactacatactaaagtttgcattccagggatattgactgtacatatttatgtatatgtaccatgttgttacatgtaaacaaacttcaatttgaagtgcagctattatgtggtatccatgtgtatcgaccatgtgccatatatcaattatggtcactagaaagtctctttatgatactttttattgtactgtttttcatttcacttgcaaaattttgcagaattcctcctttctacccataaattacatatatttttcttctttagtcatggagaactccccccctcatctcttccctattatctttccctgtgtactggtattattaaaaagacattacatacgcaagtctttctcgacaatcaagaatgttattaatgtgtaatactgagcactttacttcttaataaaaacttgatatagtagcaaaaaaaaaaacaaggggggggtcaaatttcctcgggcccactagcctcccgttttgccaggcccaaggagtctttaacaagcgccccttaaggtcgacggaaggcttgtctcggaccctcggctcatggacaccacaataagcggaaaaagtttgacacctggcttggttaaacgaaaacggaagaacaagacaacacaccaataa

SEQ ID NO: 417731 - DNA, 2157 bp, Homo sapiens
ggctcctgaggcgcacagcgccgagcgcggcgccgcgcacccgcgcgccggacgccagtgaccgcgatggtgaactccagtcgcgtgcagcctcagcagcccggggacgccaagcggccgcccgcgccccgcgcgccggacccgggccggctgatggctggctgcgcggccgtgggcgccagcctcgccgccccgggcggcctctgcgagcagcggggcctggagatcgagatgcagcgcatccggcaggcggccgcgcgggaccccccggccggagccgcggcctccccttctcctccgctctcgtcgtgctcccggcaggcgtggagccgcgataaccccggcttcgaggccgaggaggaggaggaggaggtggaaggggaagaaggcggaatggtggtggagatggacgtagagtggcgcccgggcagccggaggtcggccgcctcctcggccgtgagctccgtgggcgcgcggagccgggggcttgggggctaccacggcgcgggccacccgagcgggaggcggcgccggcgagaggaccagggcccgccgtgccccagcccagtcggcggcggggacccgctgcatcgccacctccccctggaagggcagccgccccgagtggcctgggcggagaggctggttcgcgggctgcgaggtctctggggaacaagactcatggaggaaagcagcactaaccgagagaaataccttaaaagtgttttacgggaactggtcacatacctcctttttctcatagtcttgtgcatcttgacctacggcatgatgagctccaatgtgtactactacacccggatgatgtcacagctcttcctagacacccccgtgtccaaaacggagaaaactaactttaaaactctgtcttccatggaagacttctggaagttcacagaaggctccttattggatgggctgtactggaagatgcagcccagcaaccagactgaagctgacaaccgaagtttcatcttctatgagaacctgctgttaggggttccacgaatacggcaactccgagtcagaaatggatcctgctctatcccccaggacttgagagatgaaattaaagagtgctatgatgtctactctgtcagtagtgaagatagggctccctttgggccccgaaatggaaccgcttggatctacacaagtgaaaaagacttgaatggtagtagccactggggaatcattgcaacttatagtggagctggctattatctggatttgtcaagaacaagagaggaaacagctgcacaagttgctagcctcaagaaaaatgtctggctggaccgaggaaccagggcaacttttattgacttctcagtgtacaacgccaacattaacctgttctgtgtggtcaggttattggttgaattcccagcaacaggtggtgtgattccatcttggcaatttcagcctttaaagctgatccgatatgtcacaacttttgatttcttcctggcagcctgtgagattatcttttgtttctttatcttttactatgtggtggaagagatattggaaattcgcattcacaaactacactatttcaggagtttctggaattgtctggatgttgtgatcgttgtgctgtcagtggtagctataggaattaacatatacagaacatcaaatgtggaggtgctactacagtttctggaagatcaaaatactttccccaactttgagcatctggcatattggcagatacagttcaacaatatagctgctgtcacagtattttttgtctggattaaggtaatttataaatttcatgttctacattttaaataatattttctttaaaaaaaatgagttccacaaaatcatggaatacttgaatttgaaattcaagtgaccagccaaagctgctcaatatttactttgagacagggtctcactctgtcacccaggctggagtgcagtggtatgattacagctcattgcagcctcgacttcccaggcccaagcgatcctcccaccttatcctccgaagtcactgggagtgcctatgatcccagctacttgggaatctgaggcaggagaattgcttgaacccaggaagcagaggttgcggtgagctgaatcatgccactgcactccagcctgggcaacagagcagcacttcgtctc

SEQ ID NO: 417732 - DNA, 2443 bp, Homo sapiens
agcgggagggccggccggtttggcggcggctgcggagggtatctgaggctcggctgccaagccgaacgggctctggctcctcccagtggccggccggggcggaagcaggaggcgggggcagcgtgcgcgctgctggtcttctctcccgcggcgctggggcccgcgctccgctgctgttgctccattcggcgcttttctggcggctggctcctctccgctgccggctgctcctcgaccaggcctccttctcaacctcagcccgcggcgccgacccttccggcaccctcccgccccgtctcgtactgtcgccgtcaccgccgcggctccggccctggccccgatggctctgtgcaacggagactccaagctggagaatgctggaggagaccttaaggatggccaccaccactatgaaggagctgttgtcattctggatgctggtgctcagtacgggaaagtcatagaccgaagagtgagggaactgttcgtgcagtctgaaattttccccttggaaacaccagcatttgctataaaggaacaaggattccgtgctattatcatctctggaggacctaattctgtgtatgctgaagatgctccctggtttgatccagcaatattcactattggcaagcctgttcttggaatttgctatggtatgcagatgatgaataaggtatttggaggtactgtgcacaaaaaaagtgtcagagaagatggagttttcaacattagtgtggataatacatgttcattattcaggggccttcagaaggaagaagttgttttgcttacacatggagatagtgtagacaaagtagctgatggattcaaggttgtggcacgttctggaaacatagtagcaggcatagcaaatgaatctaaaaagttatatggagcacagttccaccctgaagttggccttacagaaaatggaaaagtaatactgaagaatttcctttatgatatagctggatgcagtggaaccttcaccgtgcagaacagagaacttgagtgtattcgagagatcaaagagagagtaggcacgtcaaaagttttggttttactcagtggtggagtagactcaacagtttgtacagctttgctaaatcgtgctttgaaccaagaacaagtcattgctgtgcacattgataatggctttatgagaaaacgagaaagccagtctgttgaagaggccctcaaaaagcttggaattcaggtcaaagtgataaatgctgctcattctttctacaatggaacaacaaccctaccaatatcagatgaagatagaaccccacggaaaagaattagcaaaacgttaaatatgaccacaagtcctgaagagaaaagaaaaatcattggggatacttttgttaagattgccaatgaagtaattggagaaatgaacttgaaaccagaggaggttttccttgcccaaggtactttacggcctgatctaattgaaagtgcatcccttgttgcaagtggcaaagctgaactcatcaaaacccatcacaatgacacagagctcatcagaaagttgagagaggagggaaaagtaatagaacctctgaaagattttcataaagatgaagtgagaattttgggcagagaacttggacttccagaagagttagtttccaggcatccatttccaggtcctggcctggcaatcagagtaatatgtgctgaagaaccttatatttgtaaggactttcctgaaaccaacaatattttgaaaatagtagctgatttttctgcaagtgttaaaaagccacataccctattacagagagtcaaagcctgcacaacagaagaggatcaggagaagctgatgcaaattaccagtctgcattcactgaatgccttcttgctgccaattaaaactgtaggtgtgcagggtgactgtcgttcctacagttacgtgtgtggaatctccagtaaagatgaacctgactgggaatcacttatttttctggctaggcttatacctcgcatgtgtcacaacgttaacagagttgtttatatatttggcccaccagttaaagaacctcctacagatgttactcccactttcttgacaacaggggtgctcagtactttacgccaagctgattttgaggcccataacattctcagggagtctgggtatgctgggaaaatcagccagatgccggtgattttgacaccattacattttgatcgggacccacttcaaaagcagccttcatgccagagatctgtggttattcgaacctttattactagtgacttcatgactggtatacctgcaacacctggcaatgagatccctgtagaggtggtattaaagatggtcactgagattaagaagattcctggtatttctcgaattatgtatgacttaacatcaaagcccccaggaactactgagtgggagtaataaacttcttgttctattaaa

SEQ ID NO: 417733 - DNA, 3094 bp, Homo sapiens
agcgggagggccggccggtttggcggcggctgcggagggtatctgaggctcggctgccaagccgaacgggctctggctcctcccagtggccggccggggcggaagcaggaggcgggggcagcgtgcgcgctgctggtcttctctcccgcggcgctggggcccgcgctccgctgctgttgctccattcggcgcttttctggcggctggctcctctccgctgccggctgctcctcgaccaggcctccttctcaacctcagcccgcggcgccgacccttccggcaccctcccgccccgtctcgtactgtcgccgtcaccgccgcggctccggccctggccccgatggctctgtgcaacggagactccaagctggagaatgctggaggagaccttaaggatggccaccaccactatgaaggagctgttgtcattctggatgctggtgctcagtacgggaaagtcatagaccgaagagtgagggaactgttcgtgcagtctgaaattttccccttggaaacaccagcatttgctataaaggaacaaggattccgtgctattatcatctctggaggacctaattctgtgtatgctgaagatgctccctggtttgatccagcaatattcactattggcaagcctgttcttggaatttgctatggtatgcagatgatgaataaggtatttggaggtactgtgcacaaaaaaagtgtcagagaagatggagttttcaacattagtgtggataatacatgttcattattcaggggccttcagaaggaagaagttgttttgcttacacatggagatagtgtagacaaagtagctgatggattcaaggttgtggcacgttctggaaacatagtagcaggcatagcaaatgaatctaaaaagttatatggagcacagttccaccctgaagttggccttacagaaaatggaaaagtaatactgaagaatttcctttatgatatagctggatgcagtggaaccttcaccgtgcagaacagagaacttgagtgtattcgagagatcaaagagagagtaggcacgtcaaaagttttggttttactcagtggtggagtagactcaacagtttgtacagctttgctaaatcgtgctttgaaccaagaacaagtcattgctgtgcacattgataatggctttatgagaaaacgagaaagccagtctgttgaagaggccctcaaaaagcttggaattcaggtcaaagtgataaatgctgctcattctttctacaatggaacaacaaccctaccaatatcagatgaagatagaaccccacggaaaagaattagcaaaacgttaaatatgaccacaagtcctgaagagaaaagaaaaatcattggggatacttttgttaagattgccaatgaagtaattggagaaatgaacttgaaaccagaggaggttttccttgcccaaggtactttacggcctgatctaattgaaagtgcatcccttgttgcaagtggcaaagctgaactcatcaaaacccatcacaatgacacagagctcatcagaaagttgagagaggagggaaaagtaatagaacctctgaaagattttcataaagatgaagtgagaattttgggcagagaacttggacttccagaagagttagtttccaggcatccatttccaggtcctggcctggcaatcagagtaatatgtgctgaagaaccttatatttgtaaggactttcctgaaaccaacaatattttgaaaatagtagctgatttttctgcaagtgttaaaaagccacataccctattacagagagtcaaagcctgcacaacagaagaggatcaggagaagctgatgcaaattaccagtctgcattcactgaatgccttcttgctgccaattaaaactgtaggtgtgcagggtgactgtcgttcctacagttacgtgtgtggaatctccagtaaagatgaacctgactgggaatcacttatttttctggctaggcttatacctcgcatgtgtcacaacgttaacagagttgtttatatatttggcccaccagttaaagaacctcctacagatgttactcccactttcttgacaacaggggtgctcagtactttacgccaagctgattttgaggcccataacattctcagggagtctgggtatgctgggaaaatcagccagatgccggtgattttgacaccattacattttgatcgggacccacttcaaaagcagccttcatgccagagatctgtggttattcgaacctttattactagtgacttcatgactggtatacctgcaacacctggcaatgagatccctgtagaggtggtattaaagatggtcactgagattaagaagattcctggtatttctcgaattatgtatgacttaacatcaaagcccccaggaactactgagtgggagtaataaacttcttgttctattaaagtaccgtgtgcagtttaaattgattagaaatcattcccattattgacatgcagtactgtgaaaagagttactggagcagctacatcacatctgagttctccacagcaaaaatctacggcttaagagctgagttggggataaccaaaagggactgaagagtttgtacgggtaaataatcaaagcaccattgcctacactcagacagattgatactgcttttgcctttgcctcacttattctttatgtataaattcactgttgatgtctctgtgaatatgtatgaaggtgggtgaatttgggggtaattatgggcttctgtctccttaccagtttctaagaactgttagaaacgcccattatttaccagtgttacttactacttatatatactttttggagaatcagttttcttataagtaatcttatttctccaaagggtgaaaaagagatgaacatatcagataaaggtataggtgggctattccagccacttttgaaggacactgagggtataaaatgtaagctaccataagatggaaaagcaccaggaatttgttgatgtacttttgaattttatttcacagccttgggaggaagaaactatgagtggtctcagatgtctatgaatggtcttaaaatgttttcaaacca

SEQ ID NO: 417734 - DNA, 2598 bp, Homo sapiens
agcgggagggccggccggtttggcggcggctgcggagggtatctgaggctcggctgccaagccgaacgggctctggctcctcccagtggccggccggggcggaagcaggaggcgggggcagcgtgcgcgctgctggtcttctctcccgcggcgctggggcccgcgctccgctgctgttgctccattcggcgcttttctggcggctggctcctctccgctgccggctgctcctcgaccaggcctccttctcaacctcagcccgcggcgccgacccttccggcaccctcccgccccgtctcgtactgtcgccgtcaccgccgcggctccggccctggccccgatggctctgtgcaacggagactccaagctggagaatgctggaggagaccttaaggatggccaccaccactatgaaggagctgttgtcattctggatgctggtgctcagtacgggaaagtcatagaccgaagagtgagggaactgttcgtgcagtctgaaattttccccttggaaacaccagcatttgctataaaggaacaaggattccgtgctattatcatctctggaggacctaattctgtgtatgctgaagatgctccctggtttgatccagcaatattcactattggcaagcctgttcttggaatttgctatggtatgcagatgatgaataaggtatttggaggtactgtgcacaaaaaaagtgtcagagaagatggagttttcaacattagtgtggataatacatgttcattattcaggggccttcagaaggaagaagttgttttgcttacacatggagatagtgtagacaaagtagctgatggattcaaggttgtggcacgttctggaaacatagtagcaggcatagcaaatgaatctaaaaagttatatggagcacagttccaccctgaagttggccttacagaaaatggaaaagtaatactgaagaatttcctttatgatatagctggatgcagtggaaccttcaccgtgcagaacagagaacttgagtgtattcgagagatcaaagagagagtaggcacgtcaaaagttttggttttactcagtggtggagtagactcaacagtttgtacagctttgctaaatcgtgctttgaaccaagaacaagtcattgctgtgcacattgataatggctttatgagaaaacgagaaagccagtctgttgaagaggccctcaaaaagcttggaattcaggtcaaagtgataaatgctgctcattctttctacaatggaacaacaaccctaccaatatcagatgaagatagaaccccacggaaaagaattagcaaaacgttaaatatgaccacaagtcctgaagagaaaagaaaaatcattggggatacttttgttaagattgccaatgaagtaattggagaaatgaacttgaaaccagaggaggttttccttgcccaaggtactttacggcctgatctaattgaaagtgcatcccttgttgcaagtggcaaagctgaactcatcaaaacccatcacaatgacacagagctcatcagaaagttgagagaggagggaaaagtaatagaacctctgaaagattttcataaagatgaagtgagaattttgggcagagaacttggacttccagaagagttagtttccaggcatccatttccaggtcctggcctggcaatcagagtaatatgtgctgaagaaccttatatttgtaaggactttcctgaaaccaacaatattttgaaaatagtagctgatttttctgcaagtgttaaaaagccacataccctattacagagagtcaaagcctgcacaacagaagaggatcaggagaagctgatgcaaattaccagtctgcattcactgaatgccttcttgctgccaattaaaactgtaggtgtgcagggtgactgtcgttcctacagttacgtgtgtggaatctccagtaaagatgaacctgactgggaatcacttatttttctggctaggcttatacctcgcatgtgtcacaacgttaacagagttgtttatatatttggcccaccagttaaagaacctcctacagatgttactcccactttcttgacaacaggggtgctcagtactttacgccaagctgattttgaggcccataacattctcagggagtctgggtatgctgggaaaatcagccagatgccggtgattttgacaccattacattttgatcgggacccacttcaaaagcagccttcatgccagagatctgtggttattcgaacctttattactagtgacttcatgactggtatacctgcaacacctggcaatgagatccctgtagaggtggtattaaagatggtcactgagattaagaagattcctggtatttctcgaattatgtatgacttaacatcaaagcccccaggaactactgagtgggagtaataaacttcttgttctattaaaaaaaaaataatctttatttttctttctttcactttttttattatctctttaatttcatcttatattgtttgcatattcatctcttcgccttgcttctacctatctcttactttttttcttactgcttctgttctttcccatatttactccttctt

SEQ ID NO: 417735 - DNA, 3144 bp, Homo sapiens
agcgggagggccggccggtttggcggcggctgcggagggtatctgaggctcggctgccaagccgaacgggctctggctcctcccagtggccggccggggcggaagcaggaggcgggggcagcgtgcgcgctgctggtcttctctcccgcggcgctggggcccgcgctccgctgctgttgctccattcggcgcttttctggcggctggctcctctccgctgccggctgctcctcgaccaggcctccttctcaacctcagcccgcggcgccgacccttccggcaccctcccgccccgtctcgtactgtcgccgtcaccgccgcggctccggccctggccccgatggctctgtgcaacggagactccaagctggagaatgctggaggagaccttaaggatggccaccaccactatgaaggagctgttgtcattctggatgctggtgctcagtacgggaaagtcatagaccgaagagtgagggaactgttcgtgcagtctgaaattttccccttggaaacaccagcatttgctataaaggaacaaggattccgtgctattatcatctctggaggacctaattctgtgtatgctgaagatgctccctggtttgatccagcaatattcactattggcaagcctgttcttggaatttgctatggtatgcagatgatgaataaggtatttggaggtactgtgcacaaaaaaagtgtcagagaagatggagttttcaacattagtgtggataatacatgttcattattcaggggccttcagaaggaagaagttgttttgcttacacatggagatagtgtagacaaagtagctgatggattcaaggttgtggcacgttctggaaacatagtagcaggcatagcaaatgaatctaaaaagttatatggagcacagttccaccctgaagttggccttacagaaaatggaaaagtaatactgaagaatttcctttatgatatagctggatgcagtggaaccttcaccgtgcagaacagagaacttgagtgtattcgagagatcaaagagagagtaggcacgtcaaaagttttggttttactcagtggtggagtagactcaacagtttgtacagctttgctaaatcgtgctttgaaccaagaacaagtcattgctgtgcacattgataatggctttatgagaaaacgagaaagccagtctgttgaagaggccctcaaaaagcttggaattcaggtcaaagtgataaatgctgctcattctttctacaatggaacaacaaccctaccaatatcagatgaagatagaaccccacggaaaagaattagcaaaacgttaaatatgaccacaagtcctgaagagaaaagaaaaatcattggggatacttttgttaagattgccaatgaagtaattggagaaatgaacttgaaaccagaggaggttttccttgcccaaggtactttacggcctgatctaattgaaagtgcatcccttgttgcaagtggcaaagctgaactcatcaaaacccatcacaatgacacagagctcatcagaaagttgagagaggagggaaaagtaatagaacctctgaaagattttcataaagatgaagtgagaattttgggcagagaacttggacttccagaagagttagtttccaggcatccatttccaggtcctggcctggcaatcagagtaatatgtgctgaagaaccttatatttgtaaggactttcctgaaaccaacaatattttgaaaatagtagctgatttttctgcaagtgttaaaaagccacataccctattacagagagtcaaagcctgcacaacagaagaggatcaggagaagctgatgcaaattaccagtctgcattcactgaatgccttcttgctgccaattaaaactgtaggtgtgcagggtgactgtcgttcctacagttacgtgtgtggaatctccagtaaagatgaacctgactgggaatcacttatttttctggctaggcttatacctcgcatgtgtcacaacgttaacagagttgtttatatatttggcccaccagttaaagaacctcctacagatgttactcccactttcttgacaacaggggtgctcagtactttacgccaagctgattttgaggcccataacattctcagggagtctgggtatgctgggaaaatcagccagatgccggtgattttgacaccattacattttgatcgggacccacttcaaaagcagccttcatgccagagatctgtggttattcgaacctttattactagtgacttcatgactggtatacctgcaacacctggcaatgagatccctgtagaggtggtattaaagatggtcactgagattaagaagattcctggtatttctcgaattatgtatgacttaacatcaaagcccccaggaactactgagtgggagtaataaacttcttgttctattaaaaaaaaaaaaaaaaaaaaaaaaaaaaaaggggggggcgccgcacaaagaaaatattcccccgggagggggcccaaagtttttacggcgtaacccgacttttctggatacacaagggggcccctaagaggggagccgtattaaataaggccagaagcacacggggccgcgcgtttaaccaaagggtgctggacaggggcggaaacaactgccctagctggggaatcctgggggaagaggaaccctacacttcggggcgggggacccatcagttggggccaacactctccctctaacaggagagatttttaaagaggcctctggagggggaaccttattaaacaccttcttcagcggtggttctttacggggtgtggtaaaacccccacggggggccagtaatgacctgcgtcggcttgagacgcaaactttggggctcacacggaggttagtgcgattgtgcggaacacttttttttcacccggggacgcctgtggtcgaaaaaaaacaggcgaggcactacccagaacctgacacgcactcaacgagccagtcagctgagacggcagacatcgactgacagaatccaaaccgacagcactagactcccaaaatgactgagacaccatacgactgcgactacggcacgtcgacgcaccgacaacacgcagtgcaccatcaccagcgcacaacaacgtgccacc

SEQ ID NO: 417736 - DNA, 2146 bp, Homo sapiens
agcgggagggccggccggtttggcggcggctgcggagggtatctgaggctcggctgccaagccgaacgggctctggctcctcccagtggccggccggggcggaagcaggaggcgggggcagcgtgcgcgctgctggtcttctctcccgcggcgctggggcccgcgctccgctgctgttgctccattcggcgcttttctggcggctggctcctctccgctgccggctgctcctcgaccaggcctccttctcaacctcagcccgcggcgccgacccttccggcaccctcccgccccgtctcgtactgtcgccgtcaccgccgcggctccggccctggccccgatggctctgtgcaacggagactccaagatgatgaataaggtatttggaggtactgtgcacaaaaaaagtgtcagagaagatggagttttcaacattagtgtggataatacatgttcattattcaggggccttcagaaggaagaagttgttttgcttacacatggagatagtgtagacaaagtagctgatggattcaaggttgtggcacgttctggaaacatagtagcaggcatagcaaatgaatctaaaaagttatatggagcacagttccaccctgaagttggccttacagaaaatggaaaagtaatactgaagaatttcctttatgatatagctggatgcagtggaaccttcaccgtgcagaacagagaacttgagtgtattcgagagatcaaagagagagtaggcacgtcaaaagttttggttttactcagtggtggagtagactcaacagtttgtacagctttgctaaatcgtgctttgaaccaagaacaagtcattgctgtgcacattgataatggctttatgagaaaacgagaaagccagtctgttgaagaggccctcaaaaagcttggaattcaggtcaaagtgataaatgctgctcattctttctacaatggaacaacaaccctaccaatatcagatgaagatagaaccccacggaaaagaattagcaaaacgttaaatatgaccacaagtcctgaagagaaaagaaaaatcattggggatacttttgttaagattgccaatgaagtaattggagaaatgaacttgaaaccagaggaggttttccttgcccaaggtactttacggcctgatctaattgaaagtgcatcccttgttgcaagtggcaaagctgaactcatcaaaacccatcacaatgacacagagctcatcagaaagttgagagaggagggaaaagtaatagaacctctgaaagattttcataaagatgaagtgagaattttgggcagagaacttggacttccagaagagttagtttccaggcatccatttccaggtcctggcctggcaatcagagtaatatgtgctgaagaaccttatatttgtaaggactttcctgaaaccaacaatattttgaaaatagtagctgatttttctgcaagtgttaaaaagccacataccctattacagagagtcaaagcctgcacaacagaagaggatcaggagaagctgatgcaaattaccagtctgcattcactgaatgccttcttgctgccaattaaaactgtaggtgtgcagggtgactgtcgttcctacagttacgtgtgtggaatctccagtaaagatgaacctgactgggaatcacttatttttctggctaggcttatacctcgcatgtgtcacaacgttaacagagttgtttatatatttggcccaccagttaaagaacctcctacagatgttactcccactttcttgacaacaggggtgctcagtactttacgccaagctgattttgaggcccataacattctcagggagtctgggtatgctgggaaaatcagccagatgccggtgattttgacaccattacattttgatcgggacccacttcaaaagcagccttcatgccagagatctgtggttattcgaacctttattactagtgacttcatgactggtatacctgcaacacctggcaatgagatccctgtagaggtggtattaaagatggtcactgagattaagaagattcctggtatttctcgaattatgtatgacttaacatcaaagcccccaggaactactgagtgggagtaataaacttcttgttctattaaa

SEQ ID NO: 417737 - DNA, 2543 bp, Homo sapiens
agcgggagggccggccggtttggcggcggctgcggagggtatctgaggctcggctgccaagccgaacgggctctggctcctcccagtggccggccggggcggaagcaggaggcgggggcagcgtgcgcgctgctggtcttctctcccgcggcgctggggcccgcgctccgctgctgttgctccattcggcgcttttctggcggctggctcctctccgctgccggctgctcctcgaccaggcctccttctcaacctcagcccgcggcgccgacccttccggcaccctcccgccccgtctcgtactgtcgccgtcaccgccgcggctccggccctggccccgatggctctgtgcaacggagactccaagaatctgatcatgatacaacaaagagatccagtgtgggacattctacaaaaagctggtctgatctttaaaaaaggtcaatgccataaaagactataaaaagctggagaatgctggaggagaccttaaggatggccaccaccactatgaaggagctgttgtcattctggatgctggtgctcagtacgggaaagtcatagaccgaagagtgagggaactgttcgtgcagtctgaaattttccccttggaaacaccagcatttgctataaaggaacaaggattccgtgctattatcatctctggaggacctaattctgtgtatgctgaagatgctccctggtttgatccagcaatattcactattggcaagcctgttcttggaatttgctatggtatgcagatgatgaataaggtatttggaggtactgtgcacaaaaaaagtgtcagagaagatggagttttcaacattagtgtggataatacatgttcattattcaggggccttcagaaggaagaagttgttttgcttacacatggagatagtgtagacaaagtagctgatggattcaaggttgtggcacgttctggaaacatagtagcaggcatagcaaatgaatctaaaaagttatatggagcacagttccaccctgaagttggccttacagaaaatggaaaagtaatactgaagaatttcctttatgatatagctggatgcagtggaaccttcaccgtgcagaacagagaacttgagtgtattcgagagatcaaagagagagtaggcacgtcaaaagttttggttttactcagtggtggagtagactcaacagtttgtacagctttgctaaatcgtgctttgaaccaagaacaagtcattgctgtgcacattgataatggctttatgagaaaacgagaaagccagtctgttgaagaggccctcaaaaagcttggaattcaggtcaaagtgataaatgctgctcattctttctacaatggaacaacaaccctaccaatatcagatgaagatagaaccccacggaaaagaattagcaaaacgttaaatatgaccacaagtcctgaagagaaaagaaaaatcattggggatacttttgttaagattgccaatgaagtaattggagaaatgaacttgaaaccagaggaggttttccttgcccaaggtactttacggcctgatctaattgaaagtgcatcccttgttgcaagtggcaaagctgaactcatcaaaacccatcacaatgacacagagctcatcagaaagttgagagaggagggaaaagtaatagaacctctgaaagattttcataaagatgaagtgagaattttgggcagagaacttggacttccagaagagttagtttccaggcatccatttccaggtcctggcctggcaatcagagtaatatgtgctgaagaaccttatatttgtaaggactttcctgaaaccaacaatattttgaaaatagtagctgatttttctgcaagtgttaaaaagccacataccctattacagagagtcaaagcctgcacaacagaagaggatcaggagaagctgatgcaaattaccagtctgcattcactgaatgccttcttgctgccaattaaaactgtaggtgtgcagggtgactgtcgttcctacagttacgtgtgtggaatctccagtaaagatgaacctgactgggaatcacttatttttctggctaggcttatacctcgcatgtgtcacaacgttaacagagttgtttatatatttggcccaccagttaaagaacctcctacagatgttactcccactttcttgacaacaggggtgctcagtactttacgccaagctgattttgaggcccataacattctcagggagtctgggtatgctgggaaaatcagccagatgccggtgattttgacaccattacattttgatcgggacccacttcaaaagcagccttcatgccagagatctgtggttattcgaacctttattactagtgacttcatgactggtatacctgcaacacctggcaatgagatccctgtagaggtggtattaaagatggtcactgagattaagaagattcctggtatttctcgaattatgtatgacttaacatcaaagcccccaggaactactgagtgggagtaataaacttcttgttctattaaa

SEQ ID NO: 417738 - DNA, 3029 bp, Homo sapiens
agcgggagggccggccggtttggcggcggctgcggagggtatctgaggctcggctgccaagccgaacgggctctggctcctcccagtggccggccggggcggaagcaggaggcgggggcagcgtgcgcgctgctggtcttctctcccgcggcgctggggcccgcgctccgctgctgttgctccattcggcgcttttctggcggctggctcctctccgctgccggctgctcctcgaccaggcctccttctcaacctcagcccgcggcgccgacccttccggcaccctcccgccccgtctcgtactgtcgccgtcaccgccgcggctccggccctggccccgatggctctgtgcaacggagactccaagctggagaatgctggaggagaccttaaggatggccaccaccactatgaaggagctgttgtcattctggatgctggtgctcagtacgggaaagtcatagaccgaagagtgagggaactgttcgtgcagtctgaaattttccccttggaaacaccagcatttgctataaaggaacaaggattccgtgctattatcatctctggaggacctaattctgtgtatgctgaagatgctccctggtttgatccagcaatattcactattggcaagcctgttcttggaatttgctatggtatgcagatgatgaataaggtatttggaggtactgtgcacaaaaaaagtgtcagagaagatggagttttcaacattagtgtggataatacatgttcattattcaggggccttcagaaggaagaagttgttttgcttacacatggagatagtgtagacaaagtagctgatggattcaaggttgtggcacgttctggaaacatagtagcaggcatagcaaatgaatctaaaaagttatatggagcacagttccaccctgaagttggccttacagaaaatggaaaagtaatactgaagaatttcctttatgatatagctggatgcagtggaaccttcaccgtgcagaacagagaacttgagtgtattcgagagatcaaagagagagtaggcacgtcaaaagttttggttttactcagtggtggagtagactcaacagtttgtacagctttgctaaatcgtgctttgaaccaagaacaagtcattgctgtgcacattgataatggctttatgagaaaacgagaaagccagtctgttgaagaggccctcaaaaagcttggaattcaggtcaaagtgataaatgctgctcattctttctacaatggaacaacaaccctaccaatatcagatgaagatagaaccccacggaaaagaattagcaaaacgttaaatatgaccacaagtcctgaagagaaaagaaaaatcattggggatacttttgttaagattgccaatgaagtaattggagaaatgaacttgaaaccagaggaggttttccttgcccaaggtactttacggcctgatctaattgaaagtgcatcccttgttgcaagtggcaaagctgaactcatcaaaacccatcacaatgacacagagctcatcagaaagttgagagaggagggaaaagtaatagaacctctgaaagattttcataaagatgaagtgagaattttgggcagagaacttggacttccagaagagttagtttccaggcatccatttccaggtcctggcctggcaatcagagtaatatgtgctgaagaaccttatatttgtaaggactttcctgaaaccaacaatattttgaaaatagtagctgatttttctgcaagtgttaaaaagccacataccctattacagagagtcaaagcctgcacaacagaagaggatcaggagaagctgatgcaaattaccagtctgcattcactgaatgccttcttgctgccaattaaaactgtaggtgtgcagggtgactgtcgttcctacagttacgtgtgtggaatctccagtaaagatgaacctgactgggaatcacttatttttctggctaggcttatacctcgcatgtgtcacaacgttaacagagttgtttatatatttggcccaccagttaaagaacctcctacagatgttactcccactttcttgacaacaggggtgctcagtactttacgccaagctgattttgaggcccataacattctcagggagtctgggtatgctgggaaaatcagccagatgccggtgattttgacaccattatattactagtgacttcatgactggtatacctgcaacacctggcaatgagatccctgtagaggtggtattaaagatggtcactgagattaagaagattcctggtatttctcgaattatgtatgacttaacatcaaagcccccaggaactactgagtgggagtaataaacttcttgttctattaaagtaccgtgtgcagtttaaattgattagaaatcattcccattattgacatgcagtactgtgaaaagagttactggagcagctacatcacatctgagttctccacagcaaaaatctacggcttaagagctgagttggggataaccaaaagggactgaagagtttgtacgggtaaataatcaaagcaccattgcctacactcagacagattgatactgcttttgcctttgcctcacttattctttatgtataaattcactgttgatgtctctgtgaatatgtatgaaggtgggtgaatttgggggtaattatgggcttctgtctccttaccagtttctaagaactgttagaaacgcccattatttaccagtgttacttactacttatatatactttttggagaatcagttttcttataagtaatcttatttctccaaagggtgaaaaagagatgaacatatcagataaaggtataggtgggctattccagccacttttgaaggacactgagggtataaaatgtaagctaccataagatggaaaagcaccaggaatttgttgatgtacttttgaattttatttcacagccttgggaggaagaaactatgagtggtctcagatgtctatgaatggtcttaaaatgttttcaaacca

SEQ ID NO: 417739 - DNA, 1401 bp, Homo sapiens
  misc_feature (109)..(109): n is a, c, g, or t
  misc_feature (247)..(247): n is a, c, g, or t
  misc_feature (255)..(255): n is a, c, g, or t
  misc_feature (269)..(269): n is a, c, g, or t
  misc_feature (271)..(271): n is a, c, g, or t
ccccgagcaggtggcctactcagcttttgtggcgcgagtgcgaaccggggcttcgaggtggtatatatgccgagcccattgacgagtactgtgtgcagcagctcacggnctttagatgggagagcctggtctcagttaccaaggagggtctggcgctgcctgaggatgaggaggagaagaagaagatggaagagagcaaggcaaagtttaagaacctctgcaagctcatgaacagacatcttgatangaagattnagaaggtgacaatntncaatagacttatgtctcacaagtcctgaagagaaaagaaaaatcattggggatacttttgttaagattgccaatgaagtaattggagaaatgaacttgaaaccagaggaggttttccttgcccaaggtactttacggcctgatctaattgaaagtgcatcccttgttgcaagtggcaaagctgaactcatcaaaacccatcacaatgacacagagctcatcagaaagttgagagaggagggaaaagtaatagaacctctgaaagattttcataaagatgaagtgagaattttgggcagagaacttggacttccagaagagttagtttccaggcatccatttccaggtcctggcctggcaatcagagtaatatgtgctgaagaaccttatatttgtaaggactttcctgaaaccaacaatattttgaaaatagtagctgatttttctgcaagtgttaaaaagccacataccctattacagagagtcaaagcctgcacaacagaagaggatcaggagaagctgatgcaaattaccagtctgcattcactgaatgccttcttgctgccaattaaaactgtaggtgtgcagggtgactgtcgttcctacagttacgtgtgtggaatctccagtaaagatgaacctgactgggaatcacttatttttctggctaggcttatacctcgcatgtgtcacaacgttaacagagttgtttatatatttggcccaccagttaaagaacctcctacagatgttactcccactttcttgacaacaggggtgctcagtactttacgccaagctgattttgaggcccataacattctcagggagtctgggtatgctgggaaaatcagccagatgccggtgattttgacaccattacattttgatcgggacccacttcaaaagcagccttcatgccagagatctgtggttattcgaacctttattactagtgacttcatgactggtatacctgcaacacctggcaatgagatccctgtagaggtggtattaaagatggtcactgagattaagaagattcctggtatttctcgaattatgtatgacttaacatcaaagcccccaggaactactgagtgggagtaataaacttcttgttctattaaa

SEQ ID NO: 417740 - DNA, 1589 bp, Homo sapiens
agcgggagggccggccggtttggcggcggctgcggagggtatctgaggctcggctgccaagccgaacgggctctggctcctcccagtggccggccggggcggaagcaggaggcgggggcagcgtgcgcgctgctggtcttctctcccgcggcgctggggcccgcgctccgctgctgttgctccattcggcgcttttctggcggctggctcctctccgctgccggctgctcctcgaccaggcctccttctcaacctcagcccgcggcgccgacccttccggcaccctcccgccccgtctcgtactgtcgccgtcaccgccgcggctccggccctggccccgatggctctgtgcaacggagactccaagctggagaatgctggaggagaccttaaggatggccaccaccactatgaaggagctgttgtcattctggatgctggtgctcagtacgggaaagtcatagaccgaagagtgagggaactgttcgtgcagtctgaaattttccccttggaaacaccagcatttgctataaaggaacaaggattccgtgctattatcatctctggaggacctaattctgtgtatgctgaagatgctccctggtttgatccagcaatattcactattggcaagcctgttcttggaatttgctatggtatgcagatgatgaataaggtatttggaggtactgtgcacaaaaaaagtgtcagagaagatggagttttcaacattagtgtggataatacatgttcattattcaggggccttcagaaggaagaagttgttttgcttacacatggagatagtgtagacaaagtagctgatggattcaaggttgtggcacgttctggaaacatagtagcaggcatagcaaatgaatctaaaaagttatatggagcacagttccaccctgaagttggccttacagaaaatggaaaagtaatactgaagaatttcctttatgatatagctggatgcagtggaaccttcaccgtgcagaacagagaacttgagtgtattcgagagatcaaagagagagtaggcacgtcaaaagttttggttttactcagtggtggagtagactcaacagtttgtacagctttgctaaatcgtgctttgaaccaagaacaagtcattgctgtgcacattgataatggctttatgagaaaacgagaaagccagtctgttgaagaggccctcaaaaagcttggaattcaggtcaaagtgataaatgctgctcattctttctacaatggaacaacaaccctaccaatatcagatgaagatagaaccccacggaaaagaattagcaaaacgttaaatatgaccacaagtcctgaagagaaaagaaaaatcattggggatacttttgttaagattgccaatgaagtaattggagaaatgaacttgaaaccagaggaggttttccttgcccaaggtactttacggcctgatctaattgaaagtgcatcccttgttgcaagtggcaaagctgaactcatcaaaacccatcacaatgacacagagctcatcagaaagttgagagaggagggagagacttggacttcagggaggtagtttcaggctc

SEQ ID NO: 417741 - DNA, 711 bp, Homo sapiens
atctagaggatcccgtagaatatataacaactctgttaaaagccacataccctattacagagagtcaaagcctgcacaacagaagaggatcaggagaagctgatgcaaattaccagtctgcattcactgaatgccttcttgctgccaattaaaactgtaggtgtgcagggtgactgtcgttcctacagttacgtgtgtggaatctccagtaaagatgaacctgactgggaatcacttatttttctggctaggcttatacctcgcatgtgtcacaacgttaacagagttgtttatatatttggcccaccagttaaagaacctcctacagatgttactcccactttcttgacaacaggggtgctcagtactttacgccaagctgattttgaggcccataacattctcagggagtctgggtatgctgggaaaatcagccagatgccggtgattttgacaccattacattttgatcgggacccacttcaaaagcagccttcatgccagagatctgtggttattcgaacctttattactagtgacttcatgactggtatacctgcaacacctggcaatgagatccctgtagaggtggtattaaagatggtcactgagattaagaagattcctggtatttctcgaattatgtatgacttaacatcaaagcccccaggaactactgagtgggagtaataaacttcttgttctattaaa

SEQ ID NO: 417742 - DNA, 3894 bp, Homo sapiens
  misc_feature (1057)..(1057): n is a, c, g, or t
ttgtaatctgacgacagtacactgcagttgtctccgaggtgaacctccggagccttggcacagctcgcttctaaagcttggaaatgacccgccacacctgaagcctgcaggtgctgaggccacattcgatcagacccaagctttgggagaccgctggggaaatttcccacttcctctcctgagaccaggaactcagcagagaaactttgtggaaaatgaactgaaggatgccacccagggagagtatctcctgagatcccatcatgcaggccttcccacaagggcccggcagcatgacaaggtgaaggcagagtatgtgcatctcaaccacccgctcaccctcgtgaccagagagcgcgatttggccgtgaaggagaaacaccagctccaagccaagctggagaacctagaacaggtcctgaagcatatgcgagaggcggctgaacggcggcagcagctgcagttggagcatgaccaggccctggctgttctcagtgccaagcagcaggaaattgaccttctgcagaagcctcagaaaaccaacctccagtgtccgcactttaggaagtgtcccatgctttcacagttgacgatgacgttcgttagcactcttggtttcaagcgacagaaaacccaaacaggaaattgtttttgtgcccatcactgaaaatgtggcttcagacatggctagatccagggctcaaatctgctggcctcagacccagtagaatccaaggcctccccgacatcaccaggacttggctgctctctgccctcctctggatcagcttcagccttggtttccctgtggagacccccagccactccagccctgaccctcctggtggcaaagtggctgcagcctcacctcctcccaagccaaagtccaatagaaaggggcttccctctcccgcagcattctcaggcagaggcccattgccctccgtaggccccacaccacccaggtcaccagtcgctgagggttcagactgtgcttggcacaggggaggtccagaccccagccagtccagaggttcttcccaggagaggagctccngacgctggaggaagaggcctgaggaacaggcctgttacccagaggatccgctatccaggaggctcaggttgaggctaagaaggagcatgaaggcgcagtgcggctgctagagtccaaggttcgagagctggaagagaaatgccggactcaaagtgagcagttcaacctgctgtcccgggacctggagaagttccggcagcacgctggcaagattgacctgctgggtggcagcgcggtggcccccctggacatctccacggcccccagcaagcctttcccacagttcatgaatggcctagccacctccctcggcaaaggtcaggagagcgctattggaggcagctctgcgatcggtgaatatatccggccccttccgcagcctggtgacaggccggagcctctgtccgccaagcccaccttcctgtcgagatccggtagcgcaagatgcagatctgagtcagacatggagaatgaacggaattccaatacctccaagcagagatactcggggaaggtccacctctgtgttgcccgctatagttacaaccccttcgatggaccgaacgagaaccccgaagctgagctgcccctcacggcgggaaaatacctctacgtctatggagacatggatgaggatgggttctatgaaggagagctcctcgatggccagaggggtctggtgccctccaacttcgtggactttgtgcaggacaacgagtcgcggttggcaagcacgctggggaacgagcaggatcagaacttcatcaaccattccggcatcggcctggagggagagcacatcctggacctccactccccaacccacatagatgcgggcatcaccgacaacagtgccgggaccctggacgtgaacatcgacgacatcggagaagacatcgtgccttaccctagaaaaatcaccctcatcaaacaactcgccaaaagtgttattgtgggctgggagcccccggcggtgccaccaggatggggaacggtgagcagctacaacgtcctggtggacaaggagacacgcatgaacctcacgctggggagcagaactaaagccctcatcgagaagctcaacatggcagcctgcacctaccgcatctccgtgcagtgcgtcaccagcaggggcagctcggatgagctgcagtgcacgctgctggtgggcaaggacgtggtggtggccccctcccacctgcgggtggacaacatcacgcagatctccgcccagctctcctggctacccaccaacagcaactacagccacgtcatcttcctcaacgaggaggagttcgacatcgtcaaggccgccaggtacaagtaccagttcttcaatctcaggcccaacatggcctataaggtgaaggttctggccaaaccccaccagatgccgtggcagctcccgctggagcaaagggagaagaaggaggcctttgtggagttctccacgttgcctgcaggacccccagcacccccacaagatgttaccgtccaggctggggtgacccccgccaccatccgggtctcctggagaccacctgtgctgacgcccaccgggctgtccaatggcgcaaacgttaccggctacggcgtgtatgccaaagggcagagggtggctgaagtcatcttccccacggcagacagcacggccgtggagcttgtgcggctgcggagcctggaggccaagggcgtgaccgtgcggaccctctccgcccagggcgagtccgtggactctgcagttgctgccgttccccccgagctcctggtgcctcctaccccccacccgagacctgcaccccaatcaaagccattagcaagttctggagtccccgaaaccaaagacgagcacctgggtccccacgccaggatggatgaggcctgggagcagagccgtgcacctggccctgtgcatgggcacatgctggagccgcccgtgggccccggaaggcggtcgccctcacccagccgcatcctgccacagccacagggcaccccggtgtccaccaccgtcgccaaggccatggcccgggaggccgcgcagagggtggccgagagcagcaggttagagaaaaggagcgtcttcctagagagaagcagcgcggggcagtacgccgcctcagacgaggaggacgcctatgactctccagacttcaagaggaggggcgcctcggtggacgacttcctgaaaggctctgaacttggcaagcagatggtctcctaacagagctggaattagattgaaccgaggcctgaagaagacctgtttccacgcctttccccatgtgccacgttctcctcacctatccaggagtgaatcatcaccttccctgcaatctgctcaggttacaaacccggaggaaaggctggagcacttgttctctgggtgaaggacccatacccccactggtttttgagatcggcattcagcgctgtcttatggcagccacagccccaggtggccccagagcccttgacatgtggccacctggggctgagtgtgactgaggccctgaatttttacttctataaaattagttccagattagtttacattctaattagtttacatgtaaacagccacacgtggctggtggccaccagtgctgacgcccagctctggatgaccacacctgctacaagagatgacttttctagagaagagtagaaacacagcggcagaaacacagctctgcacttccgagggcctcccactccttctgatgagactgcagaggaagtctgtttggccaagcatgctattaacacgttttcctgcttgttttgttttttaacagagcaaacaggtctgtttctattaaaatttaaaaagcgtt

SEQ ID NO: 417743 - DNA, 6588 bp, Homo sapiens
  misc_feature (3436)..(3436): n is a, c, g, or t
ttgtaatctgacgacagtacactgcagttgtctccgaggtgaacctccggagccttggcacagctcgcttctaaagcttggaaatgacccgccacacctgaagcctgcaggtgctgaggccacattcgatcagacccaagctttgggagaccgctggggaaatttcccacttcctctcctgagaccaggaactcagcagagaaactttgtggaaaatgaactgaaggatgccacccagggagagtatctcctgagatcccatcatgcaggccttcccacaagggcccggcagcatgacaaggtgaaggcagagtatgtgcatctcaaccacccgctcaccctcgtgaccagagagcgcgatttggccgtgaaggagaaacaccagctccaagccaagctggagaacctagaacaggtcctgaagcatatgcgagaggcggctgaacggcggcagcagctgcagttggagcatgaccaggccctggctgttctcagtgccaagcagcaggaaattgaccttctgcagaagtccaaggttcgagagctggaagagaaatgccggactcaaagtgagcagttcaacctgctgtcccgggacctggagaagttccggcagcacgctggcaagattgacctgctgggtggcagcgcggtggcccccctggacatctccacggcccccagcaagcctttcccacagttcatgaatggcctagccacctccctcggcaaaggtcaggagagcgctattggaggcagctctgcgatcggtgaatatatccggccccttccgcagcctggtgacaggccggagcctctgtccgccaagcccaccttcctgtcgagatccggtagcgcaagatgcagatctgagtcagacatggagaatgaacggaattccaatacctccaagcagagatactcggggaaggtccacctctgtgttgcccgctatagttacaaccccttcgatggaccgaacgagaaccccgaagctgagctgcccctcacggcgggaaaatacctctacgtctatggagacatggatgaggatgggttctatgaaggagagctcctcgatggccagaggggtctggtgccctccaacttcgtggactttgtgcaggacaacgagtcgcggttggcaagcacgctggggaacgagcaggatcagaacttcatcaaccattccggcatcggcctggagggagagcacatcctggacctccactccccaacccacatagatgcgggcatcaccgacaacagtgccgggaccctggacgtgaacatcgacgacatcggagaagacatcgtgccttaccctagaaaaatcaccctcatcaaacaactcgccaaaagtgttattgtgggctgggagcccccggcggtgccaccaggatggggaacggtgagcagctacaacgtcctggtggacaaggagacacgcatgaacctcacgctggggagcagaactaaagccctcatcgagaagctcaacatggcagcctgcacctaccgcatctccgtgcagtgcgtcaccagcaggggcagctcggatgagctgcagtgcacgctgctggtgggcaaggacgtggtggtggccccctcccacctgcgggtggacaacatcacgcagatctccgcccagctctcctggctacccaccaacagcaactacagccacgtcatcttcctcaacgaggaggagttcgacatcgtcaaggccgccaggtacaagtaccagttcttcaatctcaggcccaacatggcctataaggtgaaggttctggccaaaccccaccagatgccgtggcagctcccgctggagcaaagggagaagaaggaggcctttgtggagttctccacgttgcctgcaggacccccagcacccccacaagatgttaccgtccaggctggggtgacccccgccaccatccgggtctcctggagaccacctgtgctgacgcccaccgggctgtccaatggcgcaaacgttaccggctacggcgtgtatgccaaagggcagagggtggctgaagtcatcttccccacggcagacagcacggccgtggagcttgtgcggctgcggagcctggaggccaagggcgtgaccgtgcggaccctctccgcccagggcgagtccgtggactctgcagttgctgccgttccccccgagctcctggtgcctcctaccccccacccgagacctgcaccccaatcaaagccattagcaagttctggagtccccgaaaccaaagacgagcacctgggtccccacgccaggatggatgaggcctgggagcagagccgtgcacctggccctgtgcatgggcacatgctggagccgcccgtgggccccggaaggcggtcgccctcacccagccgcatcctgccacagccacagggcaccccggtgtccaccaccgtcgccaaggccatggcccgggaggccgcgcagagggtggccgagagcagcaggttagagaaaaggagcgtcttcctagagagaagcagcgcggggcagtacgccgcctcagacgaggaggacgcctatgactctccagacttcaagaggaggggcgcctcggtggacgacttcctgaaaggctctgaacttggcaagcagccgcactgttgccatggagacgagtaccacacagagagcagccgggggtctgacctctcagacatcatggaggaggacgaggaggagctgtattctgaaatgcagctggaagatgggggaaggaggcggcccagcggcacgtcccacaatgccctcaagattttagggaacccagcctctgcaggacgggtggatcacatgggccggaggtttccccgtggcagcgctggtcctcagaggtcccggcccgtgacagtcccatccatcgacgattacgggcgagaccgcctttctccagacttctatgaagagtcagaaactgaccctggtgccgaagagctcccggcccggatctttgtggctctctttgactacgacccgctcaccatgtccccaaacccagatgctgcagaggaggagcttccctttaaagaaggccagatcatcaaggtttatggtgataaagacgctgatggattctaccgtggggaaacctgtgcccggcttggccttattccttgtaacatggtctctgagatacaagcagatgatgaggagatgatggatcagcttcttagacagggctttctccctctgaatacacctgtggagaaaatagagagaagcaggagaagtggcaggcgtcattcggtatcgacgcggagaatggtggccctgtatgactacgaccccagagaaagctcgcccaacgtcgatgtcgaggccgaacttacattttgcacaggagatattattacagtttttggtgaaattgatgaagatggattttattatggggagctgaangggcagaaaggccttgtgccctcaaacttcttggaagaagtgcctgatgacgtagaagtctatctttctgatgctccatcccactactctcaagatacgccaatgcgctcaaaggcaaaaaggaagaagagtgttcatttcacaccttaatcaggcaatgtagccttcacgtaagtgagcaactgaagataccgataaagataccaacttaagctaccttaaccgggccagtgtggtagacttaaggcttcattgtggggttaaaaaaaaaaaaagatacaaagaaatatgtctcaaaaaactattggacctaaataattagaatattacttggtctcagttgtaaagcaactgaatttatagtgaagcaaatcatctttaataatcatttcctactatttgcattaagaatatttgaaaggccaacattgggaacatatttcttaacaagctaactgtgtgtttacatagagagagctgcatattgcattgttagccactcttggaaaaagcacaacctaacaaacatgtttactataggaagctttactttagaaacttaacccaaggtcaagcagatgagtagtgaacacaggtgatcgagtgttggctctgaacactccaaacactggctcgagtggccagaacgtgttttccttaagtaaccctgcctctaccttacgagagagctatgctcctcctcaaagcacaatcatcctgtgacagaagttgctgcaacacgcgtttgttgttggtataccaatgcaatactaagttgatgaagcacgcagctcaaatgatcacattagatggaatagatggtatcttcaggtgtactttgggatgctttactaggtgttttccattagaattagaccttgattttaaatccaagcaagcttgaagccccttggcttacagcatttgcctgctgaatactaaacactcacatggcaagagttgctctggagaggtagggccagaggaatgctgctgcactgccaactcaggcacatgcttagctgtaaagggaagcgaggtgaagtcgtcctgcagcgtattagagtaaaagtctacccctctgaagcactattaagcgcttaacgtatatttaaatactaccatgtgctatctactgaggaagattcatgttcaattatttggaaataatgcaagcatccactaagggcctttaagctttctttgattataattaaggttcattttagtttttttttttctttcaaccagtgtgccatctccaatatttctatagtataccaaccaccccaggaatgcactttaacaatatcaggattttatataaccaaatagtttcaaatacaacaaaattccctttatgaactttcgctttttaagactactgatgggtactcggccaactttactatcaacctaatttcagatcatgtctcccctgcccttagtcttcatttatgaagtgaattattacctgccttagctttgccaaagcaacggccaccccgcactccctcgagacagagaaacggaacccacacatttatgtctggggcctctctctggcgtgctgtgggagaggacctttgcttctcatggcatacttcaacaactgaaagaacaaatgaacccccctgacctttcctggtgggaaacggggacagtacgatgttaccaagtgaattctgttgttggcgctcacacactcaataaactgtaacactgtacctactaggttcctcctgagggttcaggtacagcaaggagagctccatcccccacagtccatctccattcggggtcacctacgtcatctatgggttctggtagtcctgggagaggcagggaaatgtcctcgaaaaagaaaaaggggctgctttccaaaggcaagaaactgctgaaaaagctgggtgcagtgaaatgattcatgtgcttccggacaactgccaaatctatgtaattttctttaattccaaactagggctttcatgactcaagtacttcctaaaaaaacccaatcttctcccctgacaccagtagagaaatgcacttttgcactaccaaccactttaaaccaaccacgagaacaaagaggagcggttgctctctgtcaccgctggcagtctgctctcattgtccaagctctgatttgggaggtgggaggggacgtcttattaacaaacgggggcgcatagctatcacctgtagctccctccctacctgtaattccagtctttgtgcatttgtcatctgcccttaaaggaatgattttcaacctttctcccttctcaaaatgcttgcctcataatgcataactttcactttgactctggtcttgaaattcctagtttaattcgccttgatgttctgccttataaatgcacaatgatttgtactgtctaataaaaacagtgtatactttgtatgtgtcgtgcattcagtggtcttcatcctgacacagtggttcgagatcaagttgtacaggctgtgcattttaagatactagtttcagtctttcaaagccagccaggctacacacagaaaatgtttactcaatcattcaaaaaagagaaaaggagagaaagtaactttgtttggtaaagcaccagtactccaaccttccagaaagccgattatcttcattgcttttaatgttctattctgtggcatatggttttctgttactttcgttgtcaaaatgccatacccaaatacacagcaatgaatggcacacaagtaatccacataatgcataagccacaccaaaaccagactcaatttaaatctgctccaaatgagtccatacccatcttcatcattggcatttgaacaaaagacttacttacaaagttgctggcagatgtatttgatggttactcttttgtaattcttgtccacttgtaaattgtttttactctttatacatacttttcagactgcctttcttttgtaatttatggacggtttataaatgaatgacaaagctttccccattgtgtcttcaaaaacgctattataaattgtaatataatagtatgtggtagatttattattaaaggaaatccatgtgtggttaagctctgtgtgggtgtgtgcatgtgcacagttagtgtaaaatattttctagaaataaaatttgttattttatacaa

SEQ ID NO: 417744 - DNA, 7156 bp, Homo sapiens
  misc_feature (3487)..(3487): n is a, c, g, or t
ttgtaatctgacgacagtacactgcagttgtctccgaggtgaacctccggagccttggcacagctcgcttctaaagcttggaaatgacccgccacacctgaagcctgcaggtgctgaggccacattcgatcagacccaagctttgggagaccgctggggaaatttcccacttcctctcctgagaccaggaactcagcagagaaactttgtggaaaatgaactgaaggatgccacccagggagagtatctcctgagatcccatcatgcaggccttcccacaagggcccggcagcatgacaaggtgaaggcagagtatgtgcatctcaaccacccgctcaccctcgtgaccagagagcgcgatttggccgtgaaggagaaacaccagctccaagccaagctggagaacctagaacaggtcctgaagcatatgcgagaggcggctgaacggcggcagcagctgcagttggagcatgaccaggccctggctgttctcagtgccaagcagcaggaaattgaccttctgcagaaggctcaggttgaggctaagaaggagcatgaaggcgcagtgcggctgctagagtccaaggttcgagagctggaagagaaatgccggactcaaagtgagcagttcaacctgctgtcccgggacctggagaagttccggcagcacgctggcaagattgacctgctgggtggcagcgcggtggcccccctggacatctccacggcccccagcaagcctttcccacagttcatgaatggcctagccacctccctcggcaaaggtcaggagagcgctattggaggcagctctgcgatcggtgaatatatccggccccttccgcagcctggtgacaggccggagcctctgtccgccaagcccaccttcctgtcgagatccggtagcgcaagatgcagatctgagtcagacatggagaatgaacggaattccaatacctccaagcagagatactcggggaaggtccacctctgtgttgcccgctatagttacaaccccttcgatggaccgaacgagaaccccgaagctgagctgcccctcacggcgggaaaatacctctacgtctatggagacatggatgaggatgggttctatgaaggagagctcctcgatggccagaggggtctggtgccctccaacttcgtggactttgtgcaggacaacgagtcgcggttggcaagcacgctggggaacgagcaggatcagaacttcatcaaccattccggcatcggcctggagggagagcacatcctggacctccactccccaacccacatagatgcgggcatcaccgacaacagtgccgggaccctggacgtgaacatcgacgacatcggagaagacatcgtgccttaccctagaaaaatcaccctcatcaaacaactcgccaaaagtgttattgtgggctgggagcccccggcggtgccaccaggatggggaacggtgagcagctacaacgtcctggtggacaaggagacacgcatgaacctcacgctggggagcagaactaaagccctcatcgagaagctcaacatggcagcctgcacctaccgcatctccgtgcagtgcgtcaccagcaggggcagctcggatgagctgcagtgcacgctgctggtgggcaaggacgtggtggtggccccctcccacctgcgggtggacaacatcacgcagatctccgcccagctctcctggctacccaccaacagcaactacagccacgtcatcttcctcaacgaggaggagttcgacatcgtcaaggccgccaggtacaagtaccagttcttcaatctcaggcccaacatggcctataaggtgaaggttctggccaaaccccaccagatgccgtggcagctcccgctggagcaaagggagaagaaggaggcctttgtggagttctccacgttgcctgcaggacccccagcacccccacaagatgttaccgtccaggctggggtgacccccgccaccatccgggtctcctggagaccacctgtgctgacgcccaccgggctgtccaatggcgcaaacgttaccggctacggcgtgtatgccaaagggcagagggtggctgaagtcatcttccccacggcagacagcacggccgtggagcttgtgcggctgcggagcctggaggccaagggcgtgaccgtgcggaccctctccgcccagggcgagtccgtggactctgcagttgctgccgttccccccgagctcctggtgcctcctaccccccacccgagacctgcaccccaatcaaagccattagcaagttctggagtccccgaaaccaaagacgagcacctgggtccccacgccaggatggatgaggcctgggagcagagccgtgcacctggccctgtgcatgggcacatgctggagccgcccgtgggccccggaaggcggtcgccctcacccagccgcatcctgccacagccacagggcaccccggtgtccaccaccgtcgccaaggccatggcccgggaggccgcgcagagggtggccgagagcagcaggttagagaaaaggagcgtcttcctagagagaagcagcgcggggcagtacgccgcctcagacgaggaggacgcctatgactctccagacttcaagaggaggggcgcctcggtggacgacttcctgaaaggctctgaacttggcaagcagccgcactgttgccatggagacgagtaccacacagagagcagccgggggtctgacctctcagacatcatggaggaggacgaggaggagctgtattctgaaatgcagctggaagatgggggaaggaggcggcccagcggcacgtcccacaatgccctcaagattttagggaacccagcctctgcaggacgggtggatcacatgggccggaggtttccccgtggcagcgctggtcctcagaggtcccggcccgtgacagtcccatccatcgacgattacgggcgagaccgcctttctccagacttctatgaagagtcagaaactgaccctggtgccgaagagctcccggcccggatctttgtggctctctttgactacgacccgctcaccatgtccccaaacccagatgctgcagaggaggagcttccctttaaagaaggccagatcatcaaggtttatggtgataaagacgctgatggattctaccgtggggaaacctgtgcccggcttggccttattccttgtaacatggtctctgagatacaagcagatgatgaggagatgatggatcagcttcttagacagggctttctccctctgaatacacctgtggagaaaatagagagaagcaggagaagtggcaggcgtcattcggtatcgacgcggagaatggtggccctgtatgactacgaccccagagaaagctcgcccaacgtcgatgtcgaggccgaacttacattttgcacaggagatattattacagtttttggtgaaattgatgaagatggattttattatggggagctgaangggcagaaaggccttgtgccctcaaacttcttggaagaagtgcctgatgacgtagaagtctatctttctgatgctccatcccactactctcaagatacgccaatgcgctcaaaggcaaaaagggtaagcaaacctatttagcctttttaatctctgtcccgttctgccatatgtggtctaatacaatctttgcactgatatttttatatcttgggccgaaaagcgtaaatacaccctgaattttttttctctgccctgaagccatgggagttgtacctaaaaattcttaattctaaatcttactcattttacaaaaaaagaccctttcaattctaatcaatcaatctgcctttactcacaaagaaatgtcccatcctacattatagaagcacatttcagtttgatcaagagtgaaaaggggatggctcctcttcagatttggtgggcaatggaggttatttgccctctgttaggactttagtctcttcacaaggatccaagggcttctcaagcatattgaactattagactacattcatgtttagtatctcatttttattttatttcatcactgcaagtttttctatattatatttttatatatatatttttatttctttgctcatctgcttggaaacagaagaagagtgttcatttcacaccttaatcaggcaatgtagccttcacgtaagtgagcaactgaagataccgataaagataccaacttaagctaccttaaccgggccagtgtggtagacttaaggcttcattgtggggttaaaaaaaaaaaaagatacaaagaaatatgtctcaaaaaactattggacctaaataattagaatattacttggtctcagttgtaaagcaactgaatttatagtgaagcaaatcatctttaataatcatttcctactatttgcattaagaatatttgaaaggccaacattgggaacatatttcttaacaagctaactgtgtgtttacatagagagagctgcatattgcattgttagccactcttggaaaaagcacaacctaacaaacatgtttactataggaagctttactttagaaacttaacccaaggtcaagcagatgagtagtgaacacaggtgatcgagtgttggctctgaacactccaaacactggctcgagtggccagaacgtgttttccttaagtaaccctgcctctaccttacgagagagctatgctcctcctcaaagcacaatcatcctgtgacagaagttgctgcaacacgcgtttgttgttggtataccaatgcaatactaagttgatgaagcacgcagctcaaatgatcacattagatggaatagatggtatcttcaggtgtactttgggatgctttactaggtgttttccattagaattagaccttgattttaaatccaagcaagcttgaagccccttggcttacagcatttgcctgctgaatactaaacactcacatggcaagagttgctctggagaggtagggccagaggaatgctgctgcactgccaactcaggcacatgcttagctgtaaagggaagcgaggtgaagtcgtcctgcagcgtattagagtaaaagtctacccctctgaagcactattaagcgcttaacgtatatttaaatactaccatgtgctatctactgaggaagattcatgttcaattatttggaaataatgcaagcatccactaagggcctttaagctttctttgattataattaaggttcattttagtttttttttttctttcaaccagtgtgccatctccaatatttctatagtataccaaccaccccaggaatgcactttaacaatatcaggattttatataaccaaatagtttcaaatacaacaaaattccctttatgaactttcgctttttaagactactgatgggtactcggccaactttactatcaacctaatttcagatcatgtctcccctgcccttagtcttcatttatgaagtgaattattacctgccttagctttgccaaagcaacggccaccccgcactccctcgagacagagaaacggaacccacacatttatgtctggggcctctctctggcgtgctgtgggagaggacctttgcttctcatggcatacttcaacaactgaaagaacaaatgaacccccctgacctttcctggtgggaaacggggacagtacgatgttaccaagtgaattctgttgttggcgctcacacactcaataaactgtaacactgtacctactaggttcctcctgagggttcaggtacagcaaggagagctccatcccccacagtccatctccattcggggtcacctacgtcatctatgggttctggtagtcctgggagaggcagggaaatgtcctcgaaaaagaaaaaggggctgctttccaaaggcaagaaactgctgaaaaagctgggtgcagtgaaatgattcatgtgcttccggacaactgccaaatctatgtaattttctttaattccaaactagggctttcatgactcaagtacttcctaaaaaaacccaatcttctcccctgacaccagtagagaaatgcacttttgcactaccaaccactttaaaccaaccacgagaacaaagaggagcggttgctctctgtcaccgctggcagtctgctctcattgtccaagctctgatttgggaggtgggaggggacgtcttattaacaaacgggggcgcatagctatcacctgtagctccctccctacctgtaattccagtctttgtgcatttgtcatctgcccttaaaggaatgattttcaacctttctcccttctcaaaatgcttgcctcataatgcataactttcactttgactctggtcttgaaattcctagtttaattcgccttgatgttctgccttataaatgcacaatgatttgtactgtctaataaaaacagtgtatactttgtatgtgtcgtgcattcagtggtcttcatcctgacacagtggttcgagatcaagttgtacaggctgtgcattttaagatactagtttcagtctttcaaagccagccaggctacacacagaaaatgtttactcaatcattcaaaaaagagaaaaggagagaaagtaactttgtttggtaaagcaccagtactccaaccttccagaaagccgattatcttcattgcttttaatgttctattctgtggcatatggttttctgttactttcgttgtcaaaatgccatacccaaatacacagcaatgaatggcacacaagtaatccacataatgcataagccacaccaaaaccagactcaatttaaatctgctccaaatgagtccatacccatcttcatcattggcatttgaacaaaagacttacttacaaagttgctggcagatgtatttgatggttactcttttgtaattcttgtccacttgtaaattgtttttactctttatacatacttttcagactgcctttcttttgtaatttatggacggtttataaatgaatgacaaagctttccccattgtgtcttcaaaaacgctattataaattgtaatataatagtatgtggtagatttattattaaaggaaatccatgtgtggttaagctctgtgtgggtgtgtgcatgtgcacagttagtgtaaaatattttctagaaataaaatttgttattttatacaa

SEQ ID NO: 417745 - DNA, 7252 bp, Homo sapiens
  misc_feature (3583)..(3583): n is a, c, g, or t
ttgtgtctacttcttcccgcagcttggaaatgacccgccacacctgaagcctgcaggtgctgaggccacattcgatcagacccaagctttgggagaccgctggggaaatttcccacttcctctcctgagaccaggaactcagcagagaaactttgtggaaaatgaactgaaggatgccacccagggagagtatctcctgagatcccatcatgcaggccttcccacaagggcccggcagcatgacaaggtgaaggcagagtatgtgcatctcaaccacccgctcaccctcgtgaccagagagcgcgatttggccgtgaaggagaaacaccagctccaagccaagctggagaacctagaacaggtcctgaagcatatgcgagaggcggctgaacggcggcagcagctgcagttggagcatgaccaggccctggctgttctcagtgccaagcagcaggaaattgaccttctgcagaaggctcaggttgaggctaagaaggagcatgaaggcgcagtgcggctgctagagaacaccttggacagcatgcaggtattctagagaatagcatcttccctgcccggcgtgcttggcgatgcttttcccgtgagtggacgcggccatgagtcctgggcctgctctgacctgcctctgcttcctgaactgcagcttctgacgcagtccaaggttcgagagctggaagagaaatgccggactcaaagtgagcagttcaacctgctgtcccgggacctggagaagttccggcagcacgctggcaagattgacctgctgggtggcagcgcggtggcccccctggacatctccacggcccccagcaagcctttcccacagttcatgaatggcctagccacctccctcggcaaaggtcaggagagcgctattggaggcagctctgcgatcggtgaatatatccggccccttccgcagcctggtgacaggccggagcctctgtccgccaagcccaccttcctgtcgagatccggtagcgcaagatgcagatctgagtcagacatggagaatgaacggaattccaatacctccaagcagagatactcggggaaggtccacctctgtgttgcccgctatagttacaaccccttcgatggaccgaacgagaaccccgaagctgagctgcccctcacggcgggaaaatacctctacgtctatggagacatggatgaggatgggttctatgaaggagagctcctcgatggccagaggggtctggtgccctccaacttcgtggactttgtgcaggacaacgagtcgcggttggcaagcacgctggggaacgagcaggatcagaacttcatcaaccattccggcatcggcctggagggagagcacatcctggacctccactccccaacccacatagatgcgggcatcaccgacaacagtgccgggaccctggacgtgaacatcgacgacatcggagaagacatcgtgccttaccctagaaaaatcaccctcatcaaacaactcgccaaaagtgttattgtgggctgggagcccccggcggtgccaccaggatggggaacggtgagcagctacaacgtcctggtggacaaggagacacgcatgaacctcacgctggggagcagaactaaagccctcatcgagaagctcaacatggcagcctgcacctaccgcatctccgtgcagtgcgtcaccagcaggggcagctcggatgagctgcagtgcacgctgctggtgggcaaggacgtggtggtggccccctcccacctgcgggtggacaacatcacgcagatctccgcccagctctcctggctacccaccaacagcaactacagccacgtcatcttcctcaacgaggaggagttcgacatcgtcaaggccgccaggtacaagtaccagttcttcaatctcaggcccaacatggcctataaggtgaaggttctggccaaaccccaccagatgccgtggcagctcccgctggagcaaagggagaagaaggaggcctttgtggagttctccacgttgcctgcaggacccccagcacccccacaagatgttaccgtccaggctggggtgacccccgccaccatccgggtctcctggagaccacctgtgctgacgcccaccgggctgtccaatggcgcaaacgttaccggctacggcgtgtatgccaaagggcagagggtggctgaagtcatcttccccacggcagacagcacggccgtggagcttgtgcggctgcggagcctggaggccaagggcgtgaccgtgcggaccctctccgcccagggcgagtccgtggactctgcagttgctgccgttccccccgagctcctggtgcctcctaccccccacccgagacctgcaccccaatcaaagccattagcaagttctggagtccccgaaaccaaagacgagcacctgggtccccacgccaggatggatgaggcctgggagcagagccgtgcacctggccctgtgcatgggcacatgctggagccgcccgtgggccccggaaggcggtcgccctcacccagccgcatcctgccacagccacagggcaccccggtgtccaccaccgtcgccaaggccatggcccgggaggccgcgcagagggtggccgagagcagcaggttagagaaaaggagcgtcttcctagagagaagcagcgcggggcagtacgccgcctcagacgaggaggacgcctatgactctccagacttcaagaggaggggcgcctcggtggacgacttcctgaaaggctctgaacttggcaagcagccgcactgttgccatggagacgagtaccacacagagagcagccgggggtctgacctctcagacatcatggaggaggacgaggaggagctgtattctgaaatgcagctggaagatgggggaaggaggcggcccagcggcacgtcccacaatgccctcaagattttagggaacccagcctctgcaggacgggtggatcacatgggccggaggtttccccgtggcagcgctggtcctcagaggtcccggcccgtgacagtcccatccatcgacgattacgggcgagaccgcctttctccagacttctatgaagagtcagaaactgaccctggtgccgaagagctcccggcccggatctttgtggctctctttgactacgacccgctcaccatgtccccaaacccagatgctgcagaggaggagcttccctttaaagaaggccagatcatcaaggtttatggtgataaagacgctgatggattctaccgtggggaaacctgtgcccggcttggccttattccttgtaacatggtctctgagatacaagcagatgatgaggagatgatggatcagcttcttagacagggctttctccctctgaatacacctgtggagaaaatagagagaagcaggagaagtggcaggcgtcattcggtatcgacgcggagaatggtggccctgtatgactacgaccccagagaaagctcgcccaacgtcgatgtcgaggccgaacttacattttgcacaggagatattattacagtttttggtgaaattgatgaagatggattttattatggggagctgaangggcagaaaggccttgtgccctcaaacttcttggaagaagtgcctgatgacgtagaagtctatctttctgatgctccatcccactactctcaagatacgccaatgcgctcaaaggcaaaaagggtaagcaaacctatttagcctttttaatctctgtcccgttctgccatatgtggtctaatacaatctttgcactgatatttttatatcttgggccgaaaagcgtaaatacaccctgaattttttttctctgccctgaagccatgggagttgtacctaaaaattcttaattctaaatcttactcattttacaaaaaaagaccctttcaattctaatcaatcaatctgcctttactcacaaagaaatgtcccatcctacattatagaagcacatttcagtttgatcaagagtgaaaaggggatggctcctcttcagatttggtgggcaatggaggttatttgccctctgttaggactttagtctcttcacaaggatccaagggcttctcaagcatattgaactattagactacattcatgtttagtatctcatttttattttatttcatcactgcaagtttttctatattatatttttatatatatatttttatttctttgctcatctgcttggaaacagaagaagagtgttcatttcacaccttaatcaggcaatgtagccttcacgtaagtgagcaactgaagataccgataaagataccaacttaagctaccttaaccgggccagtgtggtagacttaaggcttcattgtggggttaaaaaaaaaaaaagatacaaagaaatatgtctcaaaaaactattggacctaaataattagaatattacttggtctcagttgtaaagcaactgaatttatagtgaagcaaatcatctttaataatcatttcctactatttgcattaagaatatttgaaaggccaacattgggaacatatttcttaacaagctaactgtgtgtttacatagagagagctgcatattgcattgttagccactcttggaaaaagcacaacctaacaaacatgtttactataggaagctttactttagaaacttaacccaaggtcaagcagatgagtagtgaacacaggtgatcgagtgttggctctgaacactccaaacactggctcgagtggccagaacgtgttttccttaagtaaccctgcctctaccttacgagagagctatgctcctcctcaaagcacaatcatcctgtgacagaagttgctgcaacacgcgtttgttgttggtataccaatgcaatactaagttgatgaagcacgcagctcaaatgatcacattagatggaatagatggtatcttcaggtgtactttgggatgctttactaggtgttttccattagaattagaccttgattttaaatccaagcaagcttgaagccccttggcttacagcatttgcctgctgaatactaaacactcacatggcaagagttgctctggagaggtagggccagaggaatgctgctgcactgccaactcaggcacatgcttagctgtaaagggaagcgaggtgaagtcgtcctgcagcgtattagagtaaaagtctacccctctgaagcactattaagcgcttaacgtatatttaaatactaccatgtgctatctactgaggaagattcatgttcaattatttggaaataatgcaagcatccactaagggcctttaagctttctttgattataattaaggttcattttagtttttttttttctttcaaccagtgtgccatctccaatatttctatagtataccaaccaccccaggaatgcactttaacaatatcaggattttatataaccaaatagtttcaaatacaacaaaattccctttatgaactttcgctttttaagactactgatgggtactcggccaactttactatcaacctaatttcagatcatgtctcccctgcccttagtcttcatttatgaagtgaattattacctgccttagctttgccaaagcaacggccaccccgcactccctcgagacagagaaacggaacccacacatttatgtctggggcctctctctggcgtgctgtgggagaggacctttgcttctcatggcatacttcaacaactgaaagaacaaatgaacccccctgacctttcctggtgggaaacggggacagtacgatgttaccaagtgaattctgttgttggcgctcacacactcaataaactgtaacactgtacctactaggttcctcctgagggttcaggtacagcaaggagagctccatcccccacagtccatctccattcggggtcacctacgtcatctatgggttctggtagtcctgggagaggcagggaaatgtcctcgaaaaagaaaaaggggctgctttccaaaggcaagaaactgctgaaaaagctgggtgcagtgaaatgattcatgtgcttccggacaactgccaaatctatgtaattttctttaattccaaactagggctttcatgactcaagtacttcctaaaaaaacccaatcttctcccctgacaccagtagagaaatgcacttttgcactaccaaccactttaaaccaaccacgagaacaaagaggagcggttgctctctgtcaccgctggcagtctgctctcattgtccaagctctgatttgggaggtgggaggggacgtcttattaacaaacgggggcgcatagctatcacctgtagctccctccctacctgtaattccagtctttgtgcatttgtcatctgcccttaaaggaatgattttcaacctttctcccttctcaaaatgcttgcctcataatgcataactttcactttgactctggtcttgaaattcctagtttaattcgccttgatgttctgccttataaatgcacaatgatttgtactgtctaataaaaacagtgtatactttgtatgtgtcgtgcattcagtggtcttcatcctgacacagtggttcgagatcaagttgtacaggctgtgcattttaagatactagtttcagtctttcaaagccagccaggctacacacagaaaatgtttactcaatcattcaaaaaagagaaaaggagagaaagtaactttgtttggtaaagcaccagtactccaaccttccagaaagccgattatcttcattgcttttaatgttctattctgtggcatatggttttctgttactttcgttgtcaaaatgccatacccaaatacacagcaatgaatggcacacaagtaatccacataatgcataagccacaccaaaaccagactcaatttaaatctgctccaaatgagtccatacccatcttcatcattggcatttgaacaaaagacttacttacaaagttgctggcagatgtatttgatggttactcttttgtaattcttgtccacttgtaaattgtttttactctttatacatacttttcagactgcctttcttttgtaatttatggacggtttataaatgaatgacaaagctttccccattgtgtcttcaaaaacgctattataaattgtaatataatagtatgtggtagatttattattaaaggaaatccatgtgtggttaagctctgtgtgggtgtgtgcatgtgcacagttagtgtaaaatattttctagaaataaaatttgttattttatacaa

SEQ ID NO: 417746 - DNA, 3475 bp, Homo sapiens
ttgtaatctgacgacagtacactgcagttgtctccgaggtgaacctccggagccttggcacagctcgcttctaaagcttggaaatgacccgccacacctgaagcctgcaggtgctgaggccacattcgatcagacccaagctttgggagaccgctggggaaatttcccacttcctctcctgagaccaggaactcagcagagaaactttgtggaaaatgaactgaaggatgccacccagggagagtatctcctgagatcccatcatgcaggccttcccacaagggcccggcagcatgacaaggtgaaggcagagtatgtgcatctcaaccacccgctcaccctcgtgaccagagagcgcgatttggccgtgaaggagaaacaccagctccaagccaagctggagaacctagaacaggtcctgaagcatatgcgagaggcggctgaacggcggcagcagctgcagttggagcatgaccaggccctggctgttctcagtgccaagcagcaggaaattgaccttctgcagaaggctcaggttgaggctaagaaggagcatgaaggcgcagtgcggctgctagagtccaaggttcgagagctggaagagaaatgccggactcaaagtgagcagttcaacctgctgtcccgggacctggagaagttccggcagcacgctggcaagattgacctgctgggtggcagcgcggtggcccccctggacatctccacggcccccagcaagcctttcccacagttcatgaatggcctagccacctccctcggcaaaggtcaggagagcgctattggaggcagctctgcgatcggtgaatatatccggccccttccgcagcctggtgacaggccggagcctctgtccgccaagcccaccttcctgtcgagatccggtagcgcaagatgcagatctgagtcagacatggagaatgaacggaattccaatacctccaagcagagatactcggggaaggtccacctctgtgttgcccgctatagttacaaccccttcgatggaccgaacgagaaccccgaagctgagctgcccctcacggcgggaaaatacctctacgtctatggagacatggatgaggatgggttctatgaaggagagctcctcgatggccagaggggtctggtgccctccaacttcgtggactttgtgcaggacaacgagtcgcggttggcaagcacgctggggaacgagcaggatcagaacttcatcaaccattccggcatcggcctggagggagagcacatcctggacctccactccccaacccacatagatgcgggcatcaccgacaacagtgccgggaccctggacgtgaacatcgacgacatcggagaagacatcgtgccttaccctagaaaaatcaccctcatcaaacaactcgccaaaagtgttattgtgggctgggagcccccggcggtgccaccaggatggggaacggtgagcagctacaacgtcctggtggacaaggagacacgcatgaacctcacgctggggagcagaactaaagccctcatcgagaagctcaacatggcagcctgcacctaccgcatctccgtgcagtgcgtcaccagcaggggcagctcggatgagctgcagtgcacgctgctggtgggcaaggacgtggtggtggccccctcccacctgcgggtggacaacatcacgcagatctccgcccagctctcctggctacccaccaacagcaactacagccacgtcatcttcctcaacgaggaggagttcgacatcgtcaaggccgccaggtacaagtaccagttcttcaatctcaggcccaacatggcctataaggtgaaggttctggccaaaccccaccagatgccgtggcagctcccgctggagcaaagggagaagaaggaggcctttgtggagttctccacgttgcctgcaggacccccagcacccccacaagatgttaccgtccaggctggggtgacccccgccaccatccgggtctcctggagaccacctgtgctgacgcccaccgggctgtccaatggcgcaaacgttaccggctacggcgtgtatgccaaagggcagagggtggctgaagtcatcttccccacggcagacagcacggccgtggagcttgtgcggctgcggagcctggaggccaagggcgtgaccgtgcggaccctctccgcccagggcgagtccgtggactctgcagttgctgccgttccccccgagctcctggtgcctcctaccccccacccgagacctgcaccccaatcaaagccattagcaagttctggagtccccgaaaccaaagacgagcacctgggtccccacgccaggatggatgaggcctgggagcagagccgtgcacctggccctgtgcatgggcacatgctggagccgcccgtgggccccggaaggcggtcgccctcacccagccgcatcctgccacagccacagggcaccccggtgtccaccaccgtcgccaaggccatggcccgggaggccgcgcagagggtggccgagagcagcaggttagagaaaaggagcgtcttcctagagagaagcagcgcggggcagtacgccgcctcagacgaggaggacgcctatgactctccagacttcaagaggaggggcgcctcggtggacgacttcctgaaaggctctgaacttggcaagcagggaaactgaggcccacagaattgagaatttttgtccatgattacgcagatggtctcctaacagagctggaattagattgaaccgaggcctgaagaagacctgtttccacgcctttccccatgtgccacgttctcctcacctatccaggagtgaatcatcaccttccctgcaatctgctcaggttacaaacccggaggaaaggctggagcacttgttctctgggtgaaggacccatacccccactggtttttgagatcggcattcagcgctgtcttatggcagccacagccccaggtggccccagagcccttgacatgtggccacctggggctgagtgtgactgaggccctgaatttttacttctataaaattagttccagattagtttacattctaattagtttacatgtaaacagccacacgtggctggtggccaccagtgctgacgcccagctctggatgaccacacctgctacaagagatgacttttctagagaagagtagaaacacagcggcagaaacacagctctgcacttccgagggcctcccactccttctgatgagactgcagaggaagtctgtttggccaagcatgctattaacacgttttcctgcttgttttgttttttaacagagcaaacaggtctgtttctattaaaatttaaaaagcgttaatatttagcagcattgttttatgttgtattcataacataataatataacaatatattaattgttaatatatattgttaataatataataatataacataaaataagtgatacttattttcc

SEQ ID NO: 417747 - DNA, 3450 bp, Homo sapiens
ttgtaatctgacgacagtacactgcagttgtctccgaggtgaacctccggagccttggcacagctcgcttctaaagcttggaaatgacccgccacacctgaagcctgcaggtgctgaggccacattcgatcagacccaagctttgggagaccgctggggaaatttcccacttcctctcctgagaccaggaactcagcagagaaactttgtggaaaatgaactgaaggatgccacccagggagagtatctcctgagatcccatcatgcaggccttcccacaagggcccggcagcatgacaaggtgaaggcagagtatgtgcatctcaaccacccgctcaccctcgtgaccagagagcgcgatttggccgtgaaggagaaacaccagctccaagccaagctggagaacctagaacaggtcctgaagcatatgcgagaggcggctgaacggcggcagcagctgcagttggagcatgaccaggccctggctgttctcagtgccaagcagcaggaaattgaccttctgcagaaggctcaggttgaggctaagaaggagcatgaaggcgcagtgcggctgctagagtccaaggttcgagagctggaagagaaatgccggactcaaagtgagcagttcaacctgctgtcccgggacctggagaagttccggcagcacgctggcaagattgacctgctgggtggcagcgcggtggcccccctggacatctccacggcccccagcaagcctttcccacagttcatgaatggcctagccacctccctcggcaaaggtcaggagagcgctattggaggcagctctgcgatcggtgaatatatccggccccttccgcagcctggtgacaggccggagcctctgtccgccaagcccaccttcctgtcgagatccggtagcgcaagatgcagatctgagtcagacatggagaatgaacggaattccaatacctccaagcagagatactcggggaaggtccacctctgtgttgcccgctatagttacaaccccttcgatggaccgaacgagaaccccgaagctgagctgcccctcacggcgggaaaatacctctacgtctatggagacatggatgaggatgggttctatgaaggagagctcctcgatggccagaggggtctggtgccctccaacttcgtggactttgtgcaggacaacgagtcgcggttggcaagcacgctggggaacgagcaggatcagaacttcatcaaccattccggcatcggcctggagggagagcacatcctggacctccactccccaacccacatagatgcgggcatcaccgacaacagtgccgggaccctggacgtgaacatcgacgacatcggagaagacatcgtgccttaccctagaaaaatcaccctcatcaaacaactcgccaaaagtgttattgtgggctgggagcccccggcggtgccaccaggatggggaacggtgagcagctacaacgtcctggtggacaaggagacacgcatgaacctcacgctggggagcagaactaaagccctcatcgagaagctcaacatggcagcctgcacctaccgcatctccgtgcagtgcgtcaccagcaggggcagctcggatgagctgcagtgcacgctgctggtgggcaaggacgtggtggtggccccctcccacctgcgggtggacaacatcacgcagatctccgcccagctctcctggctacccaccaacagcaactacagccacgtcatcttcctcaacgaggaggagttcgacatcgtcaaggccgccaggtacaagtaccagttcttcaatctcaggcccaacatggcctataaggtgaaggttctggccaaaccccaccagatgccgtggcagctcccgctggagcaaagggagaagaaggaggcctttgtggagttctccacgttgcctgcaggacccccagcacccccacaagatgttaccgtccaggctggggtgacccccgccaccatccgggtctcctggagaccacctgtgctgacgcccaccgggctgtccaatggcgcaaacgttaccggctacggcgtgtatgccaaagggcagagggtggctgaagtcatcttccccacggcagacagcacggccgtggagcttgtgcggctgcggagcctggaggccaagggcgtgaccgtgcggaccctctccgcccagggcgagtccgtggactctgcagttgctgccgttccccccgagctcctggtgcctcctaccccccacccgagacctgcaccccaatcaaagccattagcaagttctggagtccccgaaaccaaagacgagcacctgggtccccacgccaggatggatgaggcctgggagcagagccgtgcacctggccctgtgcatgggcacatgctggagccgcccgtgggccccgcatcctgccacagccacagggcaccccggtgtccaccaccgtcgccaaggccatggcccgggaggccgcgcagagggtggccgagagcagcaggttagagaaaaggagcgtcttcctagagagaagcagcgcggggcagtacgccgcctcagacgaggaggacgcctatgactctccagacttcaagaggaggggcgcctcggtggacgacttcctgaaaggctctgaacttggcaagcagggaaactgaggcccacagaattgagaatttttgtccatgattacgcagatggtctcctaacagagctggaattagattgaaccgaggcctgaagaagacctgtttccacgcctttccccatgtgccacgttctcctcacctatccaggagtgaatcatcaccttccctgcaatctgctcaggttacaaacccggaggaaaggctggagcacttgttctctgggtgaaggacccatacccccactggtttttgagatcggcattcagcgctgtcttatggcagccacagccccaggtggccccagagcccttgacatgtggccacctggggctgagtgtgactgaggccctgaatttttacttctataaaattagttccagattagtttacattctaattagtttacatgtaaacagccacacgtggctggtggccaccagtgctgacgcccagctctggatgaccacacctgctacaagagatgacttttctagagaagagtagaaacacagcggcagaaacacagctctgcacttccgagggcctcccactccttctgatgagactgcagaggaagtctgtttggccaagcatgctattaacacgttttcctgcttgttttgttttttaacagagcaaacaggtctgtttctattaaaatttaaaaagcgttaatatttagcagcattgttttatgttgtattcataacataataatataacaatatattaattgttaatatatattgttaataatataataatataacataaaataagtgatacttattttcc

SEQ ID NO: 417748 - DNA, 809 bp, Homo sapiens
ttgtaatctgacgacagtacactgcagttgtctccgaggtgaacctccggagccttggcacagctcgcttctaaagcttggaaatgacccgccacacctgaagcctgcaggtgctgaggccacattcgatcagacccaagctttgggagaccgctggggaaatttcccacttcctctcctgagaccaggaactcagcagagaaactttgtggaaaatgaactgaaggatgccacccagggagagtatctcctgagatcccatcatgcaggccttcccacaagggcccggcagcatgacaaggtgaaggcagagtatgtgcatctcaaccacccgctcaccctcgtgaccagagagcgcgatttggccgtgaaggagaaacaccagctccaagccaagctggagaacctagaacaggtcctgaaggatgttaaacacagctgagctgtgcagtggcaggcacaccgctcctgaatggaaatggagtctgcctacgttaaagaccagaggtggctacagtgggtttcaaacttcaggaattttaagctgctcctcagacgtttaatgacctttgttataaagaggatagctaaaccagaaccttgctctatcagggggtacaggtaactggatgttcctcatgcattcctgatgagctgagctctccttcaatatttagccagtgggttgatttgctattgatgccactgagttaagctgaatgaattttttcaccaagtgttaaaatttgattggattatcattctggaaaacatttttttacaaaaataaaaaaataatcatctccagt

SEQ ID NO: 417749 - DNA, 129 bp, Homo sapiens
gtttctggtgctaaggcaactagactgaaaggatttcatttaaccctcaatgtaaaaccaggttatataattgtaggtagataggggaatttggcagagagataatcgtgtacaattatttgttctttt

SEQ ID NO: 417750 - DNA, 406 bp, Homo sapiens
agatgttgtacaacagtgaatgtactaaatgcaatcaaaatggttattttgtgttatgtgaattttcacatgaaaaagacagtatttctatgcatattctgggtcatacagctaattgaaaatcatgcatctattttttccagtattcctgaagaagggagcatatggctctaattgttgctgacagatacctggagaactccaacatggataatgacacagctgtaagaatcattttaaaaagtagagccggaaactcaatgggaccatacctgaagcctgcattccttagacttaatcagttcaagacagcacaaagcctatatttttatggatacttctgaatcagaacaaggaacccacgaaggtctataaatccagtctgcattaaactagtaactccaaa

SEQ ID NO: 417751 - DNA, 308 bp, Homo sapiens
  misc_feature (38)..(38): n is a, c, g, or t
tacaaacgctaccaacaaatacacagggagagaggganataactcatgttcactgaaagggagcatatggctctaattgttgctgacagatacctggagaactccaacatggataatgacacagctgtaagaatcattttaaaaagtagagccggaaactcaatgggaccatacctgaagcctgcattccttagacttaatcagttcaagacagcacaaagcctatatttttatggatacttctgaatcagaacaaggaacccacgaaggtctataaatccagtctgcattaaactagtaactccaaa

SEQ ID NO: 417752 - DNA, 2889 bp, Homo sapiens
  misc_feature (1123)..(1124): n is a, c, g, or t
  misc_feature (1149)..(1149): n is a, c, g, or t
gtcgcatacacactggcacagacacaagcaggacacacgcagacacacgcacactcgcgcgcatcctcccgccagcctgcccgcctgctcgccggcgcccggagcccgctctggccgcttgctttttgctgagaaagcttcctgccctggaagatggcacccttccccatccagacaccttgggaatgaattatgagggagccaggagtgagagagagaaccacgctgctgatgactccgagggaggggccctggacatgtgctgcagtgagaggctaccgggtctcccccagccgatagtgatggaggcactggacgaggctgaagggctccaggactcacagagagagatgccgccaccccctcctccctcgccgccctcagatccagctcagaagccaccacctcgaggcgctgggagccactccctcactgtcaggagcagcctgtgcctgttcgctgcctcacagttcctgcttgcctgtggggtgctctggttcagcggttatggccacatctggtcacagaacgccacaaacctcgtctcctctttgctgacgctcctgaaacagctggaacccacggcctggcttgactctgggacgtggggagtccccagtctgctgctggtctttctgtccgtgggcctggtcctcgttaccaccctggtgtggcacctcctgaggacacccccagagccacccaccccactgccccctgaggacaggcgccagtcagtgagccgccagccctccttcacctactcagagtggatggaggagaagatcgaggatgacttcctggacctcgacccggtgcccgagactcctgtgtttgattgtgtgatggacatcaagcctgaggctgaccccacctcactcaccgtcaagtccatgggtctgcaggagaggaggggttccaatgtctccctgaccctggacatgtgcactccgggctgcaacgaggagggctttggctatctcatgtccccacgtgaggagtccgcccgcgagtacctgctcagcgcctcccgtgtcctccaagcagaagagcttcatgaaaaggccctggaccctttcctgctgcaggcggaattctttgaaatccccatgaactttgtggnnccgaaagagtacgacatccctgggnggtgcggaagaaccggtacaaaaccatacttcccaaccctcacagcagagtgtgtctgacctcaccagaccctgacgaccctctgagttcctacatcaatgccaactacatccggggctatggtggggaggagaaggtgtacatcgccactcagggacccatcgtcagcacggtcgccgacttctggcgcatggtgtggcaggagcacacgcccatcattgtcatgatcaccaacatcgaggagatgaacgagaaatgcaccgagtattggccggaggagcaggtggcgtacgacggtgttgagatcactgtgcagaaagtcattcacacggaggattaccggctgcgactcatctccctcaagagtgggactgaggagcgaggcctgaagcattactggttcacatcctggcccgaccagaagaccccagaccgggcccccccactcctgcacctggtgcgggaggtggaggaggcagcccagcaggaggggccccactgtgcccccatcatcgtccactgcagtgcagggattgggaggaccggctgcttcattgccaccagcatctgctgccagcagctgcggcaggagggtgtggtggacatcctgaagaccacgtgccagctccgtcaggacaggggcggcatgatccagacatgcgagcagtaccagtttgtgcaccacgtcatgagcctctacgaaaagcagctgtcccaccagtccccagaatgactgcgcttctcctacaaggttctctgggcactgcccagcctgagtctcggccctcacccagggccctgcctcgggtcctgggcctgctccccgcttcctccccttcagtcagctccctctgtcctctgtcagcctggcctgacccctaccctccagcattgctcttcctactgtacatattggggagtggggggcagggtcgggaagggacatgccaggccaggcctggggccccggggcctgacccacaccacgcagaccccgggctccagtttttaacgatggttccatcaatacctgatccagaatgtttccgtgctacactttgtgtcctgctgcaatgtgttctgtctgtccatccatctctgccctctgtaccggacactgtgtctcctcagccaggaaggggtaatgagctccagcccctaagcaaccggacttgcctgcctcggcctcacccgcacttctcccaaaaggcagatgacggggagttaggcatggggagctccagaaggtcaccagagagctttcagctgagggagagttctctaggttggagtgggcatcacagccagggtggcctctgggtgtcagatgctctcaggagggtgcccagcctgtgaggcactggcaaggtagggggcagatggggcatggagaacccagaggatctaggccctgttggggaggggaggggagctcaaggtttgggtggggactcagcccagatctacgtgagacatttttctgtgtcactgtgggaaagccttcccagaagtctcactgcgtgttgctctgcgtgtgttcccatgtccatgcgtgtgttgagagcccatcaggagggcatgcatgactctttggcaacatgtattatcttggagccacgtgtttttattgctgactttaaatatttatcccacggcagacagagacatttggtgtctttttataattcgctcgtggtcattgaatagagcaataaacggagcattttgagcaaaactaac

SEQ ID NO: 417753 - DNA, 678 bp, Homo sapiens
gtaaggatggcacaggcctcacaagtgtctggagagagggtgggtggaggccagcctcccacttcctccccaggatggccacctggaaggcaggaggataaggggcctccctggtgttcctcaggagctccaagccctcaaggctgggataaggggaaggctggaattctgagccaccgcaccagcatctgagacctcacaccctgcctccctacctaagaatccaggggcaggggcctccccgacccctgagctcccagccgtacagggttctcctgagaactcctgtctgtggaggcctttctaggagactactcttttgatgtacatatttgtgaggtcctctctggaaagggctttctcttggttcccttcagtcagcttttctccaaggagagtcctgaggcctccccgggcacgcagcaccggggccctgctctcagctgcccggtctggaccttagaggttcaggagcctccatgcagggccaggttgaggctgcaggtgagctctgctgggggaacacgggggaagggggccggctccatactcagcctgctcccctgtgccccagcttgcctgtggggtgctctggttcagcggttatggccacatctggtcacagaacgccacaaacctcgtctcctctttgctgacgctcctgaaacagctggaacc

SEQ ID NO: 417754 - DNA, 2705 bp, Homo sapiens
  misc_feature (939)..(940): n is a, c, g, or t
  misc_feature (965)..(965): n is a, c, g, or t
atcccagattgagaggcagccacagccaccccaaaagggaggcacgccctgcctgtggacagggcggagtcatcgccgcaaaggaccatctaccacaggtctcccccagccgatagtgatggaggcactggacgaggctgaagggctccaggactcacagagagagatgccgccaccccctcctccctcgccgccctcagatccagctcagaagccaccacctcgaggcgctgggagccactccctcactgtcaggagcagcctgtgcctgttcgctgcctcacagttcctgcttgcctgtggggtgctctggttcagcggttatggccacatctggtcacagaacgccacaaacctcgtctcctctttgctgacgctcctgaaacagctggaacccacggcctggcttgactctgggacgtggggagtccccagtctgctgctggtctttctgtccgtgggcctggtcctcgttaccaccctggtgtggcacctcctgaggacacccccagagccacccaccccactgccccctgaggacaggcgccagtcagtgagccgccagccctccttcacctactcagagtggatggaggagaagatcgaggatgacttcctggacctcgacccggtgcccgagactcctgtgtttgattgtgtgatggacatcaagcctgaggctgaccccacctcactcaccgtcaagtccatgggtctgcaggagaggaggggttccaatgtctccctgaccctggacatgtgcactccgggctgcaacgaggagggctttggctatctcatgtccccacgtgaggagtccgcccgcgagtacctgctcagcgcctcccgtgtcctccaagcagaagagcttcatgaaaaggccctggaccctttcctgctgcaggcggaattctttgaaatccccatgaactttgtggnnccgaaagagtacgacatccctgggnggtgcggaagaaccggtacaaaaccatacttcccaaccctcacagcagagtgtgtctgacctcaccagaccctgacgaccctctgagttcctacatcaatgccaactacatccggggctatggtggggaggagaaggtgtacatcgccactcagggacccatcgtcagcacggtcgccgacttctggcgcatggtgtggcaggagcacacgcccatcattgtcatgatcaccaacatcgaggagatgaacgagaaatgcaccgagtattggccggaggagcaggtggcgtacgacggtgttgagatcactgtgcagaaagtcattcacacggaggattaccggctgcgactcatctccctcaagagtgggactgaggagcgaggcctgaagcattactggttcacatcctggcccgaccagaagaccccagaccgggcccccccactcctgcacctggtgcgggaggtggaggaggcagcccagcaggaggggccccactgtgcccccatcatcgtccactgcagtgcagggattgggaggaccggctgcttcattgccaccagcatctgctgccagcagctgcggcaggagggtgtggtggacatcctgaagaccacgtgccagctccgtcaggacaggggcggcatgatccagacatgcgagcagtaccagtttgtgcaccacgtcatgagcctctacgaaaagcagctgtcccaccagtccccagaatgactgcgcttctcctacaaggttctctgggcactgcccagcctgagtctcggccctcacccagggccctgcctcgggtcctgggcctgctccccgcttcctccccttcagtcagctccctctgtcctctgtcagcctggcctgacccctaccctccagcattgctcttcctactgtacatattggggagtggggggcagggtcgggaagggacatgccaggccaggcctggggccccggggcctgacccacaccacgcagaccccgggctccagtttttaacgatggttccatcaatacctgatccagaatgtttccgtgctacactttgtgtcctgctgcaatgtgttctgtctgtccatccatctctgccctctgtaccggacactgtgtctcctcagccaggaaggggtaatgagctccagcccctaagcaaccggacttgcctgcctcggcctcacccgcacttctcccaaaaggcagatgacggggagttaggcatggggagctccagaaggtcaccagagagctttcagctgagggagagttctctaggttggagtgggcatcacagccagggtggcctctgggtgtcagatgctctcaggagggtgcccagcctgtgaggcactggcaaggtagggggcagatggggcatggagaacccagaggatctaggccctgttggggaggggaggggagctcaaggtttgggtggggactcagcccagatctacgtgagacatttttctgtgtcactgtgggaaagccttcccagaagtctcactgcgtgttgctctgcgtgtgttcccatgtccatgcgtgtgttgagagcccatcaggagggcatgcatgactctttggcaacatgtattatcttggagccacgtgtttttattgctgactttaaatatttatcccacggcagacagagacatttggtgtctttttataattcgctcgtggtcattgaatagagcaataaacggagcattttgagcaaaactaac

SEQ ID NO: 417755 - DNA, 2801 bp, Homo sapiens
  misc_feature (1035)..(1036): n is a, c, g, or t
  misc_feature (1061)..(1061): n is a, c, g, or t
gtcgcatacacactggcacagacacaagcaggacacacgcagacacacgcacactcgcgcgcatcctcccgccagcctgcccgcctgctcgccggcgcccggagcccgctctggccggagtgagagagagaaccacgctgctgatgactccgagggaggggccctggacatgtgctgcagtgagaggctaccgggtctcccccagccgatagtgatggaggcactggacgaggctgaagggctccaggactcacagagagagatgccgccaccccctcctccctcgccgccctcagatccagctcagaagccaccacctcgaggcgctgggagccactccctcactgtcaggagcagcctgtgcctgttcgctgcctcacagttcctgcttgcctgtggggtgctctggttcagcggttatggccacatctggtcacagaacgccacaaacctcgtctcctctttgctgacgctcctgaaacagctggaacccacggcctggcttgactctgggacgtggggagtccccagtctgctgctggtctttctgtccgtgggcctggtcctcgttaccaccctggtgtggcacctcctgaggacacccccagagccacccaccccactgccccctgaggacaggcgccagtcagtgagccgccagccctccttcacctactcagagtggatggaggagaagatcgaggatgacttcctggacctcgacccggtgcccgagactcctgtgtttgattgtgtgatggacatcaagcctgaggctgaccccacctcactcaccgtcaagtccatgggtctgcaggagaggaggggttccaatgtctccctgaccctggacatgtgcactccgggctgcaacgaggagggctttggctatctcatgtccccacgtgaggagtccgcccgcgagtacctgctcagcgcctcccgtgtcctccaagcagaagagcttcatgaaaaggccctggaccctttcctgctgcaggcggaattctttgaaatccccatgaactttgtggnnccgaaagagtacgacatccctgggnggtgcggaagaaccggtacaaaaccatacttcccaaccctcacagcagagtgtgtctgacctcaccagaccctgacgaccctctgagttcctacatcaatgccaactacatccggggctatggtggggaggagaaggtgtacatcgccactcagggacccatcgtcagcacggtcgccgacttctggcgcatggtgtggcaggagcacacgcccatcattgtcatgatcaccaacatcgaggagatgaacgagaaatgcaccgagtattggccggaggagcaggtggcgtacgacggtgttgagatcactgtgcagaaagtcattcacacggaggattaccggctgcgactcatctccctcaagagtgggactgaggagcgaggcctgaagcattactggttcacatcctggcccgaccagaagaccccagaccgggcccccccactcctgcacctggtgcgggaggtggaggaggcagcccagcaggaggggccccactgtgcccccatcatcgtccactgcagtgcagggattgggaggaccggctgcttcattgccaccagcatctgctgccagcagctgcggcaggagggtgtggtggacatcctgaagaccacgtgccagctccgtcaggacaggggcggcatgatccagacatgcgagcagtaccagtttgtgcaccacgtcatgagcctctacgaaaagcagctgtcccaccagtccccagaatgactgcgcttctcctacaaggttctctgggcactgcccagcctgagtctcggccctcacccagggccctgcctcgggtcctgggcctgctccccgcttcctccccttcagtcagctccctctgtcctctgtcagcctggcctgacccctaccctccagcattgctcttcctactgtacatattggggagtggggggcagggtcgggaagggacatgccaggccaggcctggggccccggggcctgacccacaccacgcagaccccgggctccagtttttaacgatggttccatcaatacctgatccagaatgtttccgtgctacactttgtgtcctgctgcaatgtgttctgtctgtccatccatctctgccctctgtaccggacactgtgtctcctcagccaggaaggggtaatgagctccagcccctaagcaaccggacttgcctgcctcggcctcacccgcacttctcccaaaaggcagatgacggggagttaggcatggggagctccagaaggtcaccagagagctttcagctgagggagagttctctaggttggagtgggcatcacagccagggtggcctctgggtgtcagatgctctcaggagggtgcccagcctgtgaggcactggcaaggtagggggcagatggggcatggagaacccagaggatctaggccctgttggggaggggaggggagctcaaggtttgggtggggactcagcccagatctacgtgagacatttttctgtgtcactgtgggaaagccttcccagaagtctcactgcgtgttgctctgcgtgtgttcccatgtccatgcgtgtgttgagagcccatcaggagggcatgcatgactctttggcaacatgtattatcttggagccacgtgtttttattgctgactttaaatatttatcccacggcagacagagacatttggtgtctttttataattcgctcgtggtcattgaatagagcaataaacggagcattttgagcaaaactaac

SEQ ID NO: 417756 - DNA, 2322 bp, Homo sapiens
catctgtccatccatccatccctgcctctgtgcatgcatctgtccattcatccctgcctctgtgtatgcatctgtccatccatccatccccacctctgtgcatgcatctgtccatccatccccgcctctgtgcatgcatctgtccgtccatccatccctgcctctgtgcatgcatctgtccgtccattcatccctgcctctgtgcatgcatctgtccattcatccatccctgactctgtgcatgcatctgtccatccatccatccttgcctctatgcatgcatttgtccgtccatccatccctgcctctgtgcatgcatccatacctgcctctgtgcatgcatctgtcagtctatcaatccccgatcccttctttgtaatggtgttgagcgctcacaactccctcatcctaagacgctcgttggatccattccctcccctcaccccatgctgctctctgccctcccttcccggtcaagttctccagccagtggtctcaactcaatcttcacttcccccgctcctctcacacctatccccactgcattctaaattcttccccaacgcgctgggcctacaggcactaaaaaggtcactttgtccctggatgaccaaacacaggccaatgtaacttactgggcttgttttgccccagccacagctgaccacttcctccttcactcttgttgttgatcacctttgggcttagtctttctccatctctgttgagtccttctcccctgccacctactccttcatgctggggttctctgtagctctgtacctgacagtcacgttccaccctttcctcccagaagctcgccaacccccgtggactgctggctctcaaggcggccgctagcccagcaccgacagcagctgacaatgcacactatgcggcccaaggcaggtcctgtgctgagaggcatgggtgaatggctcatttcatcggcaagcccacgccaccagcaggcgccgttctcctcgcatttctcaggcgaggaacctgagacaatgaggttaaggaagttgttcattacaagtggaagaaccctgacttacttgaattcaactttgaagcccacattctctttttctgtgtgtgtgacagggtctcactttgtcacccaggccgcagtgcagtggtgtgaacacagctcattgcagtctcaacctccctgactcaagcaatcctcctgccttagcctcctgagtagctgggactacaagcatgtgccaccacgcccagccgaagcccatatgtgaatgttgaggcacacagcctccccagcctctgccttaccaagccctccacagggcctaggcaccctccctggctgcccccttcccccgtcactcaggctccccagcagccaatgtagttaatatggggctgcaaagagctgggcctggcctcaggcgggaccacctccccggcattgccatccctgctgcagagctcccatgcgatcagcctcctctccagctgagaccacatcctcactcagcttctaggctgttcctgctccccattcccctcagcacatggcccctgagaaactgcttgcacaagaatttccctctggagccccacctctggggaacctgacctcagacagaggagaccaagctctagggcaggatcctccacctcccttgccccaccggtgtggccagcccagagcgctgcagactcccgcccagacctgcacttgtgcctgccttctgccagcctgctcctcctcctcccactctcacacctgcattaacagcaccaggacgccatcctccaagggccccagcctcatctcccctgtcaccaggatccagccagatctcaatccttgcccatcctaactgaacctccctcagatccgtccactgcccccttccccaggaccacactccaccatctcttgcctggaccctgcgagaacttcctgcctccctgcctctatcctaccccctgccccccgctgaagctgatgatagttccggaatgcaaaaccccttaatgattcccccattgatcaaagtcttccacatgctttcaaggtccttggtgatccaggacctgccgccttctgcagtctccctactgatgccatagttttggcttctggcctcatatgtcccgggtcatttctctggtcactggctcctcttacccctgactcagctggctcactgctttcccattggatctcaaccctgtgtacctggggagagcggaactctgtatgtcttgtcttgtgctagtaggcactcagtgtgtatgtgtggatattcatatatatatatatatatatttgaaaaaaagttt

SEQ ID NO: 417757 - DNA, 1989 bp, Homo sapiens
catctgtccatccatccatccctgcctctgtgcatgcatctgtccattcatccctgcctctgtgtatgcatctgtccatccatccatccccacctctgtgcatgcatctgtccatccatccccgcctctgtgcatgcatctgtccgtccatccatccctgcctctgtgcatgcatctgtccgtccattcatccctgcctctgtgcatgcatctgtccattcatccatccctgactctgtgcatgcatctgtccatccatccatccttgcctctatgcatgcatttgtccgtccatccatccctgcctctgtgcatgcatccatacctgcctctgtgcatgcatctgtcagtctatcaatccccgatcccttctttgtaatggtgttgagcgctcacaactccctcatcctaagacgctcgttggatccattccctcccctcaccccatgctgctctctgccctcccttcccggtcaagttctccagccagtggtctcaactcaatcttcacttcccccgctcctctcacacctatccccactgcattctaaattcttccccaacgcgctgggcctacaggcactaaaaaggtcactttgtccctggatgaccaaacacaggccaatgtaacttactgggcttgttttgccccagccacagctgaccacttcctccttcactcttgttgttgatcacctttgggcttagtctttctccatctctgttgagtccttctcccctgccacctactccttcatgctggggttctctgtagctctgtacctgacagtcacgttccaccctttcctcccagaagctcgccaacccccgtggactgctggctctcaaggcggccgctagcccagcaccgacagcagctgacaatgcacactatgcggcccaaggcaggtcctgtgctgagaggcatgggtgaatggctcatttcatcggcaagcccacgccaccagcaggcgccgttctcctcgcatttctcaggcgaggaacctgagacaatgaggttaaggaagttgttcattacaagtggaagaaccctgacttacttgaattcaactttgaagcccacattctctttttctgtgtgtgtgacagggtctcactttgtcacccaggccgcagtgcagtggtgtgaacacagctcattgcagtctcaacctccctgactcaagcaatcctcctgccttagcctcctgagtagctgggactacaagcatgtgccaccacgcccagccgaagcccatatgtgaatgttgaggcacacagcctccccagcctctgccttaccaagccctccacagggcctaggcaccctccctggctgcccccttcccccgtcactcaggctccccagcagccaatgtagttaatatggggctgcaaagagctgggcctggcctcaggcgggaccacctccccggcattgccatccctgctgcagagctcccatgcgatcagcctcctctccagctgagaccacatcctcactcagcttctaggctgttcctgctccccattcccctcagcacatggcccctgagaaactgcttgcacaagaatttccctctggagccccacctctggggaacctgacctcagacagaggagaccaagctctagggcaggatcctccacctcccttgccccaccggtgtggccagcccagagcgctgcagactcccgcccagacctgcacttgtgcctgccttctgccagcctgctcctcctcctcccactctcacacctgcattaacagcaccaggacgccatcctccaagggccccagcctcatctcccctgtcaccaggatccagccagatctcaatccttgcccatcctaactgaacctccctcagatccgtccactgcccccttccccaggaccacactccaccatctcttgcctggaccctactgagagatcgtgccccacagagagagcgtcgacgctctctctgtggggctcaaaacctc

SEQ ID NO: 417758 - DNA, 1988 bp, Homo sapiens
catctgtccatccatccatccctgcctctgtgcatgcatctgtccattcatccctgcctctgtgtatgcatctgtccatccatccatccccacctctgtgcatgcatctgtccatccatccccgcctctgtgcatgcatctgtccgtccatccatccctgcctctgtgcatgcatctgtccgtccattcatccctgcctctgtgcatgcatctgtccattcatccatccctgactctgtgcatgcatctgtccatccatccatccttgcctctatgcatgcatttgtccgtccatccatccctgcctctgtgcatgcatccatacctgcctctgtgcatgcatctgtcagtctatcaatccccgatcccttctttgtaatggtgttgagcgctcacaactccctcatcctaagacgctcgttggatccattccctcccctcaccccatgctgctctctgccctcccttcccggtcaagttctccagccagtggtctcaactcaatcttcacttcccccgctcctctcacacctatccccactgcattctaaattcttccccaacgcgctgggcctacaggcactaaaaaggtcactttgtccctggatgaccaaacacaggccaatgtaacttactgggcttgttttgccccagccacagctgaccacttcctccttcactcttgttgttgatcacctttgggcttagtctttctccatctctgttgagtccttctcccctgccacctactccttcatgctggggttctctgtagctctgtacctgacagtcacgttccaccctttcctcccagaagctcgccaacccccgtggactgctggctctcaaggcggccgctagcccagcaccgacagcagctgacaatgcacactatgcggcccaaggcaggtcctgtgctgagaggcatgggtgaatggctcatttcatcggcaagcccacgccaccagcaggcgccgttctcctcgcatttctcaggcgaggaacctgagacaatgaggttaaggaagttgttcattacaagtggaagaaccctgacttacttgaattcaactttgaagcccacattctctttttctgtgtgtgtgacagggtctcactttgtcacccaggccgcagtgcagtggtgtgaacacagctcattgcagtctcaacctccctgactcaagcaatcctcctgccttagcctcctgagtagctgggactacaagcatgtgccaccacgcccagccgaagcccatatgtgaatgttgaggcacacagcctccccagcctctgccttaccaagccctccacagggcctaggcaccctccctggctgcccccttcccccgtcactcaggctccccagcagccaatgtagttaatatggggctgcaaagagctgggcctggcctcaggcgggaccacctccccggcattgccatccctgctgcagagctcccatgcgatcagcctcctctccagctgagaccacatcctcactcagcttctaggctgttcctgctccccattcccctcagcacatggcccctgagaaactgcttgcacaagaatttccctctggagccccacctctggggaacctgacctcagacagaggagaccaagctctagggcaggatcctccacctcccttgccccaccggtgtggccagcccagagcgctgcagactcccgcccagacctgcacttgtgcctgccttctgccagcctgctcctcctcctcccactctcacacctgcattaacagcaccaggacgccatcctccaagggccccagcctcatctcccctgtcaccaggatccagccagatctcaatccttgcccatcctaactgaacctccctcagatccgtccactgcccccttccccaggaccacactccaccatctcttgcctggaccctgcgagaacttcctgcctccctgccttccaggtttctccccttcacatgcatgcacccagg

SEQ ID NO: 417759 - DNA, 458 bp, Homo sapiens
aaaagaatcacacatgcctctctcccatcagcactaacatttgttatggataataacactttcaatcacaactatttttggaaaacaggtttatcttaaaccttccctccccccactgaaaatactctcccaaggacacagactcctacaaaccacagcccattaatccaactatggaatgggaacattttcttcccactaacttttttttaagttgtttttaagagttagtgtaaaagcccgaggtacaaggttaaggagcactttaacttaggtgattggcataagagggaggccatgtctctcaagacctcaagcctctgaccctgtatgaagtaagccacaagagaggcccagattttgtttgtttcttgtttttctttttttaatttttgtgtttttttaacacagtctcactctgtcgcccaggctagagtgcagtggcgcgatctcggctc

SEQ ID NO: 417760 - DNA, 322 bp, Homo sapiens
gaaaaaagggaggcagccagtattaatgtacatccaaggaaactgtgccccaggggtcttgtgtgtatttctgagaagaggggtgagaaaaggcactgtgtcaacatttgcttctgcctgaacgtgcacctcccagtgctcctccatcaattaggagaactgtcttgaagaatgctgcctcagcttctgaagagaagaccccaggacatgcattaatgagaggaggggagtcacagctgcagaagaataaagctctctgagggagcctggggcccccagtgaggcctggagcttgttgacagagcagcaggagacccctgct

SEQ ID NO: 417761 - DNA, 472 bp, Homo sapiens
acatcttttacaattaggaagaatcataataagctatcatttttattaatcaagtattggcaattttgtaaggttcaaccccatatactccattgacccattacaggttatccacggaaaacggaacattttggaggtttttaatctcttgagattgatgtaagggcaactgtcccttggtgaagataacttggtgacacaataatcttcactgaatggatcaagggtatgtcatttttcaggttcttgtttgttaccataatgagaggccaggagaactgggttctagctttacccttccgacggtaaatatctggagattgaaacattttaagtcactttggttcttaacttcttttcaatcaaaaaacaaaacaaaacctacccctctgtcagtaaatatctggagattgaaacattttaagtcactttggttcttaactttttttcaatcaaaaaacaaaacagaaca

SEQ ID NO: 417762 - DNA, 389 bp, Homo sapiens
gattagaagaaagggggaaactggtaaaaacgtacatttaatataatcctgaccttctcaatccaaataacagtccaaaaatagccatttttcatccatctcagaatcctattaatatgacagaaatgacttaagaagaaagaataaattcctaatactgtaggaaaataggatagttctgtactagtagatcagaagttttgagaaactcctggaagatagaaagcaagtagaatctgtgatcagggtatccgcagagaaatactacaatccaaagtctgcaggaaagagtacagaaattttaagcatgggcttgcaactacagtatgtgggagtagacagagtgcatcattctgggaaattgataatgtcctgactctaatacaaat

SEQ ID NO: 417763 - DNA, 329 bp, Homo sapiens
aatcaggaacaatacaaggatgtttgctctcaccacaactctttaacattggacaagaggttctagtcataactattaagccaaaaagaaaagatataatatgtatatgattgggaagaaagagtaagactatatctattcccagattatataatttgcatatagaaacttctaaggaattcacttttaaatgtatatgtgtgtgtgtatatatatatatgaaccaataaacaagttcagccaagttgctgatacaagatcagtatacaaaaatcagttgtatttatctgcaccagaaatgaacaacctaaaaaataaaattgagaaag

SEQ ID NO: 417764 - DNA, 432 bp, Homo sapiens
atgtagtcagaatttacacatcaacatttccatataaagtacaataaagcttaagtagagttgagtccatcattaaatgtgttctatggggatctaaacaaagataaataagatgtccataatctagaagacatactttactgcaaaatgtcactgctaatcattaatatgtgatttgcttttctgctcaaagtactatgtatgaatattttagccaaagcctaatcctagcagaatattagcaccttgggaagacagacctcttttaatagctcataagtgaatttaattttttatttttttgagatggagtctcgctctgtcacccaggctgaggcgggagaattgcttgtacctgggaggcggaggttctattgagccgagattggccacggcactctagcctgggcaacagagcaagagtgtctctca

SEQ ID NO: 417765 - DNA, 2947 bp, Homo sapiens
acttttacttttgacgaccaccatgactgagatcactgctgaaggaaatgcatctacaaccacaactgtgatagacagcaaaaatggatctgtgcccaaatcccccggaaaagtgctgaagaggacagtcacagaagacatagtgacgacgttcagctcccctgcagcctggcttctggtcattgccctgataatcacgtggtcagctgttgccatcgttatgtttgatttagtggattacaaaaacttttcagcaagctctattgccaagattggctcagatcctttaaaactggtacgtgatgctatggaggaaaccacggactggatctatggcttcttttctttgttatctgacatcatctcatctgaagatgaagaagatgatgatggtgacgaagatactgataaaggagaaatagatgagcctcccttgagaaaaaaagaaatacacaaagataagactgaaaaacaagagaaacctgaaaggaaaatacaaactaaagttacacacaaagaaaaagaaaaaggaaaagaaaaagtaagagaaaaagaaaaacctgaaaagaaagcaactcacaaggaaaaaattgagaaaaaagaaaaaccagaaacaaagacagtggcgaaagaacagaagaaagctaagactgcagaaaagagtgaagaaaagactaaaaaggaagtgaaaggtggaaaacaggagaaagtgaagcaaacagctgcaaaagtaaaagaagtacagaaaacaccatcaaaacccaaagaaaaggaggacaaagagaaagcagctgtgtcaaagcatgaacagaaagatcagtatgcattctgtcgatatatgattgacatatttgtccatggggatttaaaaccaggacaaagcccagccattccacctcccttaccgacagaacaagcttccagacccactccggcatcacctgcccttgaagaaaaagaaggggaaaagaagaaggctgagaagaaagttacttctgaaacaaaaaagaaagaaaaagaagatatcaaaaagaaaagtgagaaggaaactgccattgatgtggaaaaaaaagagccgggaaaagcttctgaaaccaaacaagggactgtaaaaattgcagcacaagcagcagctaagaaggatgaaaagaaggaagattccaagaaaacaaaaaaacctgcagaagtagaacaacccaagggaaaaaagcaggaaaagaaagaaaaacatgtggaaccagcaaagtcaccaaagaaagaacactcagttccaagtgacaaacaagtaaaagcaaaaactgaacgagccaaagaggagattggtgcggtttcaagtaaaaaagctgtacctggaaagaaggaagagaaaacaaccaagacagtggagcaagaaattagaaaagaaaaatctgggaagacttcttcaattctgaaagataaagaacctattaaagggaaagaagagaaagttccagcttccctaaaggaaaaagaacctgaaactaaaaaagatgaaaagatgtccaaagcaggcaaagaagtcaagcctaaacctccacaactacaaggaaaaaaggaagagaagccagagccccaaattaaaaaagaagcaaaaccagctatatctgaaaaagtgcaaatacacaaacaagacatagtgaaaccagaaaagactgtttctcatggtaaaccagaagaaaaagttctcaagcaggtaaaagctgtcacaatagaaaaaacagccaagcccaaaccaacaaaaaaagctgaacatcgagaaagagaacctccatctataaaaacagacaaaccaaaaccaactccaaaaggaacatcagaagtcacagaatcaggaaagaagaaaactgaaatatctgaaaaagaaagtaaagaaaaagcagacatgaagcatcttagagaagaaaaagtctcaacaagaaaagaaagtcttcaattacacaatgtgacaaaagcagaaaaacctgcaagagtatcaaaagatgttgaagatgtaccagcttcaaagaaagctaaagaaggaactgaagatgtgtctcccacaaagcagaaaagtcccatcagtttcttccagtgtgtctacttggatgggtacaatggctatggatttcagtttcctttcactcctgcagaccgccctggagagagctctggtcaagcaaattctccaggacagaagcaacaaggacagtaaacacacatgtatgacccttacaagtgctttaagattttaaaaatgtgatgttttgtccacagtagttcaggcaattaagaatatgcaacccagagaatttctgtgaaaacattttgctctttggcctggtgtggacggaaagggtggccaaatggattgagtgatgagcagacatgtttaagggtctaagtctcaagaatctgttatgtgtgtttgctgcggtgggagggggtgcttgtatttatcttatttccagtcactataaggttgtacacaaactaatttaaagtttacttaataatggtatctttaaaataattgacacaattgcaaaatgaattcctggcttcagttagctattatttttttaatgacaacatagactgtgctctaagtttaaaagatggggaagcttatataaaagtgacccttttgcatcatatgggtatctaaacttaatttacccaataagttgatgcttaatgattttattttatttttgtctattttctattttagttgtggctttgctctaagaatgggtaatagttgtactacagactgctataaatttcttgtgatactcttttagagctcaaaatatctctgagctttagacatggtaaggtggagagtaaatgcttgataaatctttaagatatgtcttgaatgataattaggacattcagtccagtggaaatacaccattcaattagtcaggtctggtgaatttcc

SEQ ID NO: 417766 - DNA, 3666 bp, Homo sapiens
  misc_feature (29)..(29): n is a, c, g, or t
  misc_feature (43)..(43): n is a, c, g, or t
  misc_feature (126)..(126): n is a, c, g, or t
  misc_feature (149)..(149): n is a, c, g, or t
  misc_feature (175)..(175): n is a, c, g, or t
cttcagatagattatatctggagtgaagnatcctgccacctangtatctggcatagtattctgtgtagtgggatgagcagagaacaaaaacaaaataatccagtgagaaaagcccgtaaataaacnttcagaccagagatctattctcnagcttattttaagctcaacttaaaangaagaactgttctctgattcttttcgccttcaatacacttaatgatttaactccaccctccttcaaaagaaacagcatttcctacttttatactgtctatatgattgatttgcacagctcatctggccagaagagctgagacatccgttcccctacaagaaactctccccgggtggaacaagatggattatcaagtgtcaagtccaatctatgacatcaattattatacatcggagccctgccaaaaaatcaatgtgaagcaaatcgcagcccgcctcctgcctccgctctactcactggtgttcatctttggttttgtgggcaacatgctggtcatcctcatcctgataaactgcaaaaggctgaagagcatgactgacatctacctgctcaacctggccatctctgacctgtttttccttcttactgtccccttctgggctcactatgctgccgcccagtgggactttggaaatacaatgtgtcaactcttgacagggctctattttataggcttcttctctggaatcttcttcatcatcctcctgacaatcgataggtacctggctgtcgtccatgctgtgtttgctttaaaagccaggacggtcacctttggggtggtgacaagtgtgatcacttgggtggtggctgtgtttgcgtctctcccaggaatcatctttaccagatctcaaaaagaaggtcttcattacacctgcagctctcattttccatacagtcagtatcaattctggaagaatttccagacattaaagatagtcatcttggggctggtcctgccgctgcttgtcatggtcatctgctactcgggaatcctaaaaactctgcttcggtgtcgaaatgagaagaagaggcacagggctgtgaggcttatcttcaccatcatgattgtttattttctcttctgggctccctacaacattgtccttctcctgaacaccttccaggaattctttggcctgaataattgcagtagctctaacaggttggaccaagctatgcaggtgacagagactcttgggatgacgcactgctgcatcaaccccatcatctatgcctttgtcggggagaagttcagaaactacctcttagtcttcttccaaaagcacattgccaaacgcttctgcaaatgctgttctattttccagcaagaggctcccgagcgagcaagctcagtttacacccgatccactggggagcaggaaatatctgtgggcttgtgacacggactcaagtgggctggtgacccagtcagagttgtgcacatggcttagttttcatacacagcctgggctgggggtggggtgggagaggtcttttttaaaaggaagttactgttatagagggtctaagattcatccatttatttggcatctgtttaaagtagattagatcttttaagcccatcaattatagaaagccaaatcaaaatatgttgatgaaaaatagcaacctttttatctccccttcacatgcatcaagttattgacaaactctcccttcactccgaaagttccttatgtatatttaaaagaaagcctcagagaattgctgattcttgagtttagtgatctgaacagaaataccaaaattatttcagaaatgtacaactttttacctagtacaaggcaacatataggttgtaaatgtgtttaaaacaggtctttgtcttgctatggggagaaaagacatgaatatgattagtaaagaaatgacacttttcatgtgtgatttcccctccaaggtatggttaataagtttcactgacttagaaccaggcgagagacttgtggcctgggagagctggggaagcttcttaaatgagaaggaatttgagttggatcatctattgctggcaaagacagaagcctcactgcaagcactgcatgggcaagcttggctgtagaaggagacagagctggttgggaagacatggggaggaaggacaaggctagatcatgaagaaccttgacggcattgctccgtctaagtcatgagctgagcagggagatcctggttggtgttgcagaaggtttactctgtggccaaaggagggtcaggaaggatgagcatttagggcaaggagaccaccaacagccctcaggtcagggtgaggatggcctctgctaagctcaaggcgtgaggatgggaaggagggaggtattcgtaaggatgggaaggagggaggtattcgtgcagcatatgaggatgcagagtcagcagaactggggtggatttggtttggaagtgagggtcagagaggagtcagagagaatccctagtcttcaagcagattggagaaacccttgaaaagacatcaagcacagaaggaggaggaggaggtttaggtcaagaagaagatggattggtgtaaaaggatgggtctggtttgcagagcttgaacacagtctcacccagactccaggctgtctttcactgaatgcttctgacttcatagatttccttcccatcccagctgaaatactgaggggtctccaggaggagactagatttatgaatacacgaggtatgaggtctaggaacatacttcagctcacacatgagatctaggtgaggattgattacctagtagtcatttcatgggttgttgggaggattctatgaggcaaccacaggcagcatttagcacatactacacattcaataagcatcaaactcttagttactcattcagggatagcactgagcaaagcattgagcaaaggggtcccatataggtgagggaagcctgaaaaactaagatgctgcctgcccagtgcacacaagtgtaggtatcattttctgcatttaaccgtcaataggcaaaggggggaagggacatattcatttggaaataagctgccttgagccttaaaacccacaaaagtacaatttaccagcctccgtatttcagactgaatgggggtggggggggcgccttaggtacttattccagatgccttctccagacaaaccagaagcaacagaaaaaatcgtctctccctccctttgaaatgaatataccccttagtgtttgggtatattcatttcaaagggagagagagaggtttttttctgttctttctcatatgattgtgcacatacttgagactgttttgaatttgggggatggctaaaaccatcatagtacaggtaaggtgagggaatagtaagtggtgagaactactcagggaatgaaggtgtcagaataataagaggtgctactgactttctcagcctctgaatatgaacggtgagcattgtggctgtcagcaggaagcaacgaagggaaatgtctttccttttgctcttaagttgtggagagtgcaacagtagcataggaccctaccctctgggccaagtcaaagacattctgacatcttagtatttgcatattcttatgtatgtgaaagttacaaattgcttgaaagaaaatatgcatctaataaaaaacaccttctaaaataattcat

SEQ ID NO: 417767 - DNA, 2942 bp, Homo sapiens
  misc_feature (29)..(29): n is a, c, g, or t
  misc_feature (43)..(43): n is a, c, g, or t
  misc_feature (126)..(126): n is a, c, g, or t
  misc_feature (149)..(149): n is a, c, g, or t
  misc_feature (175)..(175): n is a, c, g, or t
cttcagatagattatatctggagtgaagnatcctgccacctangtatctggcatagtattctgtgtagtgggatgagcagagaacaaaaacaaaataatccagtgagaaaagcccgtaaataaacnttcagaccagagatctattctcnagcttattttaagctcaacttaaaangaagaactgttctctgattcttttcgccttcaatacacttaatgatttaactccaccctccttcaaaagaaacagcatttcctacttttatactgtctatatgattgatttgcacagctcatctggccagaagagctgagacatccgttcccctacaagaaactctccccgggtggaacaagatggattatcaagtgtcaagtccaatctatgacatcaattattatacatcggagccctgccaaaaaatcaatgtgaagcaaatcgcagcccgcctcctgcctccgctctactcactggtgttcatctttggttttgtgggcaacatgctggtcatcctcatcctgataaactgcaaaaggctgaagagcatgactgacatctacctgctcaacctggccatctctgacctgtttttccttcttactgtccccttctgggctcactatgctgccgcccagtgggactttggaaatacaatgtgtcaactcttgacagggctctattttataggcttcttctctggaatcttcttcatcatcctcctgacaatcgataggtacctggctgtcgtccatgctgtgtttgctttaaaagccaggacggtcacctttggggtggtgacaagtgtgatcacttgggtggtggctgtgtttgcgtctctcccaggaatcatctttaccagatctcaaaaagaaggtcttcattacacctgcagctctcattttccatacagtcagtatcaattctggaagaatttccagacattaaagatagtcatcttggggctggtcctgccgctgcttgtcatggtcatctgctactcgggaatcctaaaaactctgcttcggtgtcgaaatgagaagaagaggcacagggctgtgaggcttatcttcaccatcatgattgtttattttctcttctgggctccctacaacattgtccttctcctgaacaccttccaggaattctttggcctgaataattgcagtagctctaacaggttggaccaagctatgcaggtgacagagactcttgggatgacgcactgctgcatcaaccccatcatctatgcctttgtcggggagaagttcagaaactacctcttagtcttcttccaaaagcacattgccaaacgcttctgcaaatgctgttctattttccagcaagaggctcccgagcgagcaagctcagtttacacccgatccactggggagcaggaaatatctgtgggcttgtgacacggactcaagtgggctggtgacccagtcagagttgtgcacatggcttagttttcatacacagcctgggctgggggtggggtgggagaggtcttttttaaaaggaagttactgttatagagggtctaagattcatccatttatttggcatctgtttaaagtagattagatcttttaagcccatcaattatagaaagccaaatcaaaatatgttgatgaaaaatagcaacctttttatctccccttcacatgcatcaagttattgacaaactctcccttcactccgaaagttccttatgtatatttaaaagaaagcctcagagaattgctgattcttgagtttagtgatctgaacagaaataccaaaattatttcagaaatgtacaactttttacctagtacaaggcaacatataggttgtaaatgtgtttaaaacaggtctttgtcttgctatggggagaaaagacatgaatatgattagtaaagaaatgacacttttcatgtgtgatttcccctccaaggtatggttaataagtttcactgacttagaaccaggcgagagacttgtggcctgggagagctggggaagcttcttaaatgagaaggaatttgagttggatcatctattgctggcaaagacagaagcctcactgcaagcactgcatgggcaagcttggctgtagaaggagacagagctggttgggaagacatggggaggaaggacaaggctagatcatgaagaaccttgacggcattgctccgtctaagtcatgagctgagcagggagatcctggttggtgttgcagaaggtttactctgtggccaaaggagggtcaggaaggatgagcatttagggcaaggagaccaccaacagccctcaggtcagggtgaggatggcctctgctaagctcaaggcgtgaggatgggaaggagggaggtattcgtaaggatgggaaggagggaggtattcgtgcagcatatgaggatgcagagtcagcagaactggggtggatttggtttggaagtgagggtcagagaggagtcagagagaatccctagtcttcaagcagattggagaaacccttgaaaagacatcaagcacagaaggagagagagagaggtttttttctgttctttctcatatgattgtgcacatacttgagactgttttgaatttgggggatggctaaaaccatcatagtacaggtaaggtgagggaatagtaagtggtgagaactactcagggaatgaaggtgtcagaataataagaggtgctactgactttctcagcctctgaatatgaacggtgagcattgtggctgtcagcaggaagcaacgaagggaaatgtctttccttttgctcttaagttgtggagagtgcaacagtagcataggaccctaccctctgggccaagtcaaagacattctgacatcttagtatttgcatattcttatgtatgtgaaagttacaaattgcttgaaagaaaatatgcatctaataaaaaacaccttctaaaataattcat

SEQ ID NO: 417768 - DNA, 6774 bp, Homo sapiens
ttttctaagtaggccaggaacatttaatatttttcaataaattaatatataaaatatatacattagtgccaaatggaacatatattttgaaatatgaaacccaagtaaaatgctcaggaatctggagtagaatccaggtatctgccaaaggaaactttggacgagttgtcttttgaagaagggaaacaatgctgggtctcttatcttcacggactgtttttgcttgtcaaacttctaacatcacttcagccgagtttcgtatttgacttccaacctcatggccatttgacctgccaactactatttttctttgaggcttttaacaccccacccaagtattttgctttccagattgtgtgcgtttccttttcacttcaccttaaagtcagcctgggtttacaacatcggcttaaggcgcaccctctaaggtttcagacagacccagggcaccgcggtgatgacctgaagctgatatctctcggcaaagccaaggtatccgggaggttctccgcgttgtgccaggatttccatccaacccgagagtctcagggcagaggccaggcccccagcgtccgactcccaggggtcccagccccctcccctggctgaccatgcgggctgggacctcccagccggaaaacaccgccctttcctgtcgcctactccttccccaggccgacgactcgcggaggaggaagagacggaggccgatttaagaaaattagcattcattaacccggttcacgctcgggccccggcggaggggaggggcgcgccgggcggcggcgctggcggtggccgggtgaccggcgggcgcaggtgccaccgcggcctgaattttactctctcgggccggcagctgcgccacttgcgcctcgtcgcgcgtctggggcagccgccaccggcttgccccagctttaggcaaatccttttgaaagaccctgagggagaagaaacgcctccctctgggtaggagaacctgtagcgtctgctgttcgtcgcgtgtccagttgctcagccgggagctccggcatcttcagggcgctcattccactctccgggttttggctgcagctctgaggggagcgagctagaaactgacagaacgcgaccctccccctccgcgcccaccggagcccgggctgagagggacctggggagctgcggcctggccggggcggcgcactcaggtggcctcgcttccctgcgggtcaccgcccgccactcgcacagctaggtcggcctgttgggatcgggagaggtgggcgcacgagttttagtgcgggagtccggggtgcgggcggagtcctattgtccccgtgcacccgggcggcagcacctccgggtccctctttaaaccgagcgtccggcgacctttctttgtgcttagggagtcgaaagcggcatcttctccgagagaagtcgcctactggggggtggcgctggggaggtaacaatgggcgcccattgtcctccgagggtccaacggtgaccccccccgctgcgcacgcgcccggccaccggttggccccgggccagggcacaggtaccgcggccgggagggtcggccccgctgcccgcgccctccgccccgccccagtgagtccccgcgccgccggccccgccccgcgccgccccgccctccgcaggttcagtcctcgcgtccggccgccccgcgctcagtcgcgcgcaccttctctcgcggccgggggaccgcagcgcggggctagcccggagacccggccaccggcctggggcgccttcacgccgtctcggagcggataatgcggtgagcaggcaccacgccggcagactcggctggatctgcgcacagcggcagggattgcgtgcgcccgcgggaggcccggggcagcggctgggatcctcagcggcggccggtttgtcctggttgtggtcaagactggatgatgtaactggctctctaggaagcctcacttggccgtaacctcaggaaggttctctttgaccccatctcatttcgaagccacttctgaagccacttgagaaaaatgatgtgacagttcctatcaaaaaggattcagaaacatataccatctgtgaagaaagtggccctttctcccgcttgcaaaatagacattctcaaattccaaaatgccagccaagaccccaatttacctgaaagcagccaataacaagaaaggaaagaaatttaaactgagggacattctgtctcctgatatgatcagtcccccgcttggagactttcgccacaccatccacattggcaaagagggccagcacgatgtctttggagatatttcctttcttcaagggaactacgagcttttacctggaaaccaggagaaagcacacctgggccagttccctgggcataatgagttcttccgggccaacagcacctcggactctgtgttcacagaaacgccctccccggtgctcaaaaatgccatctccctcccgaccattggaggatcccaagctctcatgttgcccttattgtcaccagtgacatttaattccaaacaggagtccttcgggccagcaaagctgcccaggcttagctgcgagcccgtcatggaggaaaaagctcaggagaaaagcagtctgttggagaatgggacagtccaccagggagacacctcgtggggctccagcggttctgcatctcagtccagccaaggcagagacagccactcctccagcctgtccgaacagtaccccgactggccagccgaggacatgtttgaccatcccaccccatgcgagctcatcaagggaaagactaagtcagaggagtccctctctgaccttacaggttccctcctctccctgcagcttgatcttgggccctcacttttggatgaggtgctgaatgtaatggataaaaataagtaacaagatgccaacttttttcctttggggtaaaaggtacaaaaacaaactaaccacagttgaagagaagggcttccggagctgtatttgcagttttgtgttgggttttctaaaataatattcttacaaagtatttttttacctgttatgccctgtttgcaaaaacaatttagaaaaaaacaacaaagcaaaacctatcttggcaaaaaaaggaagtgagtcagagcccattttcaggaggcattggtgatgttcggctcacatattgtttgcagacacacaagaaatctggcttggccaggattggcactagctatgaagggctgagcgagtcacattaaggaacttcacggaactttatagcactccgacattttctgagcaagaggaagtcaaaatttatttaacacctaagcctttttgtagactcttttctatatattgcttaggctcaccatagcgaattctccagtgttaaaacttttctgttttcacatttgaactttatgggttttggggattttcttgtagttcttatatatccctatatattatatctatattgcaaaattttgactgtcagctacatgttggtaagacacaggcaaagtattactgtaactaagttatttttaaagttaaaatatatttttacgtgcctttggctttttattgcagagtctacattttatagattctacatcagatgttgtcacttatttccattgggattccattgtaagctgtgtatgtgcgtgtttggaaaagtgtattcatacttagtttttttttcttcatctgttatcatacttttaacagcaaccaataacggattgtaaagtgtaaaggcacaggttactcatgatgcttctgcagagactgtgggctacaccacatatgttatttggaaatataggtattttagtacagtacatacttgcattacataggtacttcaagcaacacaataaaaagtaaatgataaagtgaacttgcttgtttatagtaataaacaagaccataagagaataagtatagctagagaaattgcttctctgaaatgtacatgagcccttaaggtaagagatgatttccatctactctcattttgattacttccttatggtttgagaggctagaaactgagcctctctacttttggaaaaatgaacatgtgaggtcagatttttttttttttttttaagtcagcactgatgccaccctctcaggggtcatttctgagcatcttcctgacttgaacaccttctacagcaaactcttgcaagtccagtttcatccctgtaaggcaaatgtcttttcacgcagaaagtgccatatagacgagataaaggcagctaaaacgagggcagtagagagcacttacccgaccccaaggtgccagagatgccctgaggatggtggttaaggaaacaggagcaggaaatgtacacacagattcctgtccctttgccaactactccttccccatcaaagaaaaacacttgcacacagtaactaccagctccttctctcaaacttgtatttctcctggaaatgtatctcagaaatgacctcctctcccaaccacttcaacgattctttctttgggtttggggttcttgcagttctatcatctaaaataacctttggactgcaggtaaaatgcaattaggacaactaaccaagtagacgaaacaagttcccctaggcaggggtgtccaatattttagcttccctggaccgcattggaagaattttcttgggccacatgtaaaacacactaacactaaccatagttgatgagcttaaaaaaataaaaatagaaaattgcaaaaaaaaaaaaaaaaaatctcagactgttttaagaaagtttaaaaatttgtgttggacttcatgcgggccacaggttggacaagcttgccctagggcattgtgtgctttccgtaacttctcagttgtatttcgttatccatgactctccagtgttttttctgttggaccacacccgtcacagttcacagttccaaacagaaatttcccagcctattctaaatcttgttaatgacgaagagtccaatgtatctcattatttgtagccaattttagactcttttcaatacctcccccccattttaattagtattgatcatattcagtctttcattttactcttcatctgtagcgtgacctcaaggtaaagatgaaactatttcatgaaaaggggaggagtatggctgtgcattagctctactccctctctggtaagtactggggagagaacagccctgccagtactgggtttgatagattctaaatattaatcacacatcctgcctacagttagccattttagtttctgggagttctttcatgtacattttcttccattaattgaattaggtataattgagatggcaataaatatgcccgtattagaaagaggaaacaaagctacatgcggcttatgattttgttgagtcacttctcccgaggcagcctttccaatgcctggtcccttcccctgagagcaggtggactgctggtggtggctttctttcctgcagagaggcactttagacccatacctgctgtgagctgaattgatgttctcatcctgtgaaccttctcccactttaacctaatttatctttacttgtttaaagataaggaaacccaagatgtactttatttgcaaactcaaagcaaatggcgagccacctgtgacccagtaaccagaaaagaaaccatgccatttgtgtaagtagagacacttcttgttgaggtaggcaaggctcttgtgagcgatttttttcccctagtgagacctaacaaaagacaagctatatcatttctgcctgaaattatctgcttgaaaagatcaaaatatcaggatacttagctcttcacaaatatgaagtcattatcacatttcactgagccagaaatcactgttaacagcacacacaaaagactacactggttgaacagcaaagagaaacccgggtctccagaatcacagtttagtccttctatattactgcaagtgacctgttttttctgaaggctccccgcaaatgaagtcctggaatggaaaaaatccataagtccataaattaacttgataaatattttagaacagacaaaagaaaatattgagtgatgtagttctaatcctcctaatatggaacctggcaagactgaatcattttactgtgaaatatataaacacaatagaatgagccaacatgatggtttctctccagtaagagtttttcttttggaaatgaggttaacctagccccaaatctagcaattctcataaaatccgattttagaattagcctcccagattaatctgaatgattgacttattttttcttaggcaagtcagtaagccacccactagacagccatatccagcaaaataagagaagtttccagatgccaaatgataagccaccatcaacccagcggggaagccttctggttggtttggctgtatgagattcaggaaggccagaatacccaaaattattcacacgacgttaacttattggtactggctaagcaatacatgtatttcctaaaggaggagatggtcttttggttgatttatggacacacttgtttcatctgactgtaaatatattgcatgctttattctgatggtgcactatttcatccagcaagcttttcatctgagaatgtttaatgttgaccttattcttagagcaagtagatctaaatatttttcagctgagttattagggagtcattattctgtggtacaatgctgcaaaaagcatcatgtggaagaatgggaactatgcttactttatgaagtgatgtataacacaatgaaatctgttttacaactac

SEQ ID NO: 417769 - DNA, 4727 bp, Homo sapiens
ttttctaagtaggccaggaacatttaatatttttcaataaattaatatataaaatatatacattagtgccaaatggaacatatattttgaaatatgaaacccaagtaaaatgctcaggaatctggagtagaatccaggtatctgccaaaggaaactttggacgagttgtcttttgaagaagggaaacaatgctgggtctcttatcttcacggactgtttttgcttgtcaaacttctaacatcacttcagccgagtttcgtatttgacttccaacctcatggccatttgacctgccaactactatttttctttgaggcttttaacaccccacccaagtattttgctttccagattgtgtgcgtttccttttcacttcaccttaaagtcagcctgggtttacaacatcggcttaaggcgcaccctctaaggtttcagacagacccagggcaccgcggtgatgacctgaagctgatatctctcggcaaagccaaggtatccgggaggttctccgcgttgtgccaggatttccatccaacccgagagtctcagggcagaggccaggcccccagcgtccgactcccaggggtcccagccccctcccctggctgaccatgcgggctgggacctcccagccggaaaacaccgccctttcctgtcgcctactccttccccaggccgacgactcgcggaggaggaagagacggaggccgatttaagaaaattagcattcattaacccggttcacgctcgggccccggcggaggggaggggcgcgccgggcggcggcgctggcggtggccgggtgaccggcgggcgcaggtgccaccgcggcctgaattttactctctcgggccggcagctgcgccacttgcgcctcgtcgcgcgtctggggcagccgccaccggcttgccccagctttaggcaaatccttttgaaagaccctgagggagaagaaacgcctccctctgggtaggagaacctgtagcgtctgctgttcgtcgcgtgtccagttgctcagccgggagctccggcatcttcagggcgctcattccactctccgggttttggctgcagctctgaggggagcgagctagaaactgacagaacgcgaccctccccctccgcgcccaccggagcccgggctgagagggacctggggagctgcggcctggccggggcggcgcactcaggtggcctcgcttccctgcgggtcaccgcccgccactcgcacagctaggtcggcctgttgggatcgggagaggtgggcgcacgagttttagtgcgggagtccggggtgcgggcggagtcctattgtccccgtgcacccgggcggcagcacctccgggtccctctttaaaccgagcgtccggcgacctttctttgtgcttagggagtcgaaagcggcatcttctccgagagaagtcgcctactggggggtggcgctggggaggtaacaatgggcgcccattgtcctccgagggtccaacggtgaccccccccgctgcgcacgcgcccggccaccggttggccccgggccagggcacaggtaccgcggccgggagggtcggccccgctgcccgcgccctccgccccgccccagtgagtccccgcgccgccggccccgccccgcgccgccccgccctccgcaggttcagtcctcgcgtccggccgccccgcgctcagtcgcgcgcaccttctctcgcggccgggggaccgcagcgcggggctagcccggagacccggccaccggcctggggcgccttcacgccgtctcggagcggataatgcggtgagcaggcaccacgccggcagactcggctggatctgcgcacagcggcagggattgcgtgcgcccgcgggaggcccggggcagcggctgggatcctcagcggcggccggtttgtcctggttgtggtcaagactggatgatgtaactggctctctaggaagcctcacttggccgtaacctcaggaaggttctctttgaccccatctcatttcgaagccacttctgaagccacttgagaaaaatgatgtgacagttcctatcaaaaaggattcagaaacatataccatctgtgaagaaagtggccctttctcccgcttgcaaaatagacattctcaaattccaaaatgccagccaagaccccaatttacctgaaagcagccaataacaagaaaggaaagaaatttaaactgagggacattctgtctcctgatatgatcagtcccccgcttggagactttcgccacaccatccacattggcaaagagggccagcacgatgtctttggagatatttcctttcttcaagggaactacgagcttttacctggaaaccaggagaaagcacacctgggccagttccctgggcataatgagttcttccgggccaacagcacctcggactctgtgttcacagaaacgccctccccggtgctcaaaaatgccatctccctcccgaccattggaggatcccaagctctcatgttgcccttattgtcaccagtgacatttaattccaaacaggagtccttcgggccagcaaagctgcccaggcttagctgcgagcccgtcatggaggaaaaagctcaggagaaaagcagtctgttggagaatgggacagtccaccagggagacacctcgtggggctccagcggttctgcatctcagtccagccaaggcagagacagccactcctccagcctgtccgaacagtaccccgactggccagccgaggacatgtttgaccatcccaccccatgcgagctcatcaagggaaagactaagtcagaggagtccctctctgaccttacaggttccctcctctccctgcagcttgatcttgggccctcacttttggatgaggtgctgaatgtaatggataaaaataagtaacaagatgccaacttttttcctttggggtaaaaggtacaaaaacaaactaaccacagttgaagagaagggcttccggagctgtatttgcagttttgtgttgggttttctaaaataatattcttacaaagtatttttttacctgttatgccctgtttgcaaaaacaatttagaaaaaaacaacaaagcaaaacctatcttggcaaaaaaaggaagtgagtcagagcccattttcaggaggcattggtgatgttcggctcacatattgtttgcagacacacaagaaatctggcttggccaggattggcactagctatgaagggctgagcgagtcacattaaggaacttcacggaactttatagcactccgacattttctgagcaagaggaagtcaaaatttatttaacacctaagcctttttgtagactcttttctatatattgcttaggctcaccatagcgaattctccagtgttaaaacttttctgttttcacatttgaactttatgggttttggggattttcttgtagttcttatatatccctatatattatatctatattgcaaaattttgactgtcagctacatgttggtaagacacaggcaaagtattactgtaactaagttatttttaaagttaaaatatatttttacgtgcctttggctttttattgcagagtctacattttatagattctacatcagatgttgtcacttatttccattgggattccattgtaagctgtgtatgtgcgtgtttggaaaagtgtattcatacttagtttttttttcttcatctgttatcatacttttaacagcaaccaataacggattgtaaagtgtaaaggcacaggttactcatgatgcttctgcagagactgtgggctacaccacatatgttatttggaaatataggtattttagtacagtacatacttgcattacataggtacttcaagcaacacaataaaaagtaaatgataaagtgaacttgcttgtttatagtaataaacaagaccataagagaataagtatagctagagaaattgcttctctgaaatgtacatgagcccttaaggtaagagatgatttccatctactctcattttgattacttccttatggtttgagaggctagaaactgagcctctctacttttggaaaaatgaacatgtgaggtcagatttttttttttttttttaagtcagcactgatgccaccctctcaggggtcatttctgagcatcttcctgacttgaacaccttctacagcaaactcttgcaagtccagtttcatccctgtaaggcaaatgtcttttcacgcagaaagtgccatatagacgagataaaggcagctaaaacgagggcagtagagagcacttacccgaccccaaggtgccagagatgccctgaggatggtggttaaggaaacaggagcaggaaatgtacacacagattcctgtccctttgccaactactccttccccatcaaagaaaaacacttgcacacagtaactaccagctccttctctcaaacttgtatttctcctggaaatgtatctcagaaatgacctcctctcccaaccacttcaacgattctttctttgggtttggggttcttgcagttctatcatctaaaataacctttggactgcaggtaaaatgcaattaggacaactaaccaagtagacgaaacaagttcccctaggcaggggtgtccaatattttagcttccctggaccgcattggaagaattttcttgggccacatgtaaaacacactaacactaaccatagttgatgagcttaaaaaaataaaaatagaaaattgca

SEQ ID NO: 417770 - DNA, 4605 bp, Homo sapiens
ttttctaagtaggccaggaacatttaatatttttcaataaattaatatataaaatatatacattagtgccaaatggaacatatattttgaaatatgaaacccaagtaaaatgctcaggaatctggagtagaatccaggtatctgccaaaggaaactttggacgagttgtcttttgaagaagggaaacaatgctgggtctcttatcttcacggactgtttttgcttgtcaaacttctaacatcacttcagccgagtttcgtatttgacttccaacctcatggccatttgacctgccaactactatttttctttgaggcttttaacaccccacccaagtattttgctttccagattgtgtgcgtttccttttcacttcaccttaaagtcagcctgggtttacaacatcggcttaaggcgcaccctctaaggtttcagacagacccagggcaccgcggtgatgacctgaagctgatatctctcggcaaagccaaggtatccgggaggttctccgcgttgtgccaggatttccatccaacccgagagtctcagggcagaggccaggcccccagcgtccgactcccaggggtcccagccccctcccctggctgaccatgcgggctgggacctcccagccggaaaacaccgccctttcctgtcgcctactccttccccaggccgacgactcgcggaggaggaagagacggaggccgatttaagaaaattagcattcattaacccggttcacgctcgggccccggcggaggggaggggcgcgccgggcggcggcgctggcggtggccgggtgaccggcgggcgcaggtgccaccgcggcctgaattttactctctcgggccggcagctgcgccacttgcgcctcgtcgcgcgtctggggcagccgccaccggcttgccccagctttaggcaaatccttttgaaagaccctgagggagaagaaacgcctccctctgggtaggagaacctgtagcgtctgctgttcgtcgcgtgtccagttgctcagccgggagctccggcatcttcagggcgctcattccactctccgggttttggctgcagctctgaggggagcgagctagaaactgacagaacgcgaccctccccctccgcgcccaccggagcccgggctgagagggacctggggagctgcggcctggccggggcggcgcactcaggtggcctcgcttccctgcgggtcaccgcccgccactcgcacagctaggtcggcctgttgggatcgggagaggtgggcgcacgagttttagtgcgggagtccggggtgcgggcggagtcctattgtccccgtgcacccgggcggcagcacctccgggtccctctttaaaccgagcgtccggcgacctttctttgtgcttagggagtcgaaagcggcatcttctccgagagaagtcgcctactggggggtggcgctggggaggtaacaatgggcgcccattgtcctccgagggtccaacggtgaccccccccgctgcgcacgcgcccggccaccggttggccccgggccagggcacaggtaccgcggccgggagggtcggccccgctgcccgcgccctccgccccgccccagtgagtccccgcgccgccggccccgccccgcgccgccccgccctccgcaggttcagtcctcgcgtccggccgccccgcgctcagtcgcgcgcaccttctctcgcggccgggggaccgcagcgcggggctagcccggagacccggccaccggcctggggcgccttcacgccgtctcggagcggataatgcggtgagcaggcaccacgccggcagactcggctggatctgcgcacagcggcagggattgcgtgcgcccgcgggaggcccggggcagcggctgggatcctcagcggcggccggtttgtcctggttgtggtcaagactggatgatgtaactggctctctaggaagcctcacttggccgtaacctcaggaaggttctctttgaccccatctcatttcgaagccacttctgaagccacttgagaaaaatgatgtgacagttcctatcaaaaaggattcagaaacatataccatctgtgaagaaagtggccctttctcccgcttgcaaaatagacattctcaaattccaaaatgccagccaagaccccaatttacctgaaagcagccaataacaagaaaggaaagaaatttaaactgagggacattctgtctcctgatatgatcagtcccccgcttggagactttcgccacaccatccacattggcaaagagggccagcacgatgtctttggagatatttcctttcttcaagggaactacgagcttttacctggaaaccaggagaaagcacacctgggccagttccctgggcataatgagttcttccgggccaacagcacctcggactctgtgttcacagaaacgccctccccggtgctcaaaaatgccatctccctcccgaccattggaggatcccaagctctcatgttgcccttattgtcaccagtgacatttaattccaaacaggagtccttcgggccagcaaagctgcccaggcttagctgcgagcccgtcatggaggaaaaagctcaggagaaaagcagtctgttggagaatgggacagtccaccagggagacacctcgtggggctccagcggttctgcatctcagtccagccaaggcagagacagccactcctccagcctgtccgaacagtaccccgactggccagccgaggacatgtttgaccatcccaccccatgcgagctcatcaagggaaagactaagtcagaggagtccctctctgaccttacaggttccctcctctccctgcagcttgatcttgggccctcacttttggatgaggtgctgaatgtaatggataaaaataagtaacaagatgccaacttttttcctttggggtaaaaggtacaaaaacaaactaaccacagttgaagagaagggcttccggagctgtatttgcagttttgtgttgggttttctaaaataatattcttacaaagtatttttttacctgttatgccctgtttgcaaaaacaatttagaaaaaaacaacaaagcaaaacctatcttggcaaaaaaaggaagtgagtcagagcccattttcaggaggcattggtgatgttcggctcacatattgtttgcagacacacaagaaatctggcttggccaggattggcactagctatgaagggctgagcgagtcacattaaggaacttcacggaactttatagcactccgacattttctgagcaagaggaagtcaaaatttatttaacacctaagcctttttgtagactcttttctatatattgcttaggctcaccatagcgaattctccagtgttaaaacttttctgttttcacatttgaactttatgggttttggggattttcttgtagttcttatatatccctatatattatatctatattgcaaaattttgactgtcagctacatgttggtaagacacaggcaaagtattactgtaactaagttatttttaaagttaaaatatatttttacgtgcctttggctttttattgcagagtctacattttatagattctacatcagatgttgtcacttatttccattgggattccattgtaagctgtgtatgtgcgtgtttggaaaagtgtattcatacttagtttttttttcttcatctgttatcatacttttaacagcaaccaataacggattgtaaagtgtaaaggcacaggttactcatgatgcttctgcagagactgtgggctacaccacatatgttatttggaaatataggtattttagtacagtacatacttgcattacataggtacttcaagcaacacaataaaaagtaaatgataaagtgaacttgcttgtttatagtaataaacaagaccataagagaataagtatagctagagaaattgcttctctgaaatgtacatgagcccttaaggtaagagatgatttccatctactctcattttgattacttccttatggtttgagaggctagaaactgagcctctctacttttggaaaaatgaacatgtgaggtcagacttaatactttaatatattgaaaagtaagcattgatgtcaacccatctcaagagagtcaaatcatgaagatcttccatgactttgaacaacattctaaaagaaacattttgtaaagtaagaaaaaaccggtgaagcaaaggtatatacacaaaaagtgcataagaaacagaaaaaaggaagaaacacacagatagagacacagagaataactgactccaagaggtacgaaagagacaagagaatgatcggaaagaaccaaggagcaggatccaggaagaccagcagacagtggaccaagagatagaacagaacgtctagagagaagagatagagataagaagaagaagaataagagagtcagaaaggtgagatccgtagggtgacaagtacagctctaaagcagagagccaaagggaagtcaagataataccaaaaagagtaggaggagaaagacacagcgagtagagataaatagcagatagtaaaagagacgaactgatattcgcgtgctctatcaatagggg

SEQ ID NO: 417771 - DNA, 6092 bp, Homo sapiens
ttttctaagtaggccaggaacatttaatatttttcaataaattaatatataaaatatatacattagtgccaaatggaacatatattttgaaatatgaaacccaagtaaaatgctcaggaatctggagtagaatccaggtatctgccaaaggaaactttggacgagttgtcttttgaagaagggaaacaatgctgggtctcttatcttcacggactgtttttgcttgtcaaacttctaacatcacttcagccgagtttcgtatttgacttccaacctcatggccatttgacctgccaactactatttttctttgaggcttttaacaccccacccaagtattttgctttccagattgtgtgcgtttccttttcacttcaccttaaagtcagcctgggtttacaacatcggcttaaggcgcaccctctaaggtttcagacagacccagggcaccgcggtgatgacctgaagctgatatctctcggcaaagccaaggtatccgggaggttctccgcgttgtgccaggatttccatccaacccgagagtctcagggcagaggccaggcccccagcgtccgactcccaggggtcccagccccctcccctggctgaccatgcgggctgggacctcccagccggaaaacaccgccctttcctgtcgcctactccttccccaggccgacgactcgcggaggaggaagagacggaggccgatttaagaaaattagcattcattaacccggttcacgctcgggccccggcggaggggaggggcgcgccgggcggcggcgctggcggtggccgggtgaccggcgggcgcaggtgccaccgcggcctgaattttactctctcgggccggcagctgcgccacttgcgcctcgtcgcgcgtctggggcagccgccaccggcttgccccagctttaggcaaatccttttgaaagaccctgagggagaagaaacgcctccctctgggtaggagaacctgtagcgtctgctgttcgtcgcgtgtccagttgctcagccgggagctccggcatcttcagggcgctcattccactctccgggttttggctgcagctctgaggggagcgagctagaaactgacagaacgcgaccctccccctccgcgcccaccggagcccgggctgagagggacctggggagctgcggcctggccggggcggcgcactcaggtggcctcgcttccctgcgggtcaccgcccgccactcgcacagctaggtcggcctgttgggatcgggagaggtgggcgcacgagttttagtgcgggagtccggggtgcgggcggagtcctattgtccccgtgcacccgggcggcagcacctccgggtccctctttaaaccgagcgtccggcgacctttctttgtgcttagggagtcgaaagcggcatcttctccgagagaagtcgcctactggggggtggcgctggggaggtaacaatgggcgcccattgtcctccgagggtccaacggtgaccccccccgctgcgcacgcgcccggccaccggttggccccgggccagggcacaggtaccgcggccgggagggtcggccccgctgcccgcgccctccgccccgccccagtgagtccccgcgccgccggccccgccccgcgccgccccgccctccgcaggttcagtcctcgcgtccggccgccccgcgctcagtcgcgcgcaccttctctcgcggccgggggaccgcagcgcggggctagcccggagacccggccaccggcctggggcgccttcacgccgtctcggagcggataatgcggtgagcaggcaccacgccggcagactcggctggatctgcgcacagcggcagggattgcgtgcgcccgcgggaggcccggggcagcggctgggatcctcagcggcggccggtttgtcctggttgtggtcaagactggatgatgtaactggctctctaggaagcctcacttggccgtaacctcaggaaggttctctttgaccccatctcatttcgaagccacttctgaagccacttgagaaaaatgatgtgacagttcctatcaaaaaggattcagaaacatataccatctgtgaagaaagtggccctttctcccgcttgcaaaatagacattctcaaattccaaaatgccagccaagaccccaatttacctgaaagcagccaataacaagaaaggaaagaaatttaaactgagggacattctgtctcctgatatgatcagtcccccgcttggagactttcgccacaccatccacattggcaaagagggccagcacgatgtctttggagatatttcctttcttcaagggaactacgagcttttacctggaaaccaggagaaagcacacctgggccagttccctgggcataatgagttcttccgggccaacagcacctcggactctgtgttcacagaaacgccctccccggtgctcaaaaatgccatctccctcccgaccattggaggatcccaagctctcatgttgcccttattgtcaccagtgacatttaattccaaactatgaagggctgagcgagtcacattaaggaacttcacggaactttatagcactccgacattttctgagcaagaggaagtcaaaatttatttaacacctaagcctttttgtagactcttttctatatattgcttaggctcaccatagcgaattctccagtgttaaaacttttctgttttcacatttgaactttatgggttttggggattttcttgtagttcttatatatccctatatattatatctatattgcaaaattttgactgtcagctacatgttggtaagacacaggcaaagtattactgtaactaagttatttttaaagttaaaatatatttttacgtgcctttggctttttattgcagagtctacattttatagattctacatcagatgttgtcacttatttccattgggattccattgtaagctgtgtatgtgcgtgtttggaaaagtgtattcatacttagtttttttttcttcatctgttatcatacttttaacagcaaccaataacggattgtaaagtgtaaaggcacaggttactcatgatgcttctgcagagactgtgggctacaccacatatgttatttggaaatataggtattttagtacagtacatacttgcattacataggtacttcaagcaacacaataaaaagtaaatgataaagtgaacttgcttgtttatagtaataaacaagaccataagagaataagtatagctagagaaattgcttctctgaaatgtacatgagcccttaaggtaagagatgatttccatctactctcattttgattacttccttatggtttgagaggctagaaactgagcctctctacttttggaaaaatgaacatgtgaggtcagatttttttttttttttttaagtcagcactgatgccaccctctcaggggtcatttctgagcatcttcctgacttgaacaccttctacagcaaactcttgcaagtccagtttcatccctgtaaggcaaatgtcttttcacgcagaaagtgccatatagacgagataaaggcagctaaaacgagggcagtagagagcacttacccgaccccaaggtgccagagatgccctgaggatggtggttaaggaaacaggagcaggaaatgtacacacagattcctgtccctttgccaactactccttccccatcaaagaaaaacacttgcacacagtaactaccagctccttctctcaaacttgtatttctcctggaaatgtatctcagaaatgacctcctctcccaaccacttcaacgattctttctttgggtttggggttcttgcagttctatcatctaaaataacctttggactgcaggtaaaatgcaattaggacaactaaccaagtagacgaaacaagttcccctaggcaggggtgtccaatattttagcttccctggaccgcattggaagaattttcttgggccacatgtaaaacacactaacactaaccatagttgatgagcttaaaaaaataaaaatagaaaattgcaaaaaaaaaaaaaaaaaatctcagactgttttaagaaagtttaaaaatttgtgttggacttcatgcgggccacaggttggacaagcttgccctagggcattgtgtgctttccgtaacttctcagttgtatttcgttatccatgactctccagtgttttttctgttggaccacacccgtcacagttcacagttccaaacagaaatttcccagcctattctaaatcttgttaatgacgaagagtccaatgtatctcattatttgtagccaattttagactcttttcaatacctcccccccattttaattagtattgatcatattcagtctttcattttactcttcatctgtagcgtgacctcaaggtaaagatgaaactatttcatgaaaaggggaggagtatggctgtgcattagctctactccctctctggtaagtactggggagagaacagccctgccagtactgggtttgatagattctaaatattaatcacacatcctgcctacagttagccattttagtttctgggagttctttcatgtacattttcttccattaattgaattaggtataattgagatggcaataaatatgcccgtattagaaagaggaaacaaagctacatgcggcttatgattttgttgagtcacttctcccgaggcagcctttccaatgcctggtcccttcccctgagagcaggtggactgctggtggtggctttctttcctgcagagaggcactttagacccatacctgctgtgagctgaattgatgttctcatcctgtgaaccttctcccactttaacctaatttatctttacttgtttaaagataaggaaacccaagatgtactttatttgcaaactcaaagcaaatggcgagccacctgtgacccagtaaccagaaaagaaaccatgccatttgtgtaagtagagacacttcttgttgaggtaggcaaggctcttgtgagcgatttttttcccctagtgagacctaacaaaagacaagctatatcatttctgcctgaaattatctgcttgaaaagatcaaaatatcaggatacttagctcttcacaaatatgaagtcattatcacatttcactgagccagaaatcactgttaacagcacacacaaaagactacactggttgaacagcaaagagaaacccgggtctccagaatcacagtttagtccttctatattactgcaagtgacctgttttttctgaaggctccccgcaaatgaagtcctggaatggaaaaaatccataagtccataaattaacttgataaatattttagaacagacaaaagaaaatattgagtgatgtagttctaatcctcctaatatggaacctggcaagactgaatcattttactgtgaaatatataaacacaatagaatgagccaacatgatggtttctctccagtaagagtttttcttttggaaatgaggttaacctagccccaaatctagcaattctcataaaatccgattttagaattagcctcccagattaatctgaatgattgacttattttttcttaggcaagtcagtaagccacccactagacagccatatccagcaaaataagagaagtttccagatgccaaatgataagccaccatcaacccagcggggaagccttctggttggtttggctgtatgagattcaggaaggccagaatacccaaaattattcacacgacgttaacttattggtactggctaagcaatacatgtatttcctaaaggaggagatggtcttttggttgatttatggacacacttgtttcatctgactgtaaatatattgcatgctttattctgatggtgcactatttcatccagcaagcttttcatctgagaatgtttaatgttgaccttattcttagagcaagtagatctaaatatttttcagctgagttattagggagtcattattctgtggtacaatgctgcaaaaagcatcatgtggaagaatgggaactatgcttactttatgaagtgatgtataacacaatgaaatctgttttacaactac

SEQ ID NO: 417772 - DNA, 445 bp, Homo sapiens
ctgtatgagattcaggaaggccagaatacccaaaattattcacacgacgttaacttattggtactggctaagcaatacatgtatttcctaaaggaggagatggtcttttggttgatttatggacacacttgtttcatctgactgtaaatatattgcatgctttattctgatggtgcactatttcatccagcaagcttttcatctgagaatgtttaatgttgaccttattcttagagcaagtagatctaaatatttttcagctgagttattagggagtcattattctgtggtacaatgctgcaaaaagcatcatgtggaagaatgggaactatgcttactttatgaagtgatgtataacacaatgaaatctgttttacaactactgtgctgcatttaattatcttccatttttgctgttaaaaaaaaaaaatccgttaatgatgtc

SEQ ID NO: 417773 - DNA, 3879 bp, Homo sapiens
ttttctaagtaggccaggaacatttaatatttttcaataaattaatatataaaatatatacattagtgccaaatggaacatatattttgaaatatgaaacccaagtaaaatgctcaggaatctggagtagaatccaggtatctgccaaaggaaactttggacgagttgtcttttgaagaagggaaacaatgctgggtctcttatcttcacggactgtttttgcttgtcaaacttctaacatcacttcagccgagtttcgtatttgacttccaacctcatggccatttgacctgccaactactatttttctttgaggcttttaacaccccacccaagtattttgctttccagattgtgtgcgtttccttttcacttcaccttaaagtcagcctgggtttacaacatcggcttaaggcgcaccctctaaggtttcagacagacccagggcaccgcggtgatgacctgaagctgatatctctcggcaaagccaaggtatccgggaggttctccgcgttgtgccaggatttccatccaacccgagagtctcagggcagaggccaggcccccagcgtccgactcccaggggtcccagccccctcccctggctgaccatgcgggctgggacctcccagccggaaaacaccgccctttcctgtcgcctactccttccccaggccgacgactcgcggaggaggaagagacggaggccgatttaagaaaattagcattcattaacccggttcacgctcgggccccggcggaggggaggggcgcgccgggcggcggcgctggcggtggccgggtgaccggcgggcgcaggtgccaccgcggcctgaattttactctctcgggccggcagctgcgccacttgcgcctcgtcgcgcgtctggggcagccgccaccggcttgccccagctttaggcaaatccttttgaaagaccctgagggagaagaaacgcctccctctgggtaggagaacctgtagcgtctgctgttcgtcgcgtgtccagttgctcagccgggagctccggcatcttcagggcgctcattccactctccgggttttggctgcagctctgaggggagcgagctagaaactgacagaacgcgaccctccccctccgcgcccaccggagcccgggctgagagggacctggggagctgcggcctggccggggcggcgcactcaggtggcctcgcttccctgcgggtcaccgcccgccactcgcacagctaggtcggcctgttgggatcgggagaggtgggcgcacgagttttagtgcgggagtccggggtgcgggcggagtcctattgtccccgtgcacccgggcggcagcacctccgggtccctctttaaaccgagcgtccggcgacctttctttgtgcttagggagtcgaaagcggcatcttctccgagagaagtcgcctactggggggtggcgctggggaggtaacaatgggcgcccattgtcctccgagggtccaacggtgaccccccccgctgcgcacgcgcccggccaccggttggccccgggccagggcacaggtaccgcggccgggagggtcggccccgctgcccgcgccctccgccccgccccagtgagtccccgcgccgccggccccgccccgcgccgccccgccctccgcaggttcagtcctcgcgtccggccgccccgcgctcagtcgcgcgcaccttctctcgcggccgggggaccgcagcgcggggctagcccggagacccggccaccggcctggggcgccttcacgccgtctcggagcggataatgcggtgagcaggcaccacgccggcagactcggctggatctgcgcacagcggcagggattgcgtgcgcccgcgggaggcccggggcagcggctgggatcctcagcggcggccggtttgtcctggttgtggtcaagactggatgatgtaactggctctctaggaagcctcacttggccgtaacctcaggaaggttctctttgaccccatctcatttcgaagccacttctgaagccacttgagaaaaatgatgtgacagttcctatcaaaaaggattcagaaacatataccatctgtgaagaaagtggccctttctcccgcttgcaaaatagacattctcaaattccaaaatgccagccaagaccccaatttacctgaaagcagccaataacaagaaaggaaagaaatttaaactgagggacattctgtctcctgatatgatcagtcccccgcttggagactttcgccacaccatccacattggcaaagagggccagcacgatgtctttggagatatttcctttcttcaagggaactacgagcttttacctggaaaccaggagaaagcacacctgggccagttccctgggcataatgagttcttccgggccaacagcacctcggactctgtgttcacagaaacgccctccccggtgctcaaaaatgccatctccctcccgaccattggaggatcccaagctctcatgttgcccttattgtcaccagtgacatttaattccaaacaggagtccttcgggccagcaaagctgcccaggcttagctgcgagcccgtcatggaggaaaaagctcaggagaaaagcagtctgttggagaatgggacagtccaccagggagacacctcgtggggctccagcggttctgcatctcagtccagccaaggcagagacagccactcctccagcctgtccgaacagtaccccgactggccagccgaggacatgtttgaccatcccaccccatgcgagctcatcaagggaaagactaagtcagaggagtccctctctgaccttacaggttccctcctctccctgcagcttgatcttgggccctcacttttggatgaggtgctgaatgtaatggataaaaataagtaacaagatgccaacttttttcctttggggtaaaaggtacaaaaacaaactaaccacagttgaagagaagggcttccggagctgtatttgcagttttgtgttgggttttctaaaataatattcttacaaagtatttttttacctgttatgccctgtttgcaaaaacaatttagaaaaaaacaacaaagcaaaacctatcttggcaaaaaaaggaagtgagtcagagcccattttcaggaggcattggtgatgttcggctcacatattgtttgcagacacacaagaaatctggcttggccaggattggcactagctatgaagggctgagcgagtcacattaaggaacttcacggaactttatagcactccgacattttctgagcaagaggaagtcaaaatttatttaacacctaagcctttttgtagactcttttctatatattgcttaggctcaccatagcgaattctccagtgttaaaacttttctgttttcacatttgaactttatgggttttggggattttcttgtagttcttatatatccctatatattatatctatattgcaaaattttgactgtcagctacatgttggtaagacacaggcaaagtattactgtaactaagttatttttaaagttaaaatatatttttacgtgcctttggctttttattgcagagtctacattttatagattctacatcagatgttgtcacttatttccattgggattccattgtaagctgtgtatgtgcgtgtttggaaaagtgtattcatacttagtttttttttcttcatctgttatcatacttttaacagcaaccaataacggattgtaaagtgtaaaggcacaggttactcatgatgcttctgcagagactgtgggctacaccacatatgttatttggaaatataggtattttagtacagtacatacttgcattacataggtacttcaagcaacacaataaaaagtaaatgata

SEQ ID NO: 417774 - DNA, 6752 bp, Homo sapiens
ttttctaagtaggccaggaacatttaatatttttcaataaattaatatataaaatatatacattagtgccaaatggaacatatattttgaaatatgaaacccaagtaaaatgctcaggaatctggagtagaatccaggtatctgccaaaggaaactttggacgagttgtcttttgaagaagggaaacaatgctgggtctcttatcttcacggactgtttttgcttgtcaaacttctaacatcacttcagccgagtttcgtatttgacttccaacctcatggccatttgacctgccaactactatttttctttgaggcttttaacaccccacccaagtattttgctttccagattgtgtgcgtttccttttcacttcaccttaaagtcagcctgggtttacaacatcggcttaaggcgcaccctctaaggtttcagacagacccagggcaccgcggtgatgacctgaagctgatatctctcggcaaagccaaggtatccgggaggttctccgcgttgtgccaggatttccatccaacccgagagtctcagggcagaggccaggcccccagcgtccgactcccaggggtcccagccccctcccctggctgaccatgcgggctgggacctcccagccggaaaacaccgccctttcctgtcgcctactccttccccaggccgacgactcgcggaggaggaagagacggaggccgatttaagaaaattagcattcattaacccggttcacgctcgggccccggcggaggggaggggcgcgccgggcggcggcgctggcggtggccgggtgaccggcgggcgcaggtgccaccgcggcctgaattttactctctcgggccggcagctgcgccacttgcgcctcgtcgcgcgtctggggcagccgccaccggcttgccccagctttaggcaaatccttttgaaagaccctgagggagaagaaacgcctccctctgggtaggagaacctgtagcgtctgctgttcgtcgcgtgtccagttgctcagccgggagctccggcatcttcagggcgctcattccactctccgggttttggctgcagctctgaggggagcgagctagaaactgacagaacgcgaccctccccctccgcgcccaccggagcccgggctgagagggacctggggagctgcggcctggccggggcggcgcactcaggtggcctcgcttccctgcgggtcaccgcccgccactcgcacagctaggtcggcctgttgggatcgggagaggtgggcgcacgagttttagtgcgggagtccggggtgcgggcggagtcctattgtccccgtgcacccgggcggcagcacctccgggtccctctttaaaccgagcgtccggcgacctttctttgtgcttagggagtcgaaagcggcatcttctccgagagaagtcgcctactggggggtggcgctggggaggtaacaatgggcgcccattgtcctccgagggtccaacggtgaccccccccgctgcgcacgcgcccggccaccggttggccccgggccagggcacaggtaccgcggccgggagggtcggccccgctgcccgcgccctccgccccgccccagtgagtccccgcgccgccggccccgccccgcgccgccccgccctccgcaggttcagtcctcgcgtccggccgccccgcgctcagtcgcgcgcaccttctctcgcggccgggggaccgcagcgcggggctagcccggagacccggccaccggcctggggcgccttcacgccgtctcggagcggataatgcggtgagcaggcaccacgccggcagactcggctggatctgcgcacagcggcagggattgcgtgcgcccgcgggaggcccggggcagcggctgggatcctcagcggcggccgactggatgatgtaactggctctctaggaagcctcacttggccgtaacctcaggaaggttctctttgaccccatctcatttcgaagccacttctgaagccacttgagaaaaatgatgtgacagttcctatcaaaaaggattcagaaacatataccatctgtgaagaaagtggccctttctcccgcttgcaaaatagacattctcaaattccaaaatgccagccaagaccccaatttacctgaaagcagccaataacaagaaaggaaagaaatttaaactgagggacattctgtctcctgatatgatcagtcccccgcttggagactttcgccacaccatccacattggcaaagagggccagcacgatgtctttggagatatttcctttcttcaagggaactacgagcttttacctggaaaccaggagaaagcacacctgggccagttccctgggcataatgagttcttccgggccaacagcacctcggactctgtgttcacagaaacgccctccccggtgctcaaaaatgccatctccctcccgaccattggaggatcccaagctctcatgttgcccttattgtcaccagtgacatttaattccaaacaggagtccttcgggccagcaaagctgcccaggcttagctgcgagcccgtcatggaggaaaaagctcaggagaaaagcagtctgttggagaatgggacagtccaccagggagacacctcgtggggctccagcggttctgcatctcagtccagccaaggcagagacagccactcctccagcctgtccgaacagtaccccgactggccagccgaggacatgtttgaccatcccaccccatgcgagctcatcaagggaaagactaagtcagaggagtccctctctgaccttacaggttccctcctctccctgcagcttgatcttgggccctcacttttggatgaggtgctgaatgtaatggataaaaataagtaacaagatgccaacttttttcctttggggtaaaaggtacaaaaacaaactaaccacagttgaagagaagggcttccggagctgtatttgcagttttgtgttgggttttctaaaataatattcttacaaagtatttttttacctgttatgccctgtttgcaaaaacaatttagaaaaaaacaacaaagcaaaacctatcttggcaaaaaaaggaagtgagtcagagcccattttcaggaggcattggtgatgttcggctcacatattgtttgcagacacacaagaaatctggcttggccaggattggcactagctatgaagggctgagcgagtcacattaaggaacttcacggaactttatagcactccgacattttctgagcaagaggaagtcaaaatttatttaacacctaagcctttttgtagactcttttctatatattgcttaggctcaccatagcgaattctccagtgttaaaacttttctgttttcacatttgaactttatgggttttggggattttcttgtagttcttatatatccctatatattatatctatattgcaaaattttgactgtcagctacatgttggtaagacacaggcaaagtattactgtaactaagttatttttaaagttaaaatatatttttacgtgcctttggctttttattgcagagtctacattttatagattctacatcagatgttgtcacttatttccattgggattccattgtaagctgtgtatgtgcgtgtttggaaaagtgtattcatacttagtttttttttcttcatctgttatcatacttttaacagcaaccaataacggattgtaaagtgtaaaggcacaggttactcatgatgcttctgcagagactgtgggctacaccacatatgttatttggaaatataggtattttagtacagtacatacttgcattacataggtacttcaagcaacacaataaaaagtaaatgataaagtgaacttgcttgtttatagtaataaacaagaccataagagaataagtatagctagagaaattgcttctctgaaatgtacatgagcccttaaggtaagagatgatttccatctactctcattttgattacttccttatggtttgagaggctagaaactgagcctctctacttttggaaaaatgaacatgtgaggtcagatttttttttttttttttaagtcagcactgatgccaccctctcaggggtcatttctgagcatcttcctgacttgaacaccttctacagcaaactcttgcaagtccagtttcatccctgtaaggcaaatgtcttttcacgcagaaagtgccatatagacgagataaaggcagctaaaacgagggcagtagagagcacttacccgaccccaaggtgccagagatgccctgaggatggtggttaaggaaacaggagcaggaaatgtacacacagattcctgtccctttgccaactactccttccccatcaaagaaaaacacttgcacacagtaactaccagctccttctctcaaacttgtatttctcctggaaatgtatctcagaaatgacctcctctcccaaccacttcaacgattctttctttgggtttggggttcttgcagttctatcatctaaaataacctttggactgcaggtaaaatgcaattaggacaactaaccaagtagacgaaacaagttcccctaggcaggggtgtccaatattttagcttccctggaccgcattggaagaattttcttgggccacatgtaaaacacactaacactaaccatagttgatgagcttaaaaaaataaaaatagaaaattgcaaaaaaaaaaaaaaaaaatctcagactgttttaagaaagtttaaaaatttgtgttggacttcatgcgggccacaggttggacaagcttgccctagggcattgtgtgctttccgtaacttctcagttgtatttcgttatccatgactctccagtgttttttctgttggaccacacccgtcacagttcacagttccaaacagaaatttcccagcctattctaaatcttgttaatgacgaagagtccaatgtatctcattatttgtagccaattttagactcttttcaatacctcccccccattttaattagtattgatcatattcagtctttcattttactcttcatctgtagcgtgacctcaaggtaaagatgaaactatttcatgaaaaggggaggagtatggctgtgcattagctctactccctctctggtaagtactggggagagaacagccctgccagtactgggtttgatagattctaaatattaatcacacatcctgcctacagttagccattttagtttctgggagttctttcatgtacattttcttccattaattgaattaggtataattgagatggcaataaatatgcccgtattagaaagaggaaacaaagctacatgcggcttatgattttgttgagtcacttctcccgaggcagcctttccaatgcctggtcccttcccctgagagcaggtggactgctggtggtggctttctttcctgcagagaggcactttagacccatacctgctgtgagctgaattgatgttctcatcctgtgaaccttctcccactttaacctaatttatctttacttgtttaaagataaggaaacccaagatgtactttatttgcaaactcaaagcaaatggcgagccacctgtgacccagtaaccagaaaagaaaccatgccatttgtgtaagtagagacacttcttgttgaggtaggcaaggctcttgtgagcgatttttttcccctagtgagacctaacaaaagacaagctatatcatttctgcctgaaattatctgcttgaaaagatcaaaatatcaggatacttagctcttcacaaatatgaagtcattatcacatttcactgagccagaaatcactgttaacagcacacacaaaagactacactggttgaacagcaaagagaaacccgggtctccagaatcacagtttagtccttctatattactgcaagtgacctgttttttctgaaggctccccgcaaatgaagtcctggaatggaaaaaatccataagtccataaattaacttgataaatattttagaacagacaaaagaaaatattgagtgatgtagttctaatcctcctaatatggaacctggcaagactgaatcattttactgtgaaatatataaacacaatagaatgagccaacatgatggtttctctccagtaagagtttttcttttggaaatgaggttaacctagccccaaatctagcaattctcataaaatccgattttagaattagcctcccagattaatctgaatgattgacttattttttcttaggcaagtcagtaagccacccactagacagccatatccagcaaaataagagaagtttccagatgccaaatgataagccaccatcaacccagcggggaagccttctggttggtttggctgtatgagattcaggaaggccagaatacccaaaattattcacacgacgttaacttattggtactggctaagcaatacatgtatttcctaaaggaggagatggtcttttggttgatttatggacacacttgtttcatctgactgtaaatatattgcatgctttattctgatggtgcactatttcatccagcaagcttttcatctgagaatgtttaatgttgaccttattcttagagcaagtagatctaaatatttttcagctgagttattagggagtcattattctgtggtacaatgctgcaaaaagcatcatgtggaagaatgggaactatgcttactttatgaagtgatgtataacacaatgaaatctgttttacaactac

SEQ ID NO: 417775 - DNA, 3567 bp, Homo sapiens
ttttctaagtaggccaggaacatttaatatttttcaataaattaatatataaaatatatacattagtgccaaatggaacatatattttgaaatatgaaacccaagtaaaatgctcaggaatctggagtagaatccaggtatctgccaaaggaaactttggacgagttgtcttttgaagaagggaaacaatgctgggtctcttatcttcacggactgtttttgcttgtcaaacttctaacatcacttcagccgagtttcgtatttgacttccaacctcatggccatttgacctgccaactactatttttctttgaggcttttaacaccccacccaagtattttgctttccagattgtgtgcgtttccttttcacttcaccttaaagtcagcctgggtttacaacatcggcttaaggcgcaccctctaaggtttcagacagacccagggcaccgcggtgatgacctgaagctgatatctctcggcaaagccaaggtatccgggaggttctccgcgttgtgccaggatttccatccaacccgagagtctcagggcagaggccaggcccccagcgtccgactcccaggggtcccagccccctcccctggctgaccatgcgggctgggacctcccagccggaaaacaccgccctttcctgtcgcctactccttccccaggccgacgactcgcggaggaggaagagacggaggccgatttaagaaaattagcattcattaacccggttcacgctcgggccccggcggaggggaggggcgcgccgggcggcggcgctggcggtggccgggtgaccggcgggcgcaggtgccaccgcggcctgaattttactctctcgggccggcagctgcgccacttgcgcctcgtcgcgcgtctggggcagccgccaccggcttgccccagctttaggcaaatccttttgaaagaccctgagggagaagaaacgcctccctctgggtaggagaacctgtagcgtctgctgttcgtcgcgtgtccagttgctcagccgggagctccggcatcttcagggcgctcattccactctccgggttttggctgcagctctgaggggagcgagctagaaactgacagaacgcgaccctccccctccgcgcccaccggagcccgggctgagagggacctggggagctgcggcctggccggggcggcgcactcaggtggcctcgcttccctgcgggtcaccgcccgccactcgcacagctaggtcggcctgttgggatcgggagaggtgggcgcacgagttttagtgcgggagtccggggtgcgggcggagtcctattgtccccgtgcacccgggcggcagcacctccgggtccctctttaaaccgagcgtccggcgacctttctttgtgcttagggagtcgaaagcggcatcttctccgagagaagtcgcctactggggggtggcgctggggaggtaacaatgggcgcccattgtcctccgagggtccaacggtgaccccccccgctgcgcacgcgcccggccaccggttggccccgggccagggcacaggtaccgcggccgggagggtcggccccgctgcccgcgccctccgccccgccccagtgagtccccgcgccgccggccccgccccgcgccgccccgccctccgcaggttcagtcctcgcgtccggccgccccgcgctcagtcgcgcgcaccttctctcgcggccgggggaccgcagcgcggggctagcccggagacccggccaccggcctggggcgccttcacgccgtctcggagcggataatgcggtgagcaggcaccacgccggcagactcggctggatctgcgcacagcggcagggattgcgtgcgcccgcgggaggcccggggcagcggctgggatcctcagcggcggccggtttgtcctggttgtggtcaagactggatgatgtaactggctctctaggaagcctcacttggccgtaacctcaggaaggttctctttgaccccatctcatttcgaagccacttctgaagccacttgagaaaaatgatgtgacagttcctatcaaaaaggattcagaaacatataccatctgtgaagaaagtggccctttctcccgcttgcaaaatagacattctcaaattccaaaatgccagccaagaccccaatttacctgaaagcagccaataacaagaaaggaaagaaatttaaactgagggacattctgtctcctgatatgatcagtcccccgcttggagactttcgccacaccatccacattggcaaagagggccagcacgatgtctttggagatatttcctttcttcaagggaactacgagcttttacctggaaaccaggagaaagcacacctgggccagttccctgggcataatgagttcttccgggccaacagcacctcggactctgtgttcacagaaacgccctccccggtgctcaaaaatgccatctccctcccgaccattggaggatcccaagctctcatgttgcccttattgtcaccagtgacatttaattccaaacaggagtccttcgggccagcaaagctgcccaggcttagctgcgagcccgtcatggaggaaaaagctcaggagaaaagcagtctgttggagaatgggacagtccaccagggagacacctcgtggggctccagcggttctgcatctcagtccagccaaggcagagacagccactcctccagcctgtccgaacagtaccccgactggccagccgaggacatgtttgaccatcccaccccatgcgagctcatcaagggaaagactaagtcagaggagtccctctctgaccttacaggttccctcctctccctgcagcttgatcttgggccctcacttttggatgaggtgctgaatgtaatggataaaaataagtaacaagatgccaacttttttcctttggggtaaaaggtacaaaaacaaactaaccacagttgaagagaagggcttccggagctgtatttgcagttttgtgttgggttttctaaaataatattcttacaaagtatttttttacctgttatgccctgtttgcaaaaacaatttagaaaaaaacaacaaagcaaaacctatcttggcaaaaaaaggaagtgagtcagagcccattttcaggaggcattggtgatgttcggctcacatattgtttgcagacacacaagaaatctggcttggccaggattggcactagctatgaagggctgagcgagtcacattaaggaacttcacggaactttatagcactccgacattttctgagcaagaggaagtcaaaatttatttaacacctaagcctttttgtagactcttttctatatattgcttaggctcaccatagcgaattctccagtgttaaaacttttctgttttcacatttgaactttatgggttttggggattttcttgtagttcttatatatccctatatattatatctatattgcaaaattttgactgtcagctacatgttggtaagacacaggcaaagtattactgtaactaagttatttttaaagttaaaatatatttttacgtgcctttggcttttta

SEQ ID NO: 417776 - DNA, 777 bp, Homo sapiens
aaaaaaaaaaaaaaggagggacaagaggcaccagaagctcctgtccaggtctgggcctccctcgggtcactcagttctcccccattcattcattcattcactcactcactcactcactcattcccacactctgcagccactgacttcagctagccatgctggatgctaagacatagagtcccggccatcaaggccagtccatctcagtggcatctagacatgcacagagatgaccagggagcccctaagggacagagaggcacaccctgcctcctgatcccatctgggggctgcatgaaggaggggcacaggtgtggccttgaaggctgggtaaggggctgggagggctttaggggcattccagggggcaggcacagaactggaggctctgccgggcacacccacaggagagcaatggctggagggtgacatggactgcagggtgtggccgcggcagcccagctcttaaggggacagcctgggaaaacagacttagggacaatgatcttgagccatgaaatgatgtccaatgccccttgtgccacctgacatcagcctgattaatgaacaaacagaagaggaagcaggggacctgtgtgtccctctctctgcttttctgtctttctctgtgccccctctcttatgtctctcacgctgtctcttgtccttgtttttaactctgacacgccgtgggaacttggctcacttcctagggggaagctgtctggactggcccagagatgggcaccaccatttcccaataaacacaagataaaa

SEQ ID NO: 417777 - DNA, 990 bp, Homo sapiens
aaaaaaaaaaaaaaggagggacaagaggcaccagaagctcctgtccaggtctgggcctccctcgggtcactcagttctcccccattcattcattcattcactcactcactcactcactcattcccacactctgcagccactgacttcagctagccatgctggatgctaagacatagagtcccggccatcaaggccagtccatctcagtggcatctagacatgcacagagatgaccagggagcccctaagggacagagaggcacaccctgcctcctgatcccatctgggggctgcatgaaggaggggcacaggtgtggccttgaaggctgggtaaggggctgggagggctttaggggcattccagggggcaggcacagaactggaggctctgccgggcacacccacaggagagcaatggctggagggtgacatggactgcagggtgtggccgcggcagcccagctcttaaggggacagcctgggaaaacagacttagggacaatgatcttgagccatgaaatgatgtccaatgccccttgtgccacctgacatcagcctgattaatgaacaaacagaagaggaagcaggggacctgtgtgtccctctctctgcttttctgtctttctctgtgccccctctcttatgtctctcacgctgtctcttgtccttgtttttaactctgacacgccgtgggaacttggctcacttcctagggggaagctgtctggactggcccagagatgggcaccaccatttcccaataaacacaagataaaatcagagagctggcgtcagttccgcggctggactcagtggggaaaagggcaaaaagcagcagaaataagagcagggaaagaacaggggctgggtgcgatgggtcccatctgtaatcccagcgctttgggaggcctaggtgggaggatcgcttgagcccagaagttcaagaccagcctgggcaacatacggagacccccatttctaaaagtttta

SEQ ID NO: 417778 - DNA, 4529 bp, Homo sapiens
  misc_feature (35)..(35): n is a, c, g, or t
  misc_feature (38)..(38): n is a, c, g, or t
  misc_feature (2407)..(2407): n is a, c, g, or t
cgaggagaccaagccgctgctggggggcgacgtcnccngagcacgaagatgggcgccgtgcctgccgccgggtcttctgctttgaacgggatgaggtacaaatgctgcaggagggcgacattcaggtctgtgtcatccggcacccgcggacctttctcagcaagatcctcacctcgaaattcctgaggcgctgggagccgcaccacctaacgctggccgacaacagcctggcgtccgccacgccaactgggtacatggaaaactcagtctcctacagcgcaattgaagacgttcagctgctgtcctgggagaatgccccgaagtactgtttacagctcacgattcctgggggaactgtcttactgcaggctgccaatagctacctgcgagaccagtggttccattctctgcaatggaagaaaaagatttacaaatataagaaagtgctgagtaacccaagccgctgggaagttgtcttgaaagagatccggaccctggtggacatggccctgacatcccccctgcaggatgactccatcaaccaggccccactggaaatcgtctcgaaactgctctcagagaacacaaacttgaccacccaggagcatgaaaacatcattgtggcaatcgctcctttgctggaaaacaaccacccaccaccagatctctgtgaattcttttgcaagcactgcagagagcggccccggtccatggtggtcatcgaggtgttcacccccgtggtgcagcgaatcctcaagcataacatggactttgggaagtgcccgcgactgaggctgtttactcaggagtacatccttgccttgaacgagctcaacgcggggatggaagtggtgaagaagttcattcagagcatgcacggcccacagggcactgcccccacccccgggtcctgcccaacctggtggccgtgtgcctggctgccatctactcctgctatgaagagttcatcaacagccgcgacaattccccaagcctgaaggaaatccggaacggctgccagcagccgtgcgaccggaagcccactttacctctgcgccttctgcaccccagcccggacctggtgtctcaggaagccacgctgtctgaggcccggctcaagtcggtggtcgtggcctccagtgagatccacgtggaggtggaacgcaccagcactgccaagccggcgctgacggccagcgcaggcaacgacagcgagcccaacctcatcgactgcctcatggtcagccccgcctgcagcaccatgagcatcgagctgggcccccaggccgaccgcacgctcggctgctacgtggaaatcctcaagctgctgtcagactatgatgactggagaccgtctctggccagtttgcttcaacccattccattccccaaagaagctctcgcacatgagaagttcaccaaggaactgaagtacgtgattcagaggttcgccgaagaccccaggcaagaggtccactcatgcctgctgagcgtgcgggccggcaaagatggctggttccagctctacagccccggaggggtggcctgcgacgatgacggggagctgttcgccagcatggtgcacatcctcatgggctcctgttacaagaccaaaaaattcctgctctccctggcagaaaacaagctgggtccctgcatgctcctggcactgagggggaaccagaccatggtggagatcctgtgcttgatgctggaatacaacatcatcgacaacaacgacacccaactgcagatcatctcaaccctggagagcacagacgtggggaagcgcatgtacgagcagctgtgtgaccggcagcgggagctgaaggagctgcaaaggaaaggcgggcccaccaggctaacactgccctccaagtccacagacgctgacttggctcgtttgctgagctccggctccttcggaaacctggagaacctcagtttggccttcaccaatgtaaccagtgcctgcgccgagcacctcatcaaactgccttcgctcaagcagctgaacctgtggtccactcagtttggagacgctggccttcggctcctgtcggaacacctcaccatgctccaggtgctgaacctgtgcgagaccccggtcacagacgctggcctgctggccctgagctccatgaagagtctctgcagtttaaacatgaacagcaccaagctctcagctgacacctacgaagatctgaaggccaagcttcccaatttgaaggaagtggacgtccgctacaccgaagcctggtgaagctcccagctcaaggcaggaagacgtttgcaaccgcgacaaaataactcttgactaacagccgcagagcagccggtcctggggtcccaccctggtgccctggctgtgagatagatggggagtctttctgggggcggagggggnagggggtggggagggggcccacaagcacgcccagcccccgccgaattcttttagcttcgtaattggaacctttgacctgatctaaagtggactttgtagcaacaagaggagcatcagcgggtcggggaggggtttgggggtgggctggggggtgggggaccctttgtggattttctttgcctttgtgtttgatgccgtcgtgtgggaaaagtcaactccgatgccaccattgcgggccggacgaaggatgctttcttcctagaggctccgagctgagctgcgaactcgccccccgcccttgggacaagaagacccagtcacatcactgcacccgtcctgtgtcctcaccattgctatgcaaagtgattcttgttgtacataagatttaaataatgcacctatttaagacatgttgacaaattgcgggtctgggacccgcctcttatttatgaagtctttgaccgtcccccccgcccgaccccaccgccctcccgcccccacctggcgtgtagtactgtataaaccagtcagctgtcgggttagtggtagtattattgttatttttttaaaggaaacaaacagacaacaaaaagaagaaaaaaaaaaagaacctccttggaaaaattaattgctttttcgtaatggattctctatgctaatgctctctcgtctgtctgtctgtctgcccactcccccacccaccactgtgcgtttctgatttccaaatgtctccaactccctcacgaggtggggctcaggctggaggaggagggattaagatccccttgctccactaaggcccaagctctttctctcggcaccttttagacttgaatgggaggctgctaacccgccctctccagtccaccccggtaaaagagctgttccccacccccagggagctcctgtccctgtcagcctttgctgtcccctgtccccaacggagactctgtcacccctgggctccccctgccatcgtgtgcttcacgtggccccatgcatgcccgcctctctgcatggtctcttgggaaaagagagatgtgtcgcctccgccagtccgactgccctccccaccccacccccgccaccccccacatgtgaccactgcaacgaagacactccttctgtccccacctgctccgaagacaaaccaacctccgtttcttttataaacagtcggctttttcttaataagccctcactgtacagaacagcccgttgatggtttatttggggtccccctctccccccagcccttttttctgttggtttagcacaaatacttccctcctccggcacctccaaacctaccccacagtcagtgtacttgttttatatatatttaatcttattcaatggaaaccatgcttttgtcgttttatactttgctaggtagactttattacccccccactatgccctcatttttttaaaaaaggaaaaaaaaaagaaactgggttccagtcttaattcattttccgtgccaggttttatttcgtgtgtgtgtgagtgtgttctgttttgtgttttgttttttgttgttgttttcagttgtttggttttcttttctttcccccctccggtcccatacttcacagcactctggtgcgggaagaagcagaagcaaaaaaaataaaaataaaaaaataaataaaaataaaaaaaataaaaaaggaaaaaaaaaaagaagaaacaagacatgccacctttcccctcgcactgttgcttttcctgatggttaatactactgtcacgtagctgtgtacaaagagatgtgaaatactttcaggcaaaaataaactgtaagtgactcatcaatgtctggcctttgtgtggtttctcggcgcccagcgggagaaggtccaaggagggggcgaagcccaggcgggaaatctgaggctcaagacagtgccgggatgccctcgccaccttctgtgcgcacttcctgaggaccagggctcagcatcctggctgctgttggccactggggccggagctgtcttcattgcaggggggctgttgtgttcattgccagacattgaacagcatccttggcttctacccagcagtagcaccccttcctcatttatgacaaccagagtgtctccagatgttgccacgt

SEQ ID NO: 417779 - DNA, 949 bp, Homo sapiens
  misc_feature (823)..(823): n is a, c, g, or t
aggggagtaaaataatacggctaggtcgaggctggtgttaatctccctggcagaaaacaagctgggtccctgcatgctcctggcactgagggggaaccagaccatggtggagatcctgtgcttgatgctggaatacaacatcatcgacaacaacgacacccaactgcagatcatctcaaccctggagagcacagacgtggggaagcgcatgtacgagcagctgtgtgaccggcagcgggagctgaaggagctgcaaaggaaaggcgggcccaccaggctaacactgccctccaagtccacagacgctgacttggctcgtttgctgagctccggctccttcggaaacctggagaacctcagtttggccttcaccaatgtaaccagtgcctgcgccgagcacctcatcaaactgccttcgctcaagcagctgaacctgtggtccactcagtttggagacgctggccttcggctcctgtcggaacacctcaccatgctccaggtgctgaacctgtgcgagaccccggtcacagacgctggcctgctggccctgagctccatgaagagtctctgcagtttaaacatgaacagcaccaagctctcagctgacacctacgaagatctgaaggccaagcttcccaatttgaaggaagtggacgtccgctacaccgaagcctggtgaagctcccagctcaaggcaggaagacgtttgcaaccgcgacaaaataactcttgactaacagccgcagagcagccggtcctggggtcccaccctggtgccctggctgtgagatagatggggagtctttctgggggcggagggggnagggggtggggagggggcccacaagcacgcccagcccccgccgaatttttagggtcgaattgacttgggttggtgccgctgtggaaagcaatcgagcacatggggcggggaggaggttcaaagcca

SEQ ID NO: 417780 - DNA, 636 bp, Homo sapiens
agagaagaaggagagagagttaagcagagttagagtagggagagtagagtgtggatgggttccgatgtgtggtatcctgtcgtttgaaactgccgggtcccatacttcacagcactctggtgcgggaagaagcagaagcaaaaaaaataaaaataaaaaaataaataaaaataaaaaaaataaaaaaggaaaaaaaaaaagaagaaacaagacatgccacctttcccctcgcactgttgcttttcctgatggttaatactactgtcacgtagctgtgtacaaagagatgtgaaatactttcaggcaaaaataaactgtaagtgactcatcaatgtctggcctttgtgtggtttctcggcgcccagcgggagaaggtccaaggagggggcgaagcccaggcgggaaatctgaggctcaagacagtgccgggatgccctcgccaccttctgtgcgcacttcctgaggaccagggctcagcatcctggctgctgttggccactggggccggagctgtcttcattgcaggggggctgttgtgttcattgccagacattgaacagcatccttggcttctacccagcagtagcaccccttcctcatttatgacaaccagagtgtctccagatgttgccacgt

SEQ ID NO: 417781 - DNA, 465 bp, Homo sapiens
ggctgcaggaattcggcacgagaaaaaaagaagaaacaagacatgccacctttcccctcgcactgttgcttttcctgatggttaatactactgtcacgtagctgtgtacaaagagatgtgaaatactttcaggcaaaaataaactgtaagtgactcatcaatgtctggcctttgtgtggtttctcggcgcccagcgggagaaggtccaaggagggggcgaagcccaggcgggaaatctgaggctcaagacagtgccgggatgccctcgccaccttctgtgcgcacttcctgaggaccagggctcagcatcctggctgctgttggccactggggccggagctgtcttcattgcaggggggctgttgtgttcattgccagacattgaacagcatccttggcttctacccagcagtagcaccccttcctcatttatgacaaccagagtgtctccagatgttgccacgt

SEQ ID NO: 417782 - DNA, 4356 bp, Homo sapiens
  misc_feature (2234)..(2234): n is a, c, g, or t
agcgggtgtacgcgcgcgagccccagaggctgcggcagcagcagagcagcagagcagcagcccctgcctggcgcgacgtgcttccagtgcattctgagtcactcctctcctggcaaggggcacattcctgctgacgacttgtctcccgtggaggagcaacaggctctgctttccctggcctgagaaccctggcatatgtgcttgcctctgctgacagttgccagagcgatggcaagtgttgcccagaaaaagatttacaaatataagaaagtgctgagtaacccaagccgctgggaagttgtcttgaaagagatccggaccctggtggacatggccctgacatcccccctgcaggatgactccatcaaccaggccccactggaaatcgtctcgaaactgctctcagagaacacaaacttgaccacccaggagcatgaaaacatcattgtggcaatcgctcctttgctggaaaacaaccacccaccaccagatctctgtgaattcttttgcaagcactgcagagagcggccccggtccatggtggtcatcgaggtgttcacccccgtggtgcagcgaatcctcaagcataacatggactttgggaagtgcccgcgactgaggctgtttactcaggagtacatccttgccttgaacgagctcaacgcggggatggaagtggtgaagaagttcattcagagcatgcacggcccacagggcactgcccccacccccgggtcctgcccaacctggtggccgtgtgcctggctgccatctactcctgctatgaagagttcatcaacagccgcgacaattccccaagcctgaaggaaatccggaacggctgccagcagccgtgcgaccggaagcccactttacctctgcgccttctgcaccccagcccggacctggtgtctcaggaagccacgctgtctgaggcccggctcaagtcggtggtcgtggcctccagtgagatccacgtggaggtggaacgcaccagcactgccaagccggcgctgacggccagcgcaggcaacgacagcgagcccaacctcatcgactgcctcatggtcagccccgcctgcagcaccatgagcatcgagctgggcccccaggccgaccgcacgctcggctgctacgtggaaatcctcaagctgctgtcagactatgatgactggagaccgtctctggccagtttgcttcaacccattccattccccaaagaagctctcgcacatgagaagttcaccaaggaactgaagtacgtgattcagaggttcgccgaagaccccaggcaagaggtccactcatgcctgctgagcgtgcgggccggcaaagatggctggttccagctctacagccccggaggggtggcctgcgacgatgacggggagctgttcgccagcatggtgcacatcctcatgggctcctgttacaagaccaaaaaattcctgctctccctggcagaaaacaagctgggtccctgcatgctcctggcactgagggggaaccagaccatggtggagatcctgtgcttgatgctggaatacaacatcatcgacaacaacgacacccaactgcagatcatctcaaccctggagagcacagacgtggggaagcgcatgtacgagcagctgtgtgaccggcagcgggagctgaaggagctgcaaaggaaaggcgggcccaccaggctaacactgccctccaagtccacagacgctgacttggctcgtttgctgagctccggctccttcggaaacctggagaacctcagtttggccttcaccaatgtaaccagtgcctgcgccgagcacctcatcaaactgccttcgctcaagcagctgaacctgtggtccactcagtttggagacgctggccttcggctcctgtcggaacacctcaccatgctccaggtgctgaacctgtgcgagaccccggtcacagacgctggcctgctggccctgagctccatgaagagtctctgcagtttaaacatgaacagcaccaagctctcagctgacacctacgaagatctgaaggccaagcttcccaatttgaaggaagtggacgtccgctacaccgaagcctggtgaagctcccagctcaaggcaggaagacgtttgcaaccgcgacaaaataactcttgactaacagccgcagagcagccggtcctggggtcccaccctggtgccctggctgtgagatagatggggagtctttctgggggcggagggggnagggggtggggagggggcccacaagcacgcccagcccccgccgaattcttttagcttcgtaattggaacctttgacctgatctaaagtggactttgtagcaacaagaggagcatcagcgggtcggggaggggtttgggggtgggctggggggtgggggaccctttgtggattttctttgcctttgtgtttgatgccgtcgtgtgggaaaagtcaactccgatgccaccattgcgggccggacgaaggatgctttcttcctagaggctccgagctgagctgcgaactcgccccccgcccttgggacaagaagacccagtcacatcactgcacccgtcctgtgtcctcaccattgctatgcaaagtgattcttgttgtacataagatttaaataatgcacctatttaagacatgttgacaaattgcgggtctgggacccgcctcttatttatgaagtctttgaccgtcccccccgcccgaccccaccgccctcccgcccccacctggcgtgtagtactgtataaaccagtcagctgtcgggttagtggtagtattattgttatttttttaaaggaaacaaacagacaacaaaaagaagaaaaaaaaaaagaacctccttggaaaaattaattgctttttcgtaatggattctctatgctaatgctctctcgtctgtctgtctgtctgcccactcccccacccaccactgtgcgtttctgatttccaaatgtctccaactccctcacgaggtggggctcaggctggaggaggagggattaagatccccttgctccactaaggcccaagctctttctctcggcaccttttagacttgaatgggaggctgctaacccgccctctccagtccaccccggtaaaagagctgttccccacccccagggagctcctgtccctgtcagcctttgctgtcccctgtccccaacggagactctgtcacccctgggctccccctgccatcgtgtgcttcacgtggccccatgcatgcccgcctctctgcatggtctcttgggaaaagagagatgtgtcgcctccgccagtccgactgccctccccaccccacccccgccaccccccacatgtgaccactgcaacgaagacactccttctgtccccacctgctccgaagacaaaccaacctccgtttcttttataaacagtcggctttttcttaataagccctcactgtacagaacagcccgttgatggtttatttggggtccccctctccccccagcccttttttctgttggtttagcacaaatacttccctcctccggcacctccaaacctaccccacagtcagtgtacttgttttatatatatttaatcttattcaatggaaaccatgcttttgtcgttttatactttgctaggtagactttattacccccccactatgccctcatttttttaaaaaaggaaaaaaaaaagaaactgggttccagtcttaattcattttccgtgccaggttttatttcgtgtgtgtgtgagtgtgttctgttttgtgttttgttttttgttgttgttttcagttgtttggttttcttttctttcccccctccggtcccatacttcacagcactctggtgcgggaagaagcagaagcaaaaaaaataaaaataaaaaaataaataaaaataaaaaaaataaaaaaggaaaaaaaaaaagaagaaacaagacatgccacctttcccctcgcactgttgcttttcctgatggttaatactactgtcacgtagctgtgtacaaagagatgtgaaatactttcaggcaaaaataaactgtaagtgactcatcaatgtctggcctttgtgtggtttctcggcgcccagcgggagaaggtccaaggagggggcgaagcccaggcgggaaatctgaggctcaagacagtgccgggatgccctcgccaccttctgtgcgcacttcctgaggaccagggctcagcatcctggctgctgttggccactggggccggagctgtcttcattgcaggggggctgttgtgttcattgccagacattgaacagcatccttggcttctacccagcagtagcaccccttcctcatttatgacaaccagagtgtctccagatgttgccacgt

SEQ ID NO: 417783 - DNA, 2681 bp, Homo sapiens
  misc_feature (559)..(559): n is a, c, g, or t
ggcatgtgctgtaggccagcgggagctgaaggagctggacgctgacttggctcgtttgctgagctccggctccttcggaaacctggagaacctcagtttggccttcaccaatgtaaccagtgcctgcgccgagcacctcatcaaactgccttcgctcaagcagctgaacctgtggtccactcagtttggagacgctggccttcggctcctgtcggaacacctcaccatgctccaggtgctgaacctgtgcgagaccccggtcacagacgctggcctgctggccctgagctccatgaagagtctctgcagtttaaacatgaacagcaccaagctctcagctgacacctacgaagatctgaaggccaagcttcccaatttgaaggaagtggacgtccgctacaccgaagcctggtgaagctcccagctcaaggcaggaagacgtttgcaaccgcgacaaaataactcttgactaacagccgcagagcagccggtcctggggtcccaccctggtgccctggctgtgagatagatggggagtctttctgggggcggagggggnagggggtggggagggggcccacaagcacgcccagcccccgccgaattcttttagcttcgtaattggaacctttgacctgatctaaagtggactttgtagcaacaagaggagcatcagcgggtcggggaggggtttgggggtgggctggggggtgggggaccctttgtggattttctttgcctttgtgtttgatgccgtcgtgtgggaaaagtcaactccgatgccaccattgcgggccggacgaaggatgctttcttcctagaggctccgagctgagctgcgaactcgccccccgcccttgggacaagaagacccagtcacatcactgcacccgtcctgtgtcctcaccattgctatgcaaagtgattcttgttgtacataagatttaaataatgcacctatttaagacatgttgacaaattgcgggtctgggacccgcctcttatttatgaagtctttgaccgtcccccccgcccgaccccaccgccctcccgcccccacctggcgtgtagtactgtataaaccagtcagctgtcgggttagtggtagtattattgttatttttttaaaggaaacaaacagacaacaaaaagaagaaaaaaaaaaagaacctccttggaaaaattaattgctttttcgtaatggattctctatgctaatgctctctcgtctgtctgtctgtctgcccactcccccacccaccactgtgcgtttctgatttccaaatgtctccaactccctcacgaggtggggctcaggctggaggaggagggattaagatccccttgctccactaaggcccaagctctttctctcggcaccttttagacttgaatgggaggctgctaacccgccctctccagtccaccccggtaaaagagctgttccccacccccagggagctcctgtccctgtcagcctttgctgtcccctgtccccaacggagactctgtcacccctgggctccccctgccatcgtgtgcttcacgtggccccatgcatgcccgcctctctgcatggtctcttgggaaaagagagatgtgtcgcctccgccagtccgactgccctccccaccccacccccgccaccccccacatgtgaccactgcaacgaagacactccttctgtccccacctgctccgaagacaaaccaacctccgtttcttttataaacagtcggctttttcttaataagccctcactgtacagaacagcccgttgatggtttatttggggtccccctctccccccagcccttttttctgttggtttagcacaaatacttccctcctccggcacctccaaacctaccccacagtcagtgtacttgttttatatatatttaatcttattcaatggaaaccatgcttttgtcgttttatactttgctaggtagactttattacccccccactatgccctcatttttttaaaaaaggaaaaaaaaaagaaactgggttccagtcttaattcattttccgtgccaggttttatttcgtgtgtgtgtgagtgtgttctgttttgtgttttgttttttgttgttgttttcagttgtttggttttcttttctttcccccctccggtcccatacttcacagcactctggtgcgggaagaagcagaagcaaaaaaaataaaaataaaaaaataaataaaaataaaaaaaataaaaaaggaaaaaaaaaaagaagaaacaagacatgccacctttcccctcgcactgttgcttttcctgatggttaatactactgtcacgtagctgtgtacaaagagatgtgaaatactttcaggcaaaaataaactgtaagtgactcatcaatgtctggcctttgtgtggtttctcggcgcccagcgggagaaggtccaaggagggggcgaagcccaggcgggaaatctgaggctcaagacagtgccgggatgccctcgccaccttctgtgcgcacttcctgaggaccagggctcagcatcctggctgctgttggccactggggccggagctgtcttcattgcaggggggctgttgtgttcattgccagacattgaacagcatccttggcttctacccagcagtagcaccccttcctcatttatgacaaccagagtgtctccagatgttgccacgt

SEQ ID NO: 417784 - DNA, 4479 bp, Homo sapiens
  misc_feature (35)..(35): n is a, c, g, or t
  misc_feature (38)..(38): n is a, c, g, or t
  misc_feature (2407)..(2407): n is a, c, g, or t
cgaggagaccaagccgctgctggggggcgacgtcnccngagcacgaagatgggcgccgtgcctgccgccgggtcttctgctttgaacgggatgaggtacaaatgctgcaggagggcgacattcaggtctgtgtcatccggcacccgcggacctttctcagcaagatcctcacctcgaaattcctgaggcgctgggagccgcaccacctaacgctggccgacaacagcctggcgtccgccacgccaactgggtacatggaaaactcagtctcctacagcgcaattgaagacgttcagctgctgtcctgggagaatgccccgaagtactgtttacagctcacgattcctgggggaactgtcttactgcaggctgccaatagctacctgcgagaccagtggttccattctctgcaatggaagaaaaagatttacaaatataagaaagtgctgagtaacccaagccgctgggaagttgtcttgaaagagatccggaccctggtggacatggccctgacatcccccctgcaggatgactccatcaaccaggccccactggaaatcgtctcgaaactgctctcagagaacacaaacttgaccacccaggagcatgaaaacatcattgtggcaatcgctcctttgctggaaaacaaccacccaccaccagatctctgtgaattcttttgcaagcactgcagagagcggccccggtccatggtggtcatcgaggtgttcacccccgtggtgcagcgaatcctcaagcataacatggactttgggaagtgcccgcgactgaggctgtttactcaggagtacatccttgccttgaacgagctcaacgcggggatggaagtggtgaagaagttcattcagagcatgcacggcccacagggcactgcccccacccccgggtcctgcccaacctggtggccgtgtgcctggctgccatctactcctgctatgaagagttcatcaacagccgcgacaattccccaagcctgaaggaaatccggaacggctgccagcagccgtgcgaccggaagcccactttacctctgcgccttctgcaccccagcccggacctggtgtctcaggaagccacgctgtctgaggcccggctcaagtcggtggtcgtggcctccagtgagatccacgtggaggtggaacgcaccagcactgccaagccggcgctgacggccagcgcaggcaacgacagcgagcccaacctcatcgactgcctcatggtcagccccgcctgcagcaccatgagcatcgagctgggcccccaggccgaccgcacgctcggctgctacgtggaaatcctcaagctgctgtcagactatgatgactggagaccgtctctggccagtttgcttcaacccattccattccccaaagaagctctcgcacatgagaagttcaccaaggaactgaagtacgtgattcagaggttcgccgaagaccccaggcaagaggtccactcatgcctgctgagcgtgcgggccggcaaagatggctggttccagctctacagccccggaggggtggcctgcgacgatgacggggagctgttcgccagcatggtgcacatcctcatgggctcctgttacaagaccaaaaaattcctgctctccctggcagaaaacaagctgggtccctgcatgctcctggcactgagggggaaccagaccatggtggagatcctgtgcttgatgctggaatacaacatcatcgacaacaacgacacccaactgcagatcatctcaaccctggagagcacagacgtggggaagcgcatgtacgagcagctgtgtgaccggcagcgggagctgaaggagctgcaaaggaaaggcgggcccaccaggctaacactgccctccaagtccacagacgctgacttggctcgtttgctgagctccggctccttcggaaacctggagaacctcagtttggccttcaccaatgtaaccagtgcctgcgccgagcacctcatcaaactgccttcgctcaagcagctgaacctgtggtccactcagtttggagacgctggccttcggctcctgtcggaacacctcaccatgctccaggtgctgaacctgtgcgagaccccggtcacagacgctggcctgctggccctgagctccatgaagagtctctgcagtttaaacatgaacagcaccaagctctcagctgacacctacgaagatctgaaggccaagcttcccaatttgaaggaagtggacgtccgctacaccgaagcctggtgaagctcccagctcaaggcaggaagacgtttgcaaccgcgacaaaataactcttgactaacagccgcagagcagccggtcctggggtcccaccctggtgccctggctgtgagatagatggggagtctttctgggggcggagggggnagggggtggggagggggcccacaagcacgcccagcccccgccgaattcttttagcttcgtaattggaacctttgacctgatctaaagtggactttgtagcaacaagaggagcatcagcgggtcggggaggggtttgggggtgggctggggggtgggggaccctttgtggattttctttgcctttgtgtttgatgccgtcgtgtgggaaaagtcaactccgatgccaccattgcgggccggacgaaggatgctttcttcctagaggctccgagctgagctgcgaactcgccccccgcccttgggacaagaagacccagtcacatcactgcacccgtcctgtgtcctcaccattgctatgcaaagtgattcttgttgtacataagatttaaataatgcacctatttaagacatgttgacaaattgcgggtctgggacccgcctcttatttatgaagtctttgaccgtcccccccgcccgaccccaccgccctcccgcccccacctggcgtgtagtactgtataaaccagtcagctgtcgggttagtggtagtattattgttatttttttaaaggaaacaaacagacaacaaaaagaagaaaaaaaaaaagaacctccttggaaaaattaattgctttttcgtaatggattctctatgctaatgctctctcgtctgtctgtctgtctgcccactcccccacccaccactgtgcgtttctgatttccaaatgtctccaactccctcacgaggtggggctcaggctggaggaggagggattaagatccccttgctccactaaggcccaagctctttctctcggcaccttttagacttgaatgggaggctgctaacccgccctctccagtccaccccggtaaaagagctgttccccacccccagggagctcctgtccctgtcagcctttgctgtcccctgtccccaacggagactctgtcacccctgggctccccctgccatcgtgtgcttcacgtggccccatgcatgcccgcctctctgcatggtctcttgggaaaagagagatgtgtcgcctccgccagtccgactgccctccccaccccacccccgccaccccccacatgtgaccactgcaacgaagacactccttctgtccccacctgctccgaagacaaaccaacctccgtttcttttataaacagtcggctttttcttaataagccccccagcccttttttctgttggtttagcacaaatacttccctcctccggcacctccaaacctaccccacagtcagtgtacttgttttatatatatttaatcttattcaatggaaaccatgcttttgtcgttttatactttgctaggtagactttattacccccccactatgccctcatttttttaaaaaaggaaaaaaaaaagaaactgggttccagtcttaattcattttccgtgccaggttttatttcgtgtgtgtgtgagtgtgttctgttttgtgttttgttttttgttgttgttttcagttgtttggttttcttttctttcccccctccggtcccatacttcacagcactctggtgcgggaagaagcagaagcaaaaaaaataaaaataaaaaaataaataaaaataaaaaaaataaaaaaggaaaaaaaaaaagaagaaacaagacatgccacctttcccctcgcactgttgcttttcctgatggttaatactactgtcacgtagctgtgtacaaagagatgtgaaatactttcaggcaaaaataaactgtaagtgactcatcaatgtctggcctttgtgtggtttctcggcgcccagcgggagaaggtccaaggagggggcgaagcccaggcgggaaatctgaggctcaagacagtgccgggatgccctcgccaccttctgtgcgcacttcctgaggaccagggctcagcatcctggctgctgttggccactggggccggagctgtcttcattgcaggggggctgttgtgttcattgccagacattgaacagcatccttggcttctacccagcagtagcaccccttcctcatttatgacaaccagagtgtctccagatgttgccacgt

SEQ ID NO: 417785 - DNA, 4434 bp, Homo sapiens
  misc_feature (35)..(35): n is a, c, g, or t
  misc_feature (38)..(38): n is a, c, g, or t
  misc_feature (2407)..(2407): n is a, c, g, or t
cgaggagaccaagccgctgctggggggcgacgtcnccngagcacgaagatgggcgccgtgcctgccgccgggtcttctgctttgaacgggatgaggtacaaatgctgcaggagggcgacattcaggtctgtgtcatccggcacccgcggacctttctcagcaagatcctcacctcgaaattcctgaggcgctgggagccgcaccacctaacgctggccgacaacagcctggcgtccgccacgccaactgggtacatggaaaactcagtctcctacagcgcaattgaagacgttcagctgctgtcctgggagaatgccccgaagtactgtttacagctcacgattcctgggggaactgtcttactgcaggctgccaatagctacctgcgagaccagtggttccattctctgcaatggaagaaaaagatttacaaatataagaaagtgctgagtaacccaagccgctgggaagttgtcttgaaagagatccggaccctggtggacatggccctgacatcccccctgcaggatgactccatcaaccaggccccactggaaatcgtctcgaaactgctctcagagaacacaaacttgaccacccaggagcatgaaaacatcattgtggcaatcgctcctttgctggaaaacaaccacccaccaccagatctctgtgaattcttttgcaagcactgcagagagcggccccggtccatggtggtcatcgaggtgttcacccccgtggtgcagcgaatcctcaagcataacatggactttgggaagtgcccgcgactgaggctgtttactcaggagtacatccttgccttgaacgagctcaacgcggggatggaagtggtgaagaagttcattcagagcatgcacggcccacagggcactgcccccacccccgggtcctgcccaacctggtggccgtgtgcctggctgccatctactcctgctatgaagagttcatcaacagccgcgacaattccccaagcctgaaggaaatccggaacggctgccagcagccgtgcgaccggaagcccactttacctctgcgccttctgcaccccagcccggacctggtgtctcaggaagccacgctgtctgaggcccggctcaagtcggtggtcgtggcctccagtgagatccacgtggaggtggaacgcaccagcactgccaagccggcgctgacggccagcgcaggcaacgacagcgagcccaacctcatcgactgcctcatggtcagccccgcctgcagcaccatgagcatcgagctgggcccccaggccgaccgcacgctcggctgctacgtggaaatcctcaagctgctgtcagactatgatgactggagaccgtctctggccagtttgcttcaacccattccattccccaaagaagctctcgcacatgagaagttcaccaaggaactgaagtacgtgattcagaggttcgccgaagaccccaggcaagaggtccactcatgcctgctgagcgtgcgggccggcaaagatggctggttccagctctacagccccggaggggtggcctgcgacgatgacggggagctgttcgccagcatggtgcacatcctcatgggctcctgttacaagaccaaaaaattcctgctctccctggcagaaaacaagctgggtccctgcatgctcctggcactgagggggaaccagaccatggtggagatcctgtgcttgatgctggaatacaacatcatcgacaacaacgacacccaactgcagatcatctcaaccctggagagcacagacgtggggaagcgcatgtacgagcagctgtgtgaccggcagcgggagctgaaggagctgcaaaggaaaggcgggcccaccaggctaacactgccctccaagtccacagacgctgacttggctcgtttgctgagctccggctccttcggaaacctggagaacctcagtttggccttcaccaatgtaaccagtgcctgcgccgagcacctcatcaaactgccttcgctcaagcagctgaacctgtggtccactcagtttggagacgctggccttcggctcctgtcggaacacctcaccatgctccaggtgctgaacctgtgcgagaccccggtcacagacgctggcctgctggccctgagctccatgaagagtctctgcagtttaaacatgaacagcaccaagctctcagctgacacctacgaagatctgaaggccaagcttcccaatttgaaggaagtggacgtccgctacaccgaagcctggtgaagctcccagctcaaggcaggaagacgtttgcaaccgcgacaaaataactcttgactaacagccgcagagcagccggtcctggggtcccaccctggtgccctggctgtgagatagatggggagtctttctgggggcggagggggnagggggtggggagggggcccacaagcacgcccagcccccgccgaattcttttagcttcgtaattggaacctttgacctgatctaaagtggactttgtagcaacaagaggagcatcagcgggtcggggaggggtttgggggtgggctggggggtgggggaccctttgtggattttctttgcctttgtgtttgatgccgtcgtgtgggaaaagtcaactccgatgccaccattgcgggccggacgaaggatgctttcttcctagaggctccgagctgagctgcgaactcgccccccgcccttgggacaagaagacccagtcacatcactgcacccgtcctgtgtcctcaccattgctatgcaaagtgattcttgttgtacataagatttaaataatgcacgcccccacctggcgtgtagtactgtataaaccagtcagctgtcgggttagtggtagtattattgttatttttttaaaggaaacaaacagacaacaaaaagaagaaaaaaaaaaagaacctccttggaaaaattaattgctttttcgtaatggattctctatgctaatgctctctcgtctgtctgtctgtctgcccactcccccacccaccactgtgcgtttctgatttccaaatgtctccaactccctcacgaggtggggctcaggctggaggaggagggattaagatccccttgctccactaaggcccaagctctttctctcggcaccttttagacttgaatgggaggctgctaacccgccctctccagtccaccccggtaaaagagctgttccccacccccagggagctcctgtccctgtcagcctttgctgtcccctgtccccaacggagactctgtcacccctgggctccccctgccatcgtgtgcttcacgtggccccatgcatgcccgcctctctgcatggtctcttgggaaaagagagatgtgtcgcctccgccagtccgactgccctccccaccccacccccgccaccccccacatgtgaccactgcaacgaagacactccttctgtccccacctgctccgaagacaaaccaacctccgtttcttttataaacagtcggctttttcttaataagccctcactgtacagaacagcccgttgatggtttatttggggtccccctctccccccagcccttttttctgttggtttagcacaaatacttccctcctccggcacctccaaacctaccccacagtcagtgtacttgttttatatatatttaatcttattcaatggaaaccatgcttttgtcgttttatactttgctaggtagactttattacccccccactatgccctcatttttttaaaaaaggaaaaaaaaaagaaactgggttccagtcttaattcattttccgtgccaggttttatttcgtgtgtgtgtgagtgtgttctgttttgtgttttgttttttgttgttgttttcagttgtttggttttcttttctttcccccctccggtcccatacttcacagcactctggtgcgggaagaagcagaagcaaaaaaaataaaaataaaaaaataaataaaaataaaaaaaataaaaaaggaaaaaaaaaaagaagaaacaagacatgccacctttcccctcgcactgttgcttttcctgatggttaatactactgtcacgtagctgtgtacaaagagatgtgaaatactttcaggcaaaaataaactgtaagtgactcatcaatgtctggcctttgtgtggtttctcggcgcccagcgggagaaggtccaaggagggggcgaagcccaggcgggaaatctgaggctcaagacagtgccgggatgccctcgccaccttctgtgcgcacttcctgaggaccagggctcagcatcctggctgctgttggccactggggccggagctgtcttcattgcaggggggctgttgtgttcattgccagacattgaacagcatccttggcttctacccagcagtagcaccccttcctcatttatgacaaccagagtgtctccagatgttgccacgt

SEQ ID NO: 417786 - DNA, 1904 bp, Homo sapiens
cacgaggccaagggcggggggcgagttcgcagctcagctcggagcctctaggaagaaagcatccttcgtccggcccgcaatggtggcaagaagacccagtcacatcactgcacccgtcctgtgtcctcaccattgctatgcaaagtgattcttgttgtacataagatttaaataatgcacctatttaagacatgttgacaaattgcgggtctgggacccgcctcttatttatgaagtctttgaccgtcccccccgcccgaccccaccgccctcccgcccccacctggcgtgtagtactgtataaaccagtcagctgtcgggttagtggtagtattattgttatttttttaaaggaaacaaacagacaacaaaaagaagaaaaaaaaaaagaacctccttggaaaaattaattgctttttcgtaatggattctctatgctaatgctctctcgtctgtctgtctgtctgcccactcccccacccaccactgtgcgtttctgatttccaaatgtctccaactccctcacgaggtggggctcaggctggaggaggagggattaagatccccttgctccactaaggcccaagctctttctctcggcaccttttagacttgaatgggaggctgctaacccgccctctccagtccaccccggtaaaagagctgttccccacccccagggagctcctgtccctgtcagcctttgctgtcccctgtccccaacggagactctgtcacccctgggctccccctgccatcgtgtgcttcacgtggccccatgcatgcccgcctctctgcatggtctcttgggaaaagagagatgtgtcgcctccgccagtccgactgccctccccaccccacccccgccaccccccacatgtgaccactgcaacgaagacactccttctgtccccacctgctccgaagacaaaccaacctccgtttcttttataaacagtcggctttttcttaataagccctcactgtacagaacagcccgttgatggtttatttggggtccccctctccccccagcccttttttctgttggtttagcacaaatacttccctcctccggcacctccaaacctaccccacagtcagtgtacttgttttatatatatttaatcttattcaatggaaaccatgcttttgtcgttttatactttgctaggtagactttattacccccccactatgccctcatttttttaaaaaaggaaaaaaaaaagaaactgggttccagtcttaattcattttccgtgccaggttttatttcgtgtgtgtgtgagtgtgttctgttttgtgttttgttttttgttgttgttttcagttgtttggttttcttttctttcccccctccggtcccatacttcacagcactctggtgcgggaagaagcagaagcaaaaaaaataaaaataaaaaaataaataaaaataaaaaaaataaaaaaggaaaaaaaaaaagaagaaacaagacatgccacctttcccctcgcactgttgcttttcctgatggttaatactactgtcacgtagctgtgtacaaagagatgtgaaatactttcaggcaaaaataaactgtaagtgactcatcaatgtctggcctttgtgtggtttctcggcgcccagcgggagaaggtccaaggagggggcgaagcccaggcgggaaatctgaggctcaagacagtgccgggatgccctcgccaccttctgtgcgcacttcctgaggaccagggctcagcatcctggctgctgttggccactggggccggagctgtcttcattgcaggggggctgttgtgttcattgccagacattgaacagcatccttggcttctacccagcagtagcaccccttcctcatttatgacaaccagagtgtctccagatgttgccacgt

SEQ ID NO: 417787 - DNA, 3331 bp, Homo sapiens
  misc_feature (35)..(35): n is a, c, g, or t
  misc_feature (38)..(38): n is a, c, g, or t
cgaggagaccaagccgctgctggggggcgacgtcnccngagcacgaagatgggcgccgtgcctgccgccgggtcttctgctttgaacgggatgaggtacaaatgctgcaggagggcgacattcaggtctgtgtcatccggcacccgcggacctttctcagcaagatcctcacctcgaaattcctgaggcgctgggagccgcaccacctaacgctggccgacaacagcctggcgtccgccacgccaactgggtacatggaaaactcagtctcctacagcgcaattgaagacgttcagctgctgtcctgggagaatgccccgaagtactgtttacagctcacgattcctgggggaactgtcttactgcaggctgccaatagctacctgcgagaccagtggttccattctctgcaatggaagaaaaagatttacaaatataagaaagtgctgagtaacccaagccgctgggaagttgtcttgaaagagatccggaccctggtggacatggccctgacatcccccctgcaggatgactccatcaaccaggccccactggaaatcgtctcgaaactgctctcagagaacacaaacttgaccacccaggagcatgaaaacatcattgtggcaatcgctcctttgctggaaaacaaccacccaccaccagatctctgtgaattcttttgcaagcactgcagagagcggccccggtccatggtggtcatcgaggtgttcacccccgtggtgcagcgaatcctcaagcataacatggactttgggaagtgcccgcgactgaggctgtttactcaggagtacatccttgccttgaacgagctcaacgcggggatggaagtggtgaagaagttcattcagagcatgcacggcccacagggcactgcccccacccccgggtcctgcccaacctggtggccgtgtgcctggctgccatctactcctgctatgaagagttcatcaacagccgcgacaattccccaagcctgaaggaaatccggaacggctgccagcagccgtgcgaccggaagcccactttacctctgcgccttctgcaccccagcccggacctggtgtctcaggaagccacgctgtctgaggcccggctcaagtcggtggtcgtggcctccagtgagatccacgtggaggtggaacgcaccagcactgccaagccggcgctgacggccagcgcaggcaacgacagcgagcccaacctcatcgactgcctcatggtcagccccgcctgcagcaccatgagcatcgagctgggcccccaggccgaccgcacgctcggctgctacgtggaaatcctcaagctgctgtcagactatgatgactggagaccgtctctggccagtttgcttcaacccattccattccccaaagaagctctcgcacatgagaagttcaccaaggaactgaagtacgtgattcagaggttcgccgaagaccccaggcaagaggtccactcatgcctgctgagcgtgcgggccggcaaagatggctggttccagctctacagccccggaggggtggcctgcgacgatgacggggagctgttcgccagcatggtgcacatcctcatgggctcctgttacaagaccaaaaaattcctgctctccctggcagaaaacaagctgggtccctgcatgctcctggcactgagggggaaccagaccatggtggagatcctgtgcttgatgctggaatacaacatcatcgacaacaacgacacccaactgcagatcatctcaaccctggagagcacagacgtggggaagcgcatgtacgagcagctgtgtgaccggcagcgggagctgaaggagctgcaaaggaaaggcgggcccaccaggctaacactgccctccaagtccacagacgctgacttggctcgtttgctgagctccggctccttcggaaacctggagaacctcagtttggccttcaccaatgtaaccagtgcctgcgccgagcacctcatcaaactgccttcgctcaagcagctgaacctgtggtccactcagtttggagacgctggccttcggctcctgtcggaacacctcaccatgctccaggtgctgaacctgtgcgagaccccggtcacagacgctggcctgctggccctgagctccatgaagagtctctgcagtttaaacatgaacagcaccaagctctcagctgacacctacgaagatctgaaggccaagcttcccaatttgaaggaagtggacgtccgctacaccgaagcctggtgaagctcccagctcaaggcaggaagacccccgccaccccccacatgtgaccactgcaacgaagacactccttctgtccccacctgctccgaagacaaaccaacctccgtttcttttataaacagtcggctttttcttaataagccctcactgtacagaacagcccgttgatggtttatttggggtccccctctccccccagcccttttttctgttggtttagcacaaatacttccctcctccggcacctccaaacctaccccacagtcagtgtacttgttttatatatatttaatcttattcaatggaaaccatgcttttgtcgttttatactttgctaggtagactttattacccccccactatgccctcatttttttaaaaaaggaaaaaaaaaagaaactgggttccagtcttaattcattttccgtgccaggttttatttcgtgtgtgtgtgagtgtgttctgttttgtgttttgttttttgttgttgttttcagttgtttggttttcttttctttcccccctccggtcccatacttcacagcactctggtgcgggaagaagcagaagcaaaaaaaataaaaataaaaaaataaataaaaataaaaaaaataaaaaaggaaaaaaaaaaagaagaaacaagacatgccacctttcccctcgcactgttgcttttcctgatggttaatactactgtcacgtagctgtgtacaaagagatgtgaaatactttcaggcaaaaataaactgtaagtgactcatcaatgtctggcctttgtgtggtttctcggcgcccagcgggagaaggtccaaggagggggcgaagcccaggcgggaaatctgaggctcaagacagtgccgggatgccctcgccaccttctgtgcgcacttcctgaggaccagggctcagcatcctggctgctgttggccactggggccggagctgtcttcattgcaggggggctgttgtgttcattgccagacattgaacagcatccttggcttctacccagcagtagcaccccttcctcatttatgacaaccagagtgtctccagatgttgccacgt

SEQ ID NO: 417788 - DNA, 536 bp, Homo sapiens
  misc_feature (35)..(35): n is a, c, g, or t
  misc_feature (38)..(38): n is a, c, g, or t
  misc_feature (525)..(525): n is a, c, g, or t
cgaggagaccaagccgctgctggggggcgacgtcnccngagcacgaagatgggcgccgtgcctgccgccgggtcttctgctttgaacgggatgaggtacaaatgctgcaggagggcgacattcaggtctgtgtcatccggcacccgcggacctttctcagcaagatcctcacctcgaaattcctgaggcgctgggagccgcaccacctaacgctggccgacaacagcctggcgtccgccacgccaactgggtacatggaaaactcagtctcctacagcgcaattgaagacgttcagctgctgtcctgggagaatgccccgaagtactgtttacagctcacgattcctgggggaactgtcttactgcaggctgccaatagctacctgcgagaccagtggttccattctctgcaatggaagaaaaagatttacaaatataagaaagtgctgagtaacccaagccgctgggaagttgtcttgaaagagatccggaccctggtggacatggccctgtgaaatagggatnttagatcacct

SEQ ID NO: 417789 - DNA, 3481 bp, Homo sapiens
  misc_feature (35)..(35): n is a, c, g, or t
  misc_feature (38)..(38): n is a, c, g, or t
  misc_feature (2407)..(2407): n is a, c, g, or t
cgaggagaccaagccgctgctggggggcgacgtcnccngagcacgaagatgggcgccgtgcctgccgccgggtcttctgctttgaacgggatgaggtacaaatgctgcaggagggcgacattcaggtctgtgtcatccggcacccgcggacctttctcagcaagatcctcacctcgaaattcctgaggcgctgggagccgcaccacctaacgctggccgacaacagcctggcgtccgccacgccaactgggtacatggaaaactcagtctcctacagcgcaattgaagacgttcagctgctgtcctgggagaatgccccgaagtactgtttacagctcacgattcctgggggaactgtcttactgcaggctgccaatagctacctgcgagaccagtggttccattctctgcaatggaagaaaaagatttacaaatataagaaagtgctgagtaacccaagccgctgggaagttgtcttgaaagagatccggaccctggtggacatggccctgacatcccccctgcaggatgactccatcaaccaggccccactggaaatcgtctcgaaactgctctcagagaacacaaacttgaccacccaggagcatgaaaacatcattgtggcaatcgctcctttgctggaaaacaaccacccaccaccagatctctgtgaattcttttgcaagcactgcagagagcggccccggtccatggtggtcatcgaggtgttcacccccgtggtgcagcgaatcctcaagcataacatggactttgggaagtgcccgcgactgaggctgtttactcaggagtacatccttgccttgaacgagctcaacgcggggatggaagtggtgaagaagttcattcagagcatgcacggcccacagggcactgcccccacccccgggtcctgcccaacctggtggccgtgtgcctggctgccatctactcctgctatgaagagttcatcaacagccgcgacaattccccaagcctgaaggaaatccggaacggctgccagcagccgtgcgaccggaagcccactttacctctgcgccttctgcaccccagcccggacctggtgtctcaggaagccacgctgtctgaggcccggctcaagtcggtggtcgtggcctccagtgagatccacgtggaggtggaacgcaccagcactgccaagccggcgctgacggccagcgcaggcaacgacagcgagcccaacctcatcgactgcctcatggtcagccccgcctgcagcaccatgagcatcgagctgggcccccaggccgaccgcacgctcggctgctacgtggaaatcctcaagctgctgtcagactatgatgactggagaccgtctctggccagtttgcttcaacccattccattccccaaagaagctctcgcacatgagaagttcaccaaggaactgaagtacgtgattcagaggttcgccgaagaccccaggcaagaggtccactcatgcctgctgagcgtgcgggccggcaaagatggctggttccagctctacagccccggaggggtggcctgcgacgatgacggggagctgttcgccagcatggtgcacatcctcatgggctcctgttacaagaccaaaaaattcctgctctccctggcagaaaacaagctgggtccctgcatgctcctggcactgagggggaaccagaccatggtggagatcctgtgcttgatgctggaatacaacatcatcgacaacaacgacacccaactgcagatcatctcaaccctggagagcacagacgtggggaagcgcatgtacgagcagctgtgtgaccggcagcgggagctgaaggagctgcaaaggaaaggcgggcccaccaggctaacactgccctccaagtccacagacgctgacttggctcgtttgctgagctccggctccttcggaaacctggagaacctcagtttggccttcaccaatgtaaccagtgcctgcgccgagcacctcatcaaactgccttcgctcaagcagctgaacctgtggtccactcagtttggagacgctggccttcggctcctgtcggaacacctcaccatgctccaggtgctgaacctgtgcgagaccccggtcacagacgctggcctgctggccctgagctccatgaagagtctctgcagtttaaacatgaacagcaccaagctctcagctgacacctacgaagatctgaaggccaagcttcccaatttgaaggaagtggacgtccgctacaccgaagcctggtgaagctcccagctcaaggcaggaagacgtttgcaaccgcgacaaaataactcttgactaacagccgcagagcagccggtcctggggtcccaccctggtgccctggctgtgagatagatggggagtctttctgggggcggagggggnagggggtggggagggggcccacaagcacgcccagcccccgccgaattcttttagcttcgtaattggaacctttgacctgatctaaagtggactttgtagcaacaagaggagcatcagcgggtcggggaggggtttgggggtgggctggggggtgggggaccctttgtggattttctttgcctttgtgtttgatgccgtcgtgtgggaaaagtcaactccgatgccaccattgcgggccggacgaaggatgctttcttcctagaggctccgagctgagctgcgaactcgccccccgcccttgggacaagaagacccagtcacatcactgcacccgtcctgtgtcctcaccattgctatgcaaagtgattcttgttgtacataagatttaaataatgcacctatttaagacatgttgacaaattgcgggtctgggacccgcctcttatttatgaagtctttgaccgtcccccccgcccgaccccaccgccctcccgcccccacctggcgtgtagtactgtataaaccagtcagctgtcgggttagtggtagtattattgttatttttttaaaggaaacaaacagacaacaaaaagaagaaaaaaaaaaagaacctccttggaaaaattaattgctttttcgtaatggattctctatgctaatgctctctcgtctgtctgtctgtctgcccactcccccacccaccactgtgcgtttctgatttccaaatgtctccaactccctcacgaggtggggctcaggctggaggaggagggattaagatccccttgctccactaaggcccaagctctttctctcggcaccttttagacttgaatgggaggctgctaacccgccctctccagtccaccccggtaaaagagctgttccccacccccagggagctcctgtccctgtcagcctttgctgtcccctgtccccaacggagactctgtcacccctgggctccccctgccatcgtgtgcttcacgtggccccatgcatgcccgcctctctgcatggtctcttgggaaaagagagatgtgtcgcctccgcaccccaagggtggccaggtac

SEQ ID NO: 417790 - DNA, 3775 bp, Homo sapiens
  misc_feature (35)..(35): n is a, c, g, or t
  misc_feature (38)..(38): n is a, c, g, or t
  misc_feature (2407)..(2407): n is a, c, g, or t
cgaggagaccaagccgctgctggggggcgacgtcnccngagcacgaagatgggcgccgtgcctgccgccgggtcttctgctttgaacgggatgaggtacaaatgctgcaggagggcgacattcaggtctgtgtcatccggcacccgcggacctttctcagcaagatcctcacctcgaaattcctgaggcgctgggagccgcaccacctaacgctggccgacaacagcctggcgtccgccacgccaactgggtacatggaaaactcagtctcctacagcgcaattgaagacgttcagctgctgtcctgggagaatgccccgaagtactgtttacagctcacgattcctgggggaactgtcttactgcaggctgccaatagctacctgcgagaccagtggttccattctctgcaatggaagaaaaagatttacaaatataagaaagtgctgagtaacccaagccgctgggaagttgtcttgaaagagatccggaccctggtggacatggccctgacatcccccctgcaggatgactccatcaaccaggccccactggaaatcgtctcgaaactgctctcagagaacacaaacttgaccacccaggagcatgaaaacatcattgtggcaatcgctcctttgctggaaaacaaccacccaccaccagatctctgtgaattcttttgcaagcactgcagagagcggccccggtccatggtggtcatcgaggtgttcacccccgtggtgcagcgaatcctcaagcataacatggactttgggaagtgcccgcgactgaggctgtttactcaggagtacatccttgccttgaacgagctcaacgcggggatggaagtggtgaagaagttcattcagagcatgcacggcccacagggcactgcccccacccccgggtcctgcccaacctggtggccgtgtgcctggctgccatctactcctgctatgaagagttcatcaacagccgcgacaattccccaagcctgaaggaaatccggaacggctgccagcagccgtgcgaccggaagcccactttacctctgcgccttctgcaccccagcccggacctggtgtctcaggaagccacgctgtctgaggcccggctcaagtcggtggtcgtggcctccagtgagatccacgtggaggtggaacgcaccagcactgccaagccggcgctgacggccagcgcaggcaacgacagcgagcccaacctcatcgactgcctcatggtcagccccgcctgcagcaccatgagcatcgagctgggcccccaggccgaccgcacgctcggctgctacgtggaaatcctcaagctgctgtcagactatgatgactggagaccgtctctggccagtttgcttcaacccattccattccccaaagaagctctcgcacatgagaagttcaccaaggaactgaagtacgtgattcagaggttcgccgaagaccccaggcaagaggtccactcatgcctgctgagcgtgcgggccggcaaagatggctggttccagctctacagccccggaggggtggcctgcgacgatgacggggagctgttcgccagcatggtgcacatcctcatgggctcctgttacaagaccaaaaaattcctgctctccctggcagaaaacaagctgggtccctgcatgctcctggcactgagggggaaccagaccatggtggagatcctgtgcttgatgctggaatacaacatcatcgacaacaacgacacccaactgcagatcatctcaaccctggagagcacagacgtggggaagcgcatgtacgagcagctgtgtgaccggcagcgggagctgaaggagctgcaaaggaaaggcgggcccaccaggctaacactgccctccaagtccacagacgctgacttggctcgtttgctgagctccggctccttcggaaacctggagaacctcagtttggccttcaccaatgtaaccagtgcctgcgccgagcacctcatcaaactgccttcgctcaagcagctgaacctgtggtccactcagtttggagacgctggccttcggctcctgtcggaacacctcaccatgctccaggtgctgaacctgtgcgagaccccggtcacagacgctggcctgctggccctgagctccatgaagagtctctgcagtttaaacatgaacagcaccaagctctcagctgacacctacgaagatctgaaggccaagcttcccaatttgaaggaagtggacgtccgctacaccgaagcctggtgaagctcccagctcaaggcaggaagacgtttgcaaccgcgacaaaataactcttgactaacagccgcagagcagccggtcctggggtcccaccctggtgccctggctgtgagatagatggggagtctttctgggggcggagggggnagggggtggggagggggcccacaagcacgcccagcccccgccgaattcttttagcttcgtaattggaacctttgacctgatctaaagtggactttgtagcaacaagaggagcatcagcgggtcggggaggggtttgggggtgggctggggggtgggggaccctttgtggattttctttgcctttgtgtttgatgccgtcgtgtgggaaaagtcaactccgatgccaccattgcgggccggacgaaggatgctttcttcctagaggctccgagctgagctgcgaactcgccccccgcccttgggacaagaagacccagtcacatcactgcacccgtcctgtgtcctcaccattgctatgcaaagtgattcttgttgtacataagatttaaataatgcacctatttaagacatgttgacaaattgcgggtctgggacccgcctcttatttatgaagtctttgaccgtcccccccgcccgaccccaccgccctcccccccagcccttttttctgttggtttagcacaaatacttccctcctccggcacctccaaacctaccccacagtcagtgtacttgttttatatatatttaatcttattcaatggaaaccatgcttttgtcgttttatactttgctaggtagactttattacccccccactatgccctcatttttttaaaaaaggaaaaaaaaaagaaactgggttccagtcttaattcattttccgtgccaggttttatttcgtgtgtgtgtgagtgtgttctgttttgtgttttgttttttgttgttgttttcagttgtttggttttcttttctttcccccctccggtcccatacttcacagcactctggtgcgggaagaagcagaagcaaaaaaaataaaaataaaaaaataaataaaaataaaaaaaataaaaaaggaaaaaaaaaaagaagaaacaagacatgccacctttcccctcgcactgttgcttttcctgatggttaatactactgtcacgtagctgtgtacaaagagatgtgaaatactttcaggcaaaaataaactgtaagtgactcatcaatgtctggcctttgtgtggtttctcggcgcccagcgggagaaggtccaaggagggggcgaagcccaggcgggaaatctgaggctcaagacagtgccgggatgccctcgccaccttctgtgcgcacttcctgaggaccagggctcagcatcctggctgctgttggccactggggccggagctgtcttcattgcaggggggctgttgtgttcattgccagacattgaacagcatccttggcttctacccagcagtagcaccccttcctcatttatgacaaccagagtgtctccagatgttgccacgt

SEQ ID NO: 417791 - DNA, 363 bp, Homo sapiens
gaccctggtggacatggccctgacatcccccctgcaggatgactccatcaaccaggccccactggaaatcgtctcgaaactgctctcagaggtaaaacccctcccctggacccctttacattgtttgcctttccctccaccgatcaccggctccatgccaagcagcaggcgcaggcagagctccgtgtgggctgtgttgttgccctgctgccgaaggaggtgagcagttgcccacccagccgtgtgtgggagttgggagagggaggcttgccccagctgcttgcagctgtgctgtctggggattgtaggcaccgaagaggaggtgttgccccgtgcagtgagagccagtagtcccatccccat

SEQ ID NO: 417792 - DNA, 185 bp, Homo sapiens
aaaaggttaatgaaattcttcatgactttttggaagaaaattcagtttgggtttctgccaatgtctggaaactttcccagtatgtccaactaacctgaatgatacaagccacttaaaaaaatcaatactataactaagacttcaaccaaatgggttctgaaaaggtgtcttcatttaaatgagta

SEQ ID NO: 417793 - DNA, 428 bp, Homo sapiens
atattgacaataaccaataaaaatacagtaattaaaatagcatattccttaaaacattcagataatttcactagttttcaattaaaaaaaagatgaacctaaaattttgtaatgatactctattttctgtggacatgaaacaaatataaataactggcaatgtaatgaaatctgtatatatatttcagaaataaagttataaatacagtaatagaagaggctttgaaatactaatgtcctagcttcagcctggtgatttacaactgtagtgttgattaagcttttgtagaatgtaactaaaatttcatttagttgtttaacaaataactagcaaaggggaaaatttatgattggaagcattttcatttaaattgaaaagcaatttaaaataaggcctatggctataataaaattagtcatagaaatgt

SEQ ID NO: 417794 - DNA, 633 bp, Homo sapiens
aggagagcccgtttataaacgttgaccaaagtgccagaactcgtgggcgctgtgtctgtggcaagaccccgagctgtggagaccgaaagagctgcataaattccagctttattacctgatctcactttgtcactcaggttggagtgcagtggcacaatcacagttcattgcagcctcaacctcctgggctcaggctgcctggagttgggagaggagcaatacaacacccctgtagccaccaccactgggacagcactgggtcagacctgaagccggcacagcgctgtgactgcccaagacccccactgtaacaacaacccagctgccacctatttcactcaaggccccagggctctccaattagcaggtagtgaagccagccaggcttctgtccttcccttcagtgcagtaagctcccctggtccctagatgcattcaaaggtgctgtctgagagccagggctctcagtcataaaccttataaatctacctggtgttctgttctaccatcgctgagctggcactgaatccacccggcaaatcccttcccactctcccctcccctctccccaggcagggtagtctgttcccacctacgacgtcatcacagtctcatgcggattactgccagctc

SEQ ID NO: 417795 - DNA, 407 bp, Homo sapiens
tttttagtaaaacaaagggtaaaatttaataaaaaggcacaaacacattttgtgtatattgtgaaaataccatctatttcctccaaaagcttataaattgatatgagtatcataaacctgtttatttttctcctggactaagtattgttcaacgtttaatgtgtattatgtacagggaggtaatgtgggaccagattttctggttgggaaaggagatgagtactggttttagtacaataagtttccatgcttgtgtagcacaactggagatgccttcatgtaacagacatatgaagaggttgagagagtaggctggagattggaagctatccaagtaaaattgaagcctaggatttgatgagtttgtgtatttgataaagaatagtgtaagagttgtaactggaaac

SEQ ID NO: 417796 - DNA, 213 bp, Homo sapiens
  misc_feature (33)..(33): n is a, c, g, or t
  misc_feature (181)..(181): n is a, c, g, or t
attcatggcccacaaaggagagagaagacctcngatctcttgtgccatgctcactatgctatgtgaaatttgctatgttagaccttgacatcctggatggtggggatgatgactggtttctctgcacagccctgggccagtatcctgcccagcccttaggagtcctcatggaatgagctcngctcccgcgatgctcctgtttgtccactgagg

SEQ ID NO: 417797 - DNA, 561 bp, Homo sapiens
cgcctttccagaccgaaccaatgttcatcttgcacatgttggttgatgtctcatgtctccctaaaatgtataaaaccaaactgtggtctgaccaccttgggcacatgttgtcaggacctcctgagcctgtatcatgggtgtgtgtcctcaaccttggcaaaataaactttctaaattaactgagacctgtctcaggtttttgaggttcacaattaatagtcaatgacgtgagagagaagccctcctcctctcccggttgtggacctttctgtattatcttgcacccaactcagaccagaaggcacagaagaccccatgactcttctaccctccgtgttcaatatgcctctcccgaaaggaacacagccccacctaattggatgtgtgggcctgtgtggacagtgttgaagccccactaagcttcccagacgttatctatataaatgacccctaaacctctccacttgggagcaccaacttccattctttggaatctgtgtacccaggtggcctttctcaagcattgtgtgcaaataaattacatttaaccatattccatat

SEQ ID NO: 417798 - DNA, 829 bp, Homo sapiens
ctgagcacaagctgtctccacaaagccaaccaaagaggcaacattcacaggctgacaaagcatccctaaagcaggaaagaaaagaagcccctgaggctgctgcccggagaaggagaaggctttcaacattcataccagtctgttggggcattgtgcagaccacagagggagagtaactgatggaatactctctgaagttcacacttgggcgaagctgcatgtttaacatcaggagtgggaggaaagtgtaagttacaaaataaacaaataaaaagacagatataaaaataagaaggaaatgcagtgtcagtgtggtaacaccagggactggtgatgtctgttgcatattaggcttctggtgaactcaattaattatttccaagcagaatttttgtgaatttatagtttacatatagtttgcatgtcatttattttttaatgtaagcagtaggaagagtcatttcttgaaagtacaaatgacttttgtttggaaacactttaaaaatggtaacagtgactaaagatcatcaaatgatatctaaaatatggattaactataatacatctgttctccctgggcagacggttagttaatcctttataaattaattacaatgacatcattggagatctcacaaatggattgtacaagaatataccagctctgacttaatgtggccctgagatctgagccttttctctttacttatctattaacctcgtctctacacttgctccccatccctacgtatgcatctttctacccattcagcactcaccaaggagctcactaatttcttcactgtatttacctctgtcatcacctccc

SEQ ID NO: 417799 - DNA, 347 bp, Homo sapiens
  misc_feature (248)..(248): n is a, c, g, or t
ctgagcacaagctgtctccacaaagccaaccaaagaggcaacattcacaggctgacaaagcatccctaaagcaggaaagaaaagaagcccctgaggctgctgcccggagaaggagaaggctttcaacattcataccagtctgttggggcattgtgcagaccacagagggagagtaactgatggaatactctctgaagttcacacttgggcgaagctgcatgtttaacatcaggagtgggaggaaaaanccatttggtctagcgtggtttaggcagtaccagaagggatggggcagacggtacacttctataaattaaagaaccttgccagtgatgtatttattaaag

SEQ ID NO: 417800 - DNA, 412 bp, Homo sapiens
  misc_feature (1)..(1): n is a, c, g, or t
  misc_feature (139)..(139): n is a, c, g, or t
  misc_feature (156)..(156): n is a, c, g, or t
  misc_feature (400)..(400): n is a, c, g, or t
ngagagtatataaagctttatttttaagatataaaaacaatactagtttgaaactactttgttttatttttagtttttctgaaattaatatatgtaaaaaaattcataattttgtagataagagtgtgagcacaaactntgcaatggggtacctcnctcaactgtatggttcaaggcgctgtgtagttgatacaacggtgaagaaaataaatcttgggcccccaaatcctcagctaaagggaaagtcaagctgggaactgcttagggaaaacagcctcccattttgttcagaatcaaaataattgattttgttcattttgctcactctaattgcctcctttggaaaggctaatcagaaactcaaaagaatgcagccatttgtctcttatctacctatganctggaagccccc

SEQ ID NO: 417801 - DNA, 1083 bp, Homo sapiens
atgggcaaaggcttccctggaatctcccacactgtctgctccctataaaaggcaggcagatgggccagaggagcagagaggctgagaccaacccagaaaccaccacctctcacgccaaagctcacaccttcagcctccaacatgaaggtctccgcagcacttctgtggctgctgctcatagcagctgccttcagcccccaggggctcgctgggccagcttctgtcccaaccacctgctgctttaacctggccaataggaagataccccttcagcgactagagagctacaggagaatcaccagtggcaaatgtccccagaaagctgtgatcttcaagaccaaactggccaaggatatctgtgccgaccccaagaagaagtgggtgcaggattccatgaagtatctggaccaaaaatctccaactccaaagccataaataatcaccatttttgaaaccaaaccagagcctgagtgttgcctaatttgttttcccttcttacaatgcattctgaggtaacctcattatcagtccaaagggcatgggttttattatatatatatatattttttttttaaaaaaaaacgtattgcatttaatttattgaggctttaaaacttatcctccatgaatatcagttatttttaaactgtaaagctttgtgcagattctttaccccctgggagccccaattcgatcccctgtcacgtgtgggcaatgttccccctctcctctcttcctccctggaatcttgtaaaggtcctggcaaagatgatcagtatgaaaatgtcattgttcttgtgaacccaaagtgtgactcattaaatggaagtaaatgttgttttaggaatacataaagtatgtgcatattttattatagtcactagttgtaatttttttgtgggaaatccacactgagctgagggggacaaagatggctgtggccaagaggggcttggttaagggggtgggaactatgtccctgggaaatgagtttttggcttagctggtcttcattgaaatgcagggtgaaactgacaaacccattccagccctctattcccattttcaacagtatttcccaga

SEQ ID NO: 417802 - DNA, 826 bp, Homo sapiens
gcattttttcaagttttatgatttatttaacttgtggaacaaaaataaaccagaaaccaccacctctcacgccaaagctcacaccttcagcctccaacatgaaggtctccgcagcacttctgtggctgctgctcatagcagctgccttcagcccccaggggctcgctgggccagcttctgtcccaaccacctgctgctttaacctggccaataggaagataccccttcagcgactagagagctacaggagaatcaccagtggcaaatgtccccagaaagctgtgatcttcaagaccaaactggccaaggatatctgtgccgaccccaagaagaagtgggtgcaggattccatgaagtatctggaccaaaaatctccaactccaaagccataaataatcaccatttttgaaaccaaaccagagcctgagtgttgcctaatttgttttcccttcttacaatgcattctgaggtaacctcattatcagtccaaagggcatgggttttattatatatatatatattttttttttaaaaaaaaacgtattgcatttaatttattgaggctttaaaacttatcctccatgaatatcagttatttttaaactgtaaagctttgtgcagattctttaccccctgggagccccaattcgatcccctgtcacgtgtgggcaatgttccccctctcctctcttcctccctggaatcttgtaaaggtcctggcaaagatgatcagtatgaaaatgtcattgttcttgtgaacccaaagtgtgactcattaaatggaagtaaatgttgttttaggaatacataaagtatgtgcatattt

SEQ ID NO: 417803 - DNA, 869 bp, Homo sapiens
atgggcaaaggcttccctggaatctcccacactgtctgctccctataaaaggcaggcagatgggccagaggagcagagaggctgagaccaacccagaaaccaccacctctcacgccaaagctcacaccttcagcctccaacatgaaggtctccgcagcacttctgtggctgctgctcatagcagctgccttcagcccccaggggctcgctgggccagcttctgtcccaaccacctgctgctttaacctggccaataggaagataccccttcagcgactagagagctacaggagaatcaccagtggcaaatgtccccagaaagctgtgatcttcaagaccaaactggccaaggatatctgtgccgaccccaagaagaagtgggtgcaggattccatgaagtatctggaccaaaaatctccaactccaaagccataaataatcaccatttttgaaaccaaaccagagcctgagtgttgcctaatttgttttcccttcttacaatgcattctgaggtaacctcattatcagtccaaagggcatgggttttattatatatatatatattttttttttaaaaaaaaacgtattgcatttaatttattgaggctttaaaacttatcctccatgaatatcagttatttttaaactgtaaagctttgtgcagattctttaccccctgggagccccaattcgatcccctgtcacgtgtgggcaatgttccccctctcctctcttcctccctggaatcttgtaaaggtcctggcaaagatgatcagtatgaaaatgtcattgttcttgtgaacccaaagtgtgactcattaaatggaagtaaatgttgttttaggaatacataaagtatgtgcatattt

SEQ ID NO: 417804 - DNA, 289 bp, Homo sapiens
atttcagtttttttctaaacctaatgcaaagtagtaatatcacggatttggtagacatttttcttatcacaatgcttatttctacaccttcacagcattttcctatgcttaccactttaaggagatcagaattactgtctcagtttggctggggctgctcagtccaaaatttggaactgagatgagttacagatttcagtttagttagagtttctgaattgcatcagaacagctgggtctacttccagagtggtccctcctgaggtttattttgactcatggttctaca

SEQ ID NO: 417805 - DNA, 517 bp, Homo sapiens
tagcagcacaattcacaattgcaaaattgtggaaccaacccaaatacccatcaatcaatgaatggataaagaaacatatatatatatgatggaatactacacagccataaaaaggaatgaattaacaccattttcagtgacctgaatgagattggagactattattctaagtgaagtgactcaggaatggaaaaccaaacatcgtatgttctcactgatatgtgggggctaagctatgagaatgcaaaggcataagaatgataaaatggactttggggacttggggggaagagtgggagaggggcaagagataaaagactacaaatatggtgcagtttatacataggtgatggggtgcaccaaaatctcacagatcaccactaaagaatttactcatgtaaccaaataccaccggtaccccaacaacttatggacaaataaaataaataaataaaaatatctaaaagggcataattgaattgtttgtaacacaaagaataaatgcttgaggtgatgg

SEQ ID NO: 417806 - DNA, 162 bp, Homo sapiens
atcagtggtctaccacagcttaagtaacgggtcatatttggagtatcacacatctcagtcttgtagaaattaggaacagcaattaggagtcatgcacatataagagatgtaatcccaccctttgactatagcctactcttgtcttttacagaaaagactgtg

SEQ ID NO: 417807 - DNA, 435 bp, Homo sapiens
  misc_feature (1)..(1): n is a, c, g, or t
  misc_feature (47)..(47): n is a, c, g, or t
  misc_feature (74)..(74): n is a, c, g, or t
ngttcaagaccagcctgaccaacacgtgaagccccatctctactaanaatacaaaaattagccgggcctggtgnatcctcctgagtagctgggattacaggtgtatgctaccacacttggctacattttgtatttttggtagagaagaggtttcaccatgttggccagactggtctcgaactcccaacctcaggtgattcgcctgcctcggcctcacaaagtgctggtatgcatctgttcttatgccagaactacactgttttgactatgtagttttgtaggaagttttgaaatcagaaagtatgaatcctccagctttgtgcatcttttcaaagactgctttggctatttggggtcctttaatattccatatgaattttcagatgggtttttctgtttctgtaaaaaatgtgattgggactttggtaaggggcg

SEQ ID NO: 417808 - DNA, 430 bp, Homo sapiens
ttttttacatggagtcttgctgtcttgcccaggctggagtgcagtggcatgatcttggctcacggcaacctctgcctcccgggttcaagcgattctcttgcctcagcctcctgagtagctgggattacaggcgcaccaccacacccagctaatttttgtatttttagtagagacggggtttcaccatgttggccaggctggtctccagctcctgacctcaggtgatccaccctcctcagcttcccacagtgctgagattacaggtgtgagccaccgggcccggacttacccagcttttctaatttatttcccctgatagcttggcttcttcaaacgccactacaaggaaatgctggaggacaagcctgaagacactgccacattcagtggggacgatttcagctgtgtggccccaaatgtgcctttgtcc

SEQ ID NO: 417809 - DNA, 3486 bp, Homo sapiens
  misc_feature (1389)..(1389): n is a, c, g, or t
atgaccttcggcactgtgcttcttctgagtgtcctggcttcttatcatggattcaacctggatgtggaggagcctacgatcttccaggaggatgcaggcggctttgggcagagcgtggtgcagttcggtggatctcgactcgtggtgggagcacccctggaggtggtggcggccaaccagacgggacggctgtatgactgcgcagctgccaccggcatgtgccagcccatcccgctgcacatccgccctgaggccgtgaacatgtccttgggcctgaccctggcagcctccaccaacggctcccggctcctggcctgtggcccgaccctgcacagagtctgtggggagaactcatactcaaagggttcctgcctcctgctgggctcgcgctgggagatcatccagacagtccccgacgccacgccagagtgtccacatcaagagatggacatcgtcttcctgattgacggctctggaagcattgaccaaaatgactttaaccagatgaagggctttgtccaagctgtcatgggccagtttgagggcactgacaccctgtttgcactgatgcagtactcaaacctcctgaagatccacttcaccttcacccaattccggaccagcccgagccagcagagcctggtggatcccatcgtccaactgaaaggcctgacgttcacggccacgggcatcctgacagtggtgacacagctatttcatcataagaatggggcccgaaaaagtgccaagaagatcctcattgtcatcacagatgggcagaagtacaaagaccccctggaatacagtgatgtcatcccccaggcagagaaggctggcatcatccgctacgctatcggggtgggacacgctttccagggacccactgccaggcaggagctgaataccatcagctcagcgcctccgcaggaccacgtgttcaaggtggacaactttgcagcccttggcagcatccagaagcagctgcaggagaagatctatgcagttgagggaacccagtccagggcaagcagctccttccagcacgagatgtcccaagaaggcttcagcacagccctcacaatggatggcctcttcctgggggctgtggggagctttagctggtctggaggtgccttcctgtatcccccaaatatgagccccaccttcatcaacatgtctcaggagaatgtggacatgagggactcttacctgggttactccaccgagctagccctgtggaagggggtacagaacctggtcctgggggccccccgctaccagcataccgggaaggctgtcatcttcacccaggtgtccaggcaatggaggaagaaggccgaagtcacagggacgcagatcggctcctacttcggggcctccctctgctcngtggatgtggacagcgatggcagcaccgacctgatcctcattggggccccccattactatgagcagacccgagggggccaggtgtccgtgtgtcccttgcctagggggcagagggtgcagtggcagtgtgacgctgttctccgtggtgagcagggccacccctggggccgctttggggcagccctgacagtgttgggggatgtgaatgaggacaagctgatagacgtggccattggggccccgggagagcaggagaaccggggtgctgtctacctgtttcacggagcctcagaatccggcatcagcccctcccacagccagcggattgccagctcccagctctcccccaggctgcagtattttgggcaggcgctgagtgggggtcaggacctcacccaggatggactgatggacctggccgtgggggcccggggccaggtgctcctgctcaggagtctgccggtgctgaaagtgggggtggccatgagattcagccctgtggaggtggccaaggctgtgtaccggtgctgggaagagaagcccagtgccctggaagctggggacgccaccgtctgtctcaccatccagaaaagctcactggaccagctaggtgacatccaaagctctgtcaggtttgatctggcactggacccaggtcgtctgacttctcgtgccattttcaatgaaaccaagaaccccactttgactcgaagaaaaaccctgggactggggattcactgtgaaaccctgaagctgcttttgccagattgtgtggaggatgtggtgagccccatcattctgcacctcaacttctcactggtgagagagcccatcccctccccccagaacctgcgtcctgtgctggccgtgggctcacaagacctcttcactgcttctctccccttcgagaagaactgtgggcaagatggcctctgtgaaggggacctgggtgtcaccctcagcttctcaggcctgcagaccctgaccgtggggagctccctggagctcaacgtgattgtgactgtgtggaacgcaggtgaggattcctacggaaccgtggtcagcctctactatccagcagggctgtcgcaccgacgggtgtcaggagcccagaagcagccccatcagagtgccctgcgcctggcatgtgagacagtgcccactgaggatgagggcctaagaagcagccgctgcagtgtcaaccaccccatcttccatgagggctctaacggcaccttcatagtcacattcgatgtctcctacaaggccaccctgggagacaggatgcttatgagggccagtgcaagcagtgagaacaataaggcttcaagcagcaaggccaccttccagctggagctcccggtgaagtatgcagtctacaccatgatcagcaggcaggaagaatccaccaagtacttcaactttgcaacctccgatgagaagaaaatgaaagaggctgagcatcgataccgtgtgaataacctcagccagcgagatctggccatcagcattaacttctgggttcctgtcctgctgaacggggtggctgtgtgggatgtggtcatggaggccccatctcagagtctcccctgtgtttcagagagaaaacctccccagcattctgacttcctgacccagatttcaagaagtcccatgctggactgctccattgctgactgcctgcagttccgctgtgacgtcccctccttcagcgtccaggaggagctggatttcaccctgaagggcaatctcagtttcggctgggtccgcgagacattgcagaagaaggtgttggtcgtgagtgtggctgaaattacgttcgacacatccgtgtactcccagcttccaggacaggaggcatttatgagagctcagatggagatggtgctagaagaagacgaggtctacaatgccattcccatcatcatgggcagctctgtgggggctctgctactgctggcgctcatcacagccacactgtacaagcttggcttcttcaaacgccactacaaggaaatgctggaggacaagcctgaagacactgccacattcagtggggacgatttcagctgtgtggccccaaatgtgcctttgtcc

SEQ ID NO: 417810 - DNA, 130 bp, Homo sapiens
ttgacgttaaaagacagaaataaacggtagctaatgtcacgaaatgggaagtgatacactgactgagaatgttacattcaagccacactggatcggagaaacaacctgttcattcctacctctaggcctt

SEQ ID NO: 417811 - DNA, 357 bp, Homo sapiens
cctctcaggaaaacacctagacattatgtaatgtatttgaagattaatgtaccctttaaccagcagttgtgtacctaggtacaaactttgcaagcacacacgcatgtatgttccaaaaagcacatacaaaaacactcctaacagcattatttgtaataataaaatataagaaattacctaaatatccatcgactgccattggtagtatggttatacaatggaattctacacagcaatgaaaaggagctagagctacatgcaacaacatggatacaactcacaaacgtaagacttagtggaaaaagctagacacaaagttaacaccttctatatgtggttccagttatataaaaccaa

SEQ ID NO: 417812 - DNA, 372 bp, Homo sapiens
ggactcacaacacctaacccacagtggaaacaacaaaattccccattaaacacctacttctctcttccaacatgttccttgcctgtcaaccgcacaccttctccttatctccccacaagacagaatctaaatatcttgcttgatgctctgagcagtccagtccacaccttcagcttcaaaccccatactgaaaaacacagggctggggtcagcaaatgcctgcctggcctgacagctggtgtggttctgaagctccacaactttggcctaatcatctctctcaggggttctcctctcccctgtccttggggaggaaacaagacaagtcaaccccagtgtgaacaatgtcaagtttcattcctttactgtttc

SEQ ID NO: 417813 - DNA, 744 bp, Homo sapiens
gggaaaagccagtgagccccggtaattggacgagggggggtggggagaagcgtggactgggcagcctgtgggtaattggaggttcattgagaattgagtctttggaaacactaagaaaatcaaatttttaaaagttatttatggcctgggaaacaatttgcatttgtccccaaatacgcttagctgtgtgccgcttagaacgatgcgaaaccatccctctgtgtaagcccgtgccgtgtgactcgaagcctagcgccctccctgcgaagcatcagacgccacccagccctggggggaggcccacgcctgctggaccaacgcgggttctggggtgcacagcgccaggttaacgctgaagcctgccccgctgagcccaggagccgggaggcctgcgggctgacccagaatccgatcatgcacctgtcctcatgccagcggctttggctggggttggtctgaagcctgcacgcggcagttctttgttaaagatctgagggactcctcagtcctggggcgtcgccgcctgcagcctcttccaagccctgcgtccagcgagcgtcacagcacaacctgcaaaaacggagctgggctgcagctggggctggcatggactttcatttcagagattcggtttttaagaagatgcatgcctaatgtgttcttttttttttccaatgatttgtaatatacattttatgactggaaacttttttgtacaacactccaataaacattttgatttta

SEQ ID NO: 417814 - DNA, 471 bp, Homo sapiens
ggtgttgaacagctccccaaatgctctctggtcaaccggcttcctcagtcgaagacacaggtcccttcaatactggcttctggggagaagatgagtgcagaaaccacagctgcattaaacgcgtgcgtcgcaagttcctgtgactgttttggaacccagaacagaatgtgtagctcacaggcgggctcatggggacatggaagtggaatggaaggctctagaaatagacactgttgttgctcagcccctccctggtggggaggtgggggcagccatctacctgccggctgcctccaggctggccctgatcatggccgaccttccttccttccttcctgcagggggacccgaggaccacctcaagaggctgctacgtgatgtgaacccacactcctcacccgtagctgtacctcacccgtagctgtacctcacccgtagctgtacctcacccgtagctgtaactcacccgta

SEQ ID NO: 417815 - DNA, 107 bp, Homo sapiens
actagttctagatcgcgagcggcgccttttttttccaatgatttgtaatatacattttatgactggaaacttttttgtacaacactccaataaacattttgatttta

SEQ ID NO: 417816 - DNA, 4633 bp, Homo sapiens
gcctggtggcgaattcggcacgaggatgagcccgccgagcccgggccgccgtcgggagcagcgcaggccgcgagccgccgccaccatggccacgccgctgcccggccgcgcgggcgggcccgccacgccgctgtcgcccacgcgcctgtcgcggctgcaggagaaggaggagctgcgcgagctcaacgaccgcctggcgcactacatcgaccgcgtccgcgcgctggagctggagaacgaccggctcctgctcaagatctcagagaaggaggaggtgaccacgcgcgaggtgagtggcatcaaggcgctgtacgagtcggagctggccgatgcccggagagtcctggatgagacggctcgagagcgtgcccggctgcagatagagattgggaagctgagggcagagttggacgaggtcaacaagagcgccaagaagagggagggcgagcttacggtggcccagggccgtgtgaaggacctggagtccctgttccaccggagcgaggtggagctggcagctgccctcagcgacaagcgcggcctggagagtgacgtggctgagctgcgggcccagctggccaaggccgaggacggtcatgcagtggccaaaaagcagctggagaaggagacgctgatgcgtgtggacctggagaaccgctgccagagcctgcaggaggagctggacttccggaagagtgtgttcgaggaggaggtgcgggagacgcggcggcggcacgagcggcgcctggtggaggtggacagcagccggcagcaggagtacgacttcaagatggcacaggcgctggaggagctgcggagccagcacgacgagcaagtgcggctctacaagctggagctggagcagacctaccaggccaagctggacagcgccaagctgagctctgaccagaacgacaaggcggccagtgcggctcgcgaggagctgaaggaggcccgcatgcgcctggagtccctcagctaccagctctccggcctccagaagcaggccagtgccgctgaagatcgcattcgggagctggaggaggccatggccggggagcgggacaagttccggaagatgctggacgccaaggagcaggagatgacggagatgcgggacgtgatgcagcagcagctggccgagtaccaggagctgctggacgtgaagctggccctggacatggagatcaacgcctaccggaagctcctggagggcgaggaggagaggctgaagctgtcccccagcccatcctcgcgcgtcaccgtctcacgagccacctcgagcagcagcggcagcttgtccgccaccgggcgcctgggccgcagtaagcggaagcggctggaggtggaggagcccttgggcagcggcccaagcgtcctgggcacgggcacgggtggcagcggtggcttccacctggcccagcaggcctcggcctcgggtagcgtcagcatcgaggagatcgacctggagggcaagtttgtgcagctcaagaacaactcggacaaggatcagtctctggggaactggagaatcaagaggcaggtcttggagggggaggagatcgcctacaagttcacgcccaagtacatcctgcgcgccggccagatggtcacggtgtgggcagctggtgcgggggtggcccacagccccccctcgacgctggtgtggaagggccagagcagctggggcacgggcgagagcttccgcaccgtcctggttaacgcggatggcgaggaagtggccatgaggactgtgaagaagtcctcggtgatgcgtgagaatgagaatggggaggaagaggaggaggaagccgagtttggcgaggaggatcttttccaccaacagggggacccgaggaccacctcaagaggctgctacgtgatgtgaacccacactcctcatccacacacctttctttacccagagccactgaaaactatttttatatcattggctttctttagttcttgatacatttctagagaatttctaagcgaactgccagaacgtgtgggtgggtctcccccagccctccctcctggcgggtctcctccagcctcacttcgctgccacttcgccgctgccccggagacttttcaatcccaccccactcctcatctcaccatttggtcaaattggaagcccagggccaggacccggaggtttagaagatgcttgggcttggagggaggagggccggcgaggctagcgaggggacaggagacggccctgctgcggacggagcgcggaaactgcgtaggaattcagtggtggtgggtttttttaaggctttctacaaaaccaaattcagaatccaggcgtcgacctggtggggcccggggccaagcctgcattctggctgcccagcttcggacagcgggaactcctcaggcagccacgcagcgggtgtgggccagcatggggatggcgtggcccccagggcgggttttcactccgctgcctgggcttccagattcccgttctggcagcgcaccggccgggtttctcggaccgttgactttatttgggggagttttcccgcagttcagttcctgactgtgcaaggccaacagggcaggggaggggaagacctggggaaggaagaatgaggacagtcccgtcgtaagacctgtcacaacaataagcagggaggggagatgtggaggggacacatctggttgccttggaggcagaagctgtgagtttcagaacagctgtctgcagggaacgccaccatgttgaccctctggaggagagcgctgtggagcccctcccgtgttccagctccgtctgccctgtgcctatatatacacatgcgtctatccatactgtgcttttatctgtgattttctcgctgaaaccatgtttctcagacaggccaaggccacctgactcctatcacgacgcacccaagcccctcagtccagcttcccaatgcctggcaccccccttcggcaatagctcaccgtttacaccctccctcatagatacacagaagttatttttttaatggatatttatttttttacattggtcagtacacaggtcaggagctcacgccagggccttgaggacaggctgaccctcctccccggggtggcgtggggctggggcaccctccgacggcagagcctccttcagaaagtgcagctcaagtcttaaagacaccaaaactgagccatgggcacgcgccgtctccgggccatggcgttcactgcagggcgggggcggcaccgctcccctgtgactgcatcccgcctccctggggacctgcctgtggcaggaaggaatggggggccccagccccaggccgggaaggagccagcggccgacaaagcagaaacacccgctgctccacgtagcccctgctcgctgtccttgctctcagaagtcccggtcccatgtagatagaggggggcgcatcttaccaaagcatttcctcctggaggctacgccgctgtgctcccagtcaggcggctggtagggagctttgcctgccccggggataccctctgccagccgctggaagtgggaatgctggcgacagactgtgtcctctttcccaccttcatagcaggaatcacccggacccgactggctgggcttcgtgctagcgagggttctgggggtgggtcttggtgatcttgtcctatggggagtctgcagtggtctcagccacatcctatgtattttggctctggaggagcaaagctgtatcctggagttggtctgtgatttgccgacagccttgcaggctgggctcagggacaaagtcccccccaaaacccgcaggtcctcatgtccagacgctgcccagtcctgtcctgaaaacagcacgccccaggcccacagaaccccccaccctacatttgccttgggtggagctgggggtggtcctaggactgcgggtgcccttagctgaagggggtggggagaagcgtggactgggcagcctgtgggtaattggaggttcattgagaattgagtctttggaaacactaagaaaatcaaatttttaaaagttatttatggcctgggaaacaatttgcatttgtccccaaatacgcttagctgtgtgccgcttagaacgatgcgaaaccatccctctgtgtaagcccgtgccgtgtgactcgaagcctagcgccctccctgcgaagcatcagacgccacccagccctggggggaggcccacgcctgctggaccaacgcgggttctggggtgcacagcgccaggttaacgctgaagcctgccccgctgagcccaggagccgggaggcctgcgggctgacccagaatccgatcatgcacctgtcctcatgccagcggctttggctggggttggtctgaagcctgcacgcggcagttctttgttaaagatctgagggactcctcagtcctggggcgtcgccgcctgcagcctcttccaagccctgcgtccagcgagcgtcacagcacaacctgcaaaaacggagctgggctgcagctggggctggcatggactttcatttcagagattcggtttttaagaagatgcatgcctaatgtgttcttttttttttccaatgatttgtaatatacattttatgactggaaacttttttgtacaacactccaataaacattttgatttta

SEQ ID NO: 417817 - DNA, 2929 bp, Homo sapiens
cggacgcgtgggtcgacccacgcgtcgggcggaagtggccatgaggactgtgaagaagtcctcggtgatgcgtgagaatgagaatggggaggaagaggaggaggaagccgagtttggcgaggaggatcttttccaccaacagggggacccgaggaccacctcaagaggctgctacgtgatgtgaacccacactcctcatccacacacctttctttacccagagccactgaaaactatttttatatcattggctttctttagttcttgatacatttctagagaatttctaagcgaactgccagaacgtgtgggtgggtctcccccagccctccctcctggcgggtctcctccagcctcacttcgctgccacttcgccgctgccccggagacttttcaatcccaccccactcctcatctcaccatttggtcaaattggaagcccagggccaggacccggaggtttagaagatgcttgggcttggagggaggagggccggcgaggctagcgaggggacaggagacggccctgctgcggacggagcgcggaaactgcgtaggaattcagtggtggtgggtttttttaaggctttctacaaaaccaaattcagaatccaggcgtcgacctggtggggcccggggccaagcctgcattctggctgcccagcttcggacagcgggaactcctcaggcagccacgcagcgggtgtgggccagcatggggatggcgtggcccccagggcgggttttcactccgctgcctgggcttccagattcccgttctggcagcgcaccggccgggtttctcggaccgttgactttatttgggggagttttcccgcagttcagttcctgactgtgcaaggccaacagggcaggggaggggaagacctggggaaggaagaatgaggacagtcccgtcgtaagacctgtcacaacaataagcagggaggggagatgtggaggggacacatctggttgccttggaggcagaagctgtgagtttcagaacagctgtctgcagggaacgccaccatgttgaccctctggaggagagcgctgtggagcccctcccgtgttccagctccgtctgccctgtgcctatatatacacatgcgtctatccatactgtgcttttatctgtgattttctcgctgaaaccatgtttctcagacaggccaaggccacctgactcctatcacgacgcacccaagcccctcagtccagcttcccaatgcctggcaccccccttcggcaatagctcaccgtttacaccctccctcatagatacacagaagttatttttttaatggatatttatttttttacattggtcagtacacaggtcaggagctcacgccagggccttgaggacaggctgaccctcctccccggggtggcgtggggctggggcaccctccgacggcagagcctccttcagaaagtgcagctcaagtcttaaagacaccaaaactgagccatgggcacgcgccgtctccgggccatggcgttcactgcagggcgggggcggcaccgctcccctgtgactgcatcccgcctccctggggacctgcctgtggcaggaaggaatggggggccccagccccaggccgggaaggagccagcggccgacaaagcagaaacacccgctgctccacgtagcccctgctcgctgtccttgctctcagaagtcccggtcccatgtagatagaggggggcgcatcttaccaaagcatttcctcctggaggctacgccgctgtgctcccagtcaggcggctggtagggagctttgcctgccccggggataccctctgccagccgctggaagtgggaatgctggcgacagactgtgtcctctttcccaccttcatagcaggaatcacccggacccgactggctgggcttcgtgctagcgagggttctgggggtgggtcttggtgatcttgtcctatggggagtctgcagtggtctcagccacatcctatgtattttggctctggaggagcaaagctgtatcctggagttggtctgtgatttgccgacagccttgcaggctgggctcagggacaaagtcccccccaaaacccgcaggtcctcatgtccagacgctgcccagtcctgtcctgaaaacagcacgccccaggcccacagaaccccccaccctacatttgccttgggtggagctgggggtggtcctaggactgcgggtgcccttagctgaagggggtggggagaagcgtggactgggcagcctgtgggtaattggaggttcattgagaattgagtctttggaaacactaagaaaatcaaatttttaaaagttatttatggcctgggaaacaatttgcatttgtccccaaatacgcttagctgtgtgccgcttagaacgatgcgaaaccatccctctgtgtaagcccgtgccgtgtgactcgaagcctagcgccctccctgcgaagcatcagacgccacccagccctggggggaggcccacgcctgctggaccaacgcgggttctggggtgcacagcgccaggttaacgctgaagcctgccccgctgagcccaggagccgggaggcctgcgggctgacccagaatccgatcatgcacctgtcctcatgccagcggctttggctggggttggtctgaagcctgcacgcggcagttctttgttaaagatctgagggactcctcagtcctggggcgtcgccgcctgcagcctcttccaagccctgcgtccagcgagcgtcacagcacaacctgcaaaaacggagctgggctgcagctggggctggcatggactttcatttcagagattcggtttttaagaagatgcatgcctaatgtgttcttttttttttccaatgatttgtaatatacattttatgactggaaacttttttgtacaacactccaataaacattttgatttta

SEQ ID NO: 417818 - DNA, 3571 bp, Homo sapiens
catcttgcagccggcggcgcggattgaatgagcccgccgagcccgggccgccgtcgggagcagcgcaggccgcgagccgccgccaccatggccacgccgctgcccggccgcgcgggcgggcccgccacgccgctgtcgcccacgcgcctgtcgcggctgcaggagaaggaggagctgcgcgagctcaacgaccgcctggcgcactacatcgaccgcgtccgcgcgctggagctggagaacgaccggctcctgctcaagatctcagagaaggaggaggtgaccacgcgcgaggtgagtggcatcaaggcgctgtacgagtcggagctggccgatgcccggagagtcctggatgagacggctcgagagcgtgcccggctgcagatagagattgggaagctgagggcagagttggacgaggtcaacaagagcgccaagaagagggagggcgagcttacggtggcccagggccgtgtgaaggacctggagtccctgttccaccggagcgaggtggagctggcagctgccctcagcgacaagcgcggcctggagagtgacgtggctgagctgcgggcccagctggccaaggccgaggacggtcatgcagtggccaaaaagcagctggagaaggagacgctgatgcgtgtggacctggagaaccgctgccagagcctgcaggaggagctggacttccggaagagtgtgttcgaggaggaggtgcgggagacgcggcggcggcacgagcggcgcctggtggaggtggacagcagccggcagcaggagtacgacttcaagatggcacaggcgctggaggagctgcggagccagcacgacgagcaagtgcggctctacaagctggagctggagcagacctaccaggccaagctggacagcgccaagctgagctctgaccagaacgacaaggcggccagtgcggctcgcgaggagctgaaggaggcccgcatgcgcctggagtccctcagctaccagctctccagcctcacttcgctgccacttcgccgctgccccggagacttttcaatcccaccccactcctcatctcaccatttggtcaaattggaagcccagggccaggacccggaggtttagaagatgcttgggcttggagggaggagggccggcgaggctagcgaggggacaggagacggccctgctgcggacggagcgcggaaactgcgtaggaattcagtggtggtgggtttttttaaggctttctacaaaaccaaattcagaatccaggcgtcgacctggtggggcccggggccaagcctgcattctggctgcccagcttcggacagcgggaactcctcaggcagccacgcagcgggtgtgggccagcatggggatggcgtggcccccagggcgggttttcactccgctgcctgggcttccagattcccgttctggcagcgcaccggccgggtttctcggaccgttgactttatttgggggagttttcccgcagttcagttcctgactgtgcaaggccaacagggcaggggaggggaagacctggggaaggaagaatgaggacagtcccgtcgtaagacctgtcacaacaataagcagggaggggagatgtggaggggacacatctggttgccttggaggcagaagctgtgagtttcagaacagctgtctgcagggaacgccaccatgttgaccctctggaggagagcgctgtggagcccctcccgtgttccagctccgtctgccctgtgcctatatatacacatgcgtctatccatactgtgcttttatctgtgattttctcgctgaaaccatgtttctcagacaggccaaggccacctgactcctatcacgacgcacccaagcccctcagtccagcttcccaatgcctggcaccccccttcggcaatagctcaccgtttacaccctccctcatagatacacagaagttatttttttaatggatatttatttttttacattggtcagtacacaggtcaggagctcacgccagggccttgaggacaggctgaccctcctccccggggtggcgtggggctggggcaccctccgacggcagagcctccttcagaaagtgcagctcaagtcttaaagacaccaaaactgagccatgggcacgcgccgtctccgggccatggcgttcactgcagggcgggggcggcaccgctcccctgtgactgcatcccgcctccctggggacctgcctgtggcaggaaggaatggggggccccagccccaggccgggaaggagccagcggccgacaaagcagaaacacccgctgctccacgtagcccctgctcgctgtccttgctctcagaagtcccggtcccatgtagatagaggggggcgcatcttaccaaagcatttcctcctggaggctacgccgctgtgctcccagtcaggcggctggtagggagctttgcctgccccggggataccctctgccagccgctggaagtgggaatgctggcgacagactgtgtcctctttcccaccttcatagcaggaatcacccggacccgactggctgggcttcgtgctagcgagggttctgggggtgggtcttggtgatcttgtcctatggggagtctgcagtggtctcagccacatcctatgtattttggctctggaggagcaaagctgtatcctggagttggtctgtgatttgccgacagccttgcaggctgggctcagggacaaagtcccccccaaaacccgcaggtcctcatgtccagacgctgcccagtcctgtcctgaaaacagcacgccccaggcccacagaaccccccaccctacatttgccttgggtggagctgggggtggtcctaggactgcgggtgcccttagctgaagggggtggggagaagcgtggactgggcagcctgtgggtaattggaggttcattgagaattgagtctttggaaacactaagaaaatcaaatttttaaaagttatttatggcctgggaaacaatttgcatttgtccccaaatacgcttagctgtgtgccgcttagaacgatgcgaaaccatccctctgtgtaagcccgtgccgtgtgactcgaagcctagcgccctccctgcgaagcatcagacgccacccagccctggggggaggcccacgcctgctggaccaacgcgggttctggggtgcacagcgccaggttaacgctgaagcctgccccgctgagcccaggagccgggaggcctgcgggctgacccagaatccgatcatgcacctgtcctcatgccagcggctttggctggggttggtctgaagcctgcacgcggcagttctttgttaaagatctgagggactcctcagtcctggggcgtcgccgcctgcagcctcttccaagccctgcgtccagcgagcgtcacagcacaacctgcaaaaacggagctgggctgcagctggggctggcatggactttcatttcagagattcggtttttaagaagatgcatgcctaatgtgttcttttttttttccaatgatttgtaatatacattttatgactggaaacttttttgtacaacactccaataaacattttgatttta

SEQ ID NO: 417819 - DNA, 3128 bp, Homo sapiens
ggtgttgaacagctccccaaatgctctctggtcaaccggcttcctcagtcgaagacacaggtcccttcaatactggcttctggggagaagatgagtgcagaaaccacagctgcattaaacgcgtgcgtcgcaagttcctgtgactgttttggaacccagaacagaatgtgtagctcacaggcgggctcatggggacatggaagtggaatggaaggctctagaaatagacactgttgttgctcagcccctccctggtggggaggtgggggcagccatctacctgccggctgcctccaggctggccctgatcatggccgaccttccttccttccttcctgcagggggacccgaggaccacctcaagaggctgctacgtgatgtgaacccacactcctcatccacacacctttctttacccagagccactgaaaactatttttatatcattggctttctttagttcttgatacatttctagagaatttctaagcgaactgccagaacgtgtgggtgggtctcccccagccctccctcctggcgggtctcctccagcctcacttcgctgccacttcgccgctgccccggagacttttcaatcccaccccactcctcatctcaccatttggtcaaattggaagcccagggccaggacccggaggtttagaagatgcttgggcttggagggaggagggccggcgaggctagcgaggggacaggagacggccctgctgcggacggagcgcggaaactgcgtaggaattcagtggtggtgggtttttttaaggctttctacaaaaccaaattcagaatccaggcgtcgacctggtggggcccggggccaagcctgcattctggctgcccagcttcggacagcgggaactcctcaggcagccacgcagcgggtgtgggccagcatggggatggcgtggcccccagggcgggttttcactccgctgcctgggcttccagattcccgttctggcagcgcaccggccgggtttctcggaccgttgactttatttgggggagttttcccgcagttcagttcctgactgtgcaaggccaacagggcaggggaggggaagacctggggaaggaagaatgaggacagtcccgtcgtaagacctgtcacaacaataagcagggaggggagatgtggaggggacacatctggttgccttggaggcagaagctgtgagtttcagaacagctgtctgcagggaacgccaccatgttgaccctctggaggagagcgctgtggagcccctcccgtgttccagctccgtctgccctgtgcctatatatacacatgcgtctatccatactgtgcttttatctgtgattttctcgctgaaaccatgtttctcagacaggccaaggccacctgactcctatcacgacgcacccaagcccctcagtccagcttcccaatgcctggcaccccccttcggcaatagctcaccgtttacaccctccctcatagatacacagaagttatttttttaatggatatttatttttttacattggtcagtacacaggtcaggagctcacgccagggccttgaggacaggctgaccctcctccccggggtggcgtggggctggggcaccctccgacggcagagcctccttcagaaagtgcagctcaagtcttaaagacaccaaaactgagccatgggcacgcgccgtctccgggccatggcgttcactgcagggcgggggcggcaccgctcccctgtgactgcatcccgcctccctggggacctgcctgtggcaggaaggaatggggggccccagccccaggccgggaaggagccagcggccgacaaagcagaaacacccgctgctccacgtagcccctgctcgctgtccttgctctcagaagtcccggtcccatgtagatagaggggggcgcatcttaccaaagcatttcctcctggaggctacgccgctgtgctcccagtcaggcggctggtagggagctttgcctgccccggggataccctctgccagccgctggaagtgggaatgctggcgacagactgtgtcctctttcccaccttcatagcaggaatcacccggacccgactggctgggcttcgtgctagcgagggttctgggggtgggtcttggtgatcttgtcctatggggagtctgcagtggtctcagccacatcctatgtattttggctctggaggagcaaagctgtatcctggagttggtctgtgatttgccgacagccttgcaggctgggctcagggacaaagtcccccccaaaacccgcaggtcctcatgtccagacgctgcccagtcctgtcctgaaaacagcacgccccaggcccacagaaccccccaccctacatttgccttgggtggagctgggggtggtcctaggactgcgggtgcccttagctgaagggggtggggagaagcgtggactgggcagcctgtgggtaattggaggttcattgagaattgagtctttggaaacactaagaaaatcaaatttttaaaagttatttatggcctgggaaacaatttgcatttgtccccaaatacgcttagctgtgtgccgcttagaacgatgcgaaaccatccctctgtgtaagcccgtgccgtgtgactcgaagcctagcgccctccctgcgaagcatcagacgccacccagccctggggggaggcccacgcctgctggaccaacgcgggttctggggtgcacagcgccaggttaacgctgaagcctgccccgctgagcccaggagccgggaggcctgcgggctgacccagaatccgatcatgcacctgtcctcatgccagcggctttggctggggttggtctgaagcctgcacgcggcagttctttgttaaagatctgagggactcctcagtcctggggcgtcgccgcctgcagcctcttccaagccctgcgtccagcgagcgtcacagcacaacctgcaaaaacggagctgggctgcagctggggctggcatggactttcatttcagagattcggtttttaagaagatgcatgcctaatgtgttcttttttttttccaatgatttgtaatatacattttatgactggaaacttttttgtacaacactccaataaacattttgatttta

SEQ ID NO: 417820 - DNA, 4421 bp, Homo sapiens
catcttgcagccggcggcgcggattgaatgagcccgccgagcccgggccgccgtcgggagcagcgcaggccgcgagccgccgccaccatggccacgccgctgcccggccgcgcgggcgggcccgccacgccgctgtcgcccacgcgcctgtcgcggctgcaggagaaggaggagctgcgcgagctcaacgaccgcctggcgcactacatcgaccgcgtccgcgcgctggagctggagaacgaccggctcctgctcaagatctcagagaaggaggaggtgaccacgcgcgaggtgagtggcatcaaggcgctgtacgagtcggagctggccgatgcccggagagtcctggatgagacggctcgagagcgtgcccggctgcagatagagattgggaagctgagggcagagttggacgaggtcaacaagagcgccaagaagagggagggcgagcttacggtggcccagggccgtgtgaaggacctggagtccctgttccaccggagcgaggtggagctggcagctgccctcagcgacaagcgcggcctggagagtgacgtggctgagctgcgggcccagctggccaaggccgaggacggtcatgcagtggccaaaaagcagctggagaaggagacgctgatgcgtgtggacctggagaaccgctgccagagcctgcaggaggagctggacttccggaagagtgtgttcgaggaggaggtgcgggagacgcggcggcggcacgagcggcgcctggtggaggtggacagcagccggcagcaggagtacgacttcaagatggcacaggcgctggaggagctgcggagccagcacgacgagcaagtgcggctctacaagctggagctggagcagacctaccaggccaagctggacagcgccaagctgagctctgaccagaacgacaaggcggccagtgcggctcgcgaggagctgaaggaggcccgcatgcgcctggagtccctcagctaccagctctccggcctccagaagcaggccagtgccgctgaagatcgcattcgggagctggaggaggccatggccggggagcgggacaagttccggaagatgctggacgccaaggagcaggagatgacggagatgcgggacgtgatgcagcagcagctggccgagtaccaggagctgctggacgtgaagctggccctggacatggagatcaacgcctaccggaagctcctggagggcgaggaggagaggctgaagctgtcccccagcccatcctcgcgcgtcaccgtctcacgagccacctcgagcagcagcggcagcttgtccgccaccgggcgcctgggccgcagtaagcggaagcggctggaggtggaggagcccttgggcagcggcccaagcgtcctgggcacgggcacgggtggcagcggtggcttccacctggcccagcaggcctcggcctcgggtagcgtcagcatcgaggagatcgacctggagggcaagtttgtgcagctcaagaacaactcggacaaggatcagtctctggggaactggagaatcaagaggcaggtcttggagggggaggagatcgcctacaagttcacgcccaagtacatcctgcgcgccggccagatggtcacggtgtgggcagctggtgcgggggtggcccacagccccccctcgacgctggtgtggaagggccagagcagctggggcacgggcgagagcttccgcaccgtcctggttaacgcggatggcgaggaagtggccatgaggactgtgaagaagtcctcggtgatgcgtgagaatgagaatggggaggaagaggaggaggaagccgagtttggcgaggaggatcttttccaccaacagggggacccgaggaccacctcaagaggctgctacgtgatgtgaacccacactcctcatccacacacctttctttacccagagccactgaaaactatttttatatcattggctttctttagttcttgatacatttctagagaatttctaagcgaactgccagaacgtgtgggtgggtctcccccagccctccctcctggcgggtctcctccagcctcacttcgctgccacttcgccgctgccccggagacttttcaatcccaccccactcctcatctcaccatttggtcaaattggaagcccagggccaggacccggaggtttagaagatgcttgggcttggagggaggagggccggcgaggctagcgaggggacaggagacggccctgctgcggacggagcgcggaaactgcgtaggaattcagtggtggtgggtttttttaaggctttctacaaaaccaaattcagaatccaggcgtcgacctggtggggcccggggccaagcctgcattctggctgcccagcttcggacagcgggaactcctcaggcagccacgcagcgggtgtgggccagcatggggatggcgtggcccccagggcgggttttcactccgctgcctgggcttccagattcccgttctggcagcgcaccggccgggtttctcggaccgttgactttatttgggggagttttcccgcagttcagttcctgactgtgcaaggccaacagggcaggggaggggaagacctggggaaggaagaatgaggacagtcccgtcgtaagacctgtcacaacaataagcagggaggggagatgtggaggggacacatctggttgccttggaggcagaagctgtgagtttcagaacagctgtctgcagggaacgccaccatgttgaccctctggaggagagcgctgtggagcccctcccgtgttccagctccgtctgccctgtgcctatatatacacatgcgtctatccatactgtgcttttatctgtgattttctcgctgaaaccatgtttctcagacaggccaaggccacctgactcctatcacgacgcacccaagcccctcagtccagcttcccaatgcctggcaccccccttcggcaatagctcaccgtttacaccctccctcatagatacacagaagttatttttttaatggatatttatttttttacattggtcagtacacaggtcaggagctcacgccagggccttgaggacaggctgaccctcctccccaggccgggaaggagccagcggccgacaaagcagaaacacccgctgctccacgtagcccctgctcgctgtccttgctctcagaagtcccggtcccatgtagatagaggggggcgcatcttaccaaagcatttcctcctggaggctacgccgctgtgctcccagtcaggcggctggtagggagctttgcctgccccggggataccctctgccagccgctggaagtgggaatgctggcgacagactgtgtcctctttcccaccttcatagcaggaatcacccggacccgactggctgggcttcgtgctagcgagggttctgggggtgggtcttggtgatcttgtcctatggggagtctgcagtggtctcagccacatcctatgtattttggctctggaggagcaaagctgtatcctggagttggtctgtgatttgccgacagccttgcaggctgggctcagggacaaagtcccccccaaaacccgcaggtcctcatgtccagacgctgcccagtcctgtcctgaaaacagcacgccccaggcccacagaaccccccaccctacatttgccttgggtggagctgggggtggtcctaggactgcgggtgcccttagctgaagggggtggggagaagcgtggactgggcagcctgtgggtaattggaggttcattgagaattgagtctttggaaacactaagaaaatcaaatttttaaaagttatttatggcctgggaaacaatttgcatttgtccccaaatacgcttagctgtgtgccgcttagaacgatgcgaaaccatccctctgtgtaagcccgtgccgtgtgactcgaagcctagcgccctccctgcgaagcatcagacgccacccagccctggggggaggcccacgcctgctggaccaacgcgggttctggggtgcacagcgccaggttaacgctgaagcctgccccgctgagcccaggagccgggaggcctgcgggctgacccagaatccgatcatgcacctgtcctcatgccagcggctttggctggggttggtctgaagcctgcacgcggcagttctttgttaaagatctgagggactcctcagtcctggggcgtcgccgcctgcagcctcttccaagccctgcgtccagcgagcgtcacagcacaacctgcaaaaacggagctgggctgcagctggggctggcatggactttcatttcagagattcggtttttaagaagatgcatgcctaatgtgttcttttttttttccaatgatttgtaatatacattttatgactggaaacttttttgtacaacactccaataaacattttgatttta

SEQ ID NO: 417821 - DNA, 4589 bp, Homo sapiens
catcttgcagccggcggcgcggattgaatgagcccgccgagcccgggccgccgtcgggagcagcgcaggccgcgagccgccgccaccatggccacgccgctgcccggccgcgcgggcgggcccgccacgccgctgtcgcccacgcgcctgtcgcggctgcaggagaaggaggagctgcgcgagctcaacgaccgcctggcgcactacatcgaccgcgtccgcgcgctggagctggagaacgaccggctcctgctcaagatctcagagaaggaggaggtgaccacgcgcgaggtgagtggcatcaaggcgctgtacgagtcggagctggccgatgcccggagagtcctggatgagacggctcgagagcgtgcccggctgcagatagagattgggaagctgagggcagagttggacgaggtcaacaagagcgccaagaagagggagggcgagcttacggtggcccagggccgtgtgaaggacctggagtccctgttccaccggagcgaggtggagctggcagctgccctcagcgacaagcgcggcctggagagtgacgtggctgagctgcgggcccagctggccaaggccgaggacggtcatgcagtggccaaaaagcagctggagaaggagacgctgatgcgtgtggacctggagaaccgctgccagagcctgcaggaggagctggacttccggaagagtgtgttcgaggaggaggtgcgggagacgcggcggcggcacgagcggcgcctggtggaggtggacagcagccggcagcaggagtacgacttcaagatggcacaggcgctggaggagctgcggagccagcacgacgagcaagtgcggctctacaagctggagctggagcagacctaccaggccaagctggacagcgccaagctgagctctgaccagaacgacaaggcggccagtgcggctcgcgaggagctgaaggaggcccgcatgcgcctggagtccctcagctaccagctctccggcctccagaagcaggccagtgccgctgaagatcgcattcgggagctggaggaggccatggccggggagcgggacaagttccggaagatgctggacgccaaggagcaggagatgacggagatgcgggacgtgatgcagcagcagctggccgagtaccaggagctgctggacgtgaagctggccctggacatggagatcaacgcctaccggaagctcctggagggcgaggaggagaggctgaagctgtcccccagcccatcctcgcgcgtcaccgtctcacgagccacctcgagcagcagcggcagcttgtccgccaccgggcgcctgggccgcagtaagcggaagcggctggaggtggaggagcccttgggcagcggcccaagcgtcctgggcacgggcacgggtggcagcggtggcttccacctggcccagcaggcctcggcctcgggtagcgtcagcatcgaggagatcgacctggagggcaagtttgtgcagctcaagaacaactcggacaaggatcagtctctggggaactggagaatcaagaggcaggtcttggagggggaggagatcgcctacaagttcacgcccaagtacatcctgcgcgccggccagatggtcacggtgtgggcagctggtgcgggggtggcccacagccccccctcgacgctggtgtggaagggccagagcagctggggcacgggcgagagcttccgcaccgtcctggttaacgcggatggcgaggaagtggccatgaggactgtgaagaagtcctcggtgatgcgtgagaatgagaatggggaggaagaggaggaggaagccgagtttggcgaggaggatcttttccaccaacagggggacccgaggaccacctcaagaggctgctacgtgatgtgaacccacactcctcatccacacacctttctttacccagagccactgaaaactatttttatatcattggctttctttagttcttgatacatttctagagaatttctaagcgaactgccagaacgtgtgggtgggtctcccccagccctccctcctggcgggtctcctccagcctcacttcgctgccacttcgccgctgccccggagacttttcaatcccaccccactcctcatctcaccatttggtcaaattggaagcccagggccaggacccggaggtttagaagatgcttgggcttggagggaggagggccggcgaggctagcgaggggacaggagacggccctgctgcggacggagcgcggaaactgcgtaggaattcagtggtggtgggtttttttaaggctttctacaaaaccaaattcagaatccaggcgtcgacctggtggggcccggggccaagcctgcattctggctgcccagcttcggacagcgggaactcctcaggcagccacgcagcgggtgtgggccagcatggggatggcgtggcccccagggcgggttttcactccgctgcctgggcttccagattcccgttctggcagcgcaccggccgggtttctcggaccgttgactttatttgggggagttttcccgcagttcagttcctgactgtgcaaggccaacagggcaggggaggggaagacctggggaaggaagaatgaggacagtcccgtcgtaagacctgtcacaacaataagcagggaggggagatgtggaggggacacatctggttgccttggaggcagaagctgtgagtttcagaacagctgtctgcagggaacgccaccatgttgaccctctggaggagagcgctgtggagcccctcccgtgttccagctccgtctgccctgtgcctatatatacacatgcgtctatccatactgtgcttttatctgtgattttctcgctgaaaccatgtttctcagacaggccaaggccacctgactcctatcacgacgcacccaagcccctcagtccagcttcccaatgcctggcaccccccttcggcaatagctcaccgtttacaccctccctcatagatacacagaagttatttttttaatggatatttatttttttacattggtcagtacacaggtcaggagctcacgccagggccttgaggacaggctgaccctcctccccggggtggcgtggggctggggcaccctccgacggcagagcctccttcagaaagtgcagctcaagtcttaaagacaccaaaactgagccatgggcacgcgccgtctccgggccatggcgttcactgcagggcgggggcggcaccgctcccctgtgactgcatcccgcctccctggggacctgcctgtggcaggaaggaatggggggccccagccccaggccgggaaggagccagcggccgacaaagcagaaacacccgctgctccacgtagcccctgctcgctgtccttgctctcagaagtcccggtcccatgtagatagaggggggcgcatcttaccaaagcatttcctcctggaggctacgccgctgtgctcccagtcagccgctggaagtgggaatgctggcgacagactgtgtcctctttcccaccttcatagcaggaatcacccggacccgactggctgggcttcgtgctagcgagggttctgggggtgggtcttggtgatcttgtcctatggggagtctgcagtggtctcagccacatcctatgtattttggctctggaggagcaaagctgtatcctggagttggtctgtgatttgccgacagccttgcaggctgggctcagggacaaagtcccccccaaaacccgcaggtcctcatgtccagacgctgcccagtcctgtcctgaaaacagcacgccccaggcccacagaaccccccaccctacatttgccttgggtggagctgggggtggtcctaggactgcgggtgcccttagctgaagggggtggggagaagcgtggactgggcagcctgtgggtaattggaggttcattgagaattgagtctttggaaacactaagaaaatcaaatttttaaaagttatttatggcctgggaaacaatttgcatttgtccccaaatacgcttagctgtgtgccgcttagaacgatgcgaaaccatccctctgtgtaagcccgtgccgtgtgactcgaagcctagcgccctccctgcgaagcatcagacgccacccagccctggggggaggcccacgcctgctggaccaacgcgggttctggggtgcacagcgccaggttaacgctgaagcctgccccgctgagcccaggagccgggaggcctgcgggctgacccagaatccgatcatgcacctgtcctcatgccagcggctttggctggggttggtctgaagcctgcacgcggcagttctttgttaaagatctgagggactcctcagtcctggggcgtcgccgcctgcagcctcttccaagccctgcgtccagcgagcgtcacagcacaacctgcaaaaacggagctgggctgcagctggggctggcatggactttcatttcagagattcggtttttaagaagatgcatgcctaatgtgttcttttttttttccaatgatttgtaatatacattttatgactggaaacttttttgtacaacactccaataaacattttgatttta

SEQ ID NO: 417822 - DNA, 1883 bp, Homo sapiens
tagctagtagagctgggttaatcggccgaggccagctccgtctgccctgtgcctatatatacacatgcgtctatccatactgtgcttttatctgtgattttctcgctgaaaccatgtttctcagacaggccaaggccacctgactcctatcacgacgcacccaagcccctcagtccagcttcccaatgcctggcaccccccttcggcaatagctcaccgtttacaccctccctcatagatacacagaagttatttttttaatggatatttatttttttacattggtcagtacacaggtcaggagctcacgccagggccttgaggacaggctgaccctcctccccggggtggcgtggggctggggcaccctccgacggcagagcctccttcagaaagtgcagctcaagtcttaaagacaccaaaactgagccatgggcacgcgccgtctccgggccatggcgttcactgcagggcgggggcggcaccgctcccctgtgactgcatcccgcctccctggggacctgcctgtggcaggaaggaatggggggccccagccccaggccgggaaggagccagcggccgacaaagcagaaacacccgctgctccacgtagcccctgctcgctgtccttgctctcagaagtcccggtcccatgtagatagaggggggcgcatcttaccaaagcatttcctcctggaggctacgccgctgtgctcccagtcaggcggctggtagggagctttgcctgccccggggataccctctgccagccgctggaagtgggaatgctggcgacagactgtgtcctctttcccaccttcatagcaggaatcacccggacccgactggctgggcttcgtgctagcgagggttctgggggtgggtcttggtgatcttgtcctatggggagtctgcagtggtctcagccacatcctatgtattttggctctggaggagcaaagctgtatcctggagttggtctgtgatttgccgacagccttgcaggctgggctcagggacaaagtcccccccaaaacccgcaggtcctcatgtccagacgctgcccagtcctgtcctgaaaacagcacgccccaggcccacagaaccccccaccctacatttgccttgggtggagctgggggtggtcctaggactgcgggtgcccttagctgaagggggtggggagaagcgtggactgggcagcctgtgggtaattggaggttcattgagaattgagtctttggaaacactaagaaaatcaaatttttaaaagttatttatggcctgggaaacaatttgcatttgtccccaaatacgcttagctgtgtgccgcttagaacgatgcgaaaccatccctctgtgtaagcccgtgccgtgtgactcgaagcctagcgccctccctgcgaagcatcagacgccacccagccctggggggaggcccacgcctgctggaccaacgcgggttctggggtgcacagcgccaggttaacgctgaagcctgccccgctgagcccaggagccgggaggcctgcgggctgacccagaatccgatcatgcacctgtcctcatgccagcggctttggctggggttggtctgaagcctgcacgcggcagttctttgttaaagatctgagggactcctcagtcctggggcgtcgccgcctgcagcctcttccaagccctgcgtccagcgagcgtcacagcacaacctgcaaaaacggagctgggctgcagctggggctggcatggactttcatttcagagattcggtttttaagaagatgcatgcctaatgtgttcttttttttttccaatgatttgtaatatacattttatgactggaaacttttttgtacaacactccaataaacattttgatttta

SEQ ID NO: 417823 - DNA, 1670 bp, Homo sapiens
tagctagtagagctgggttaatcggccgaggagaagttatttttttaatggatatttatttttttacattggtcagtacacaggtcaggagctcacgccagggccttgaggacaggctgaccctcctccccggggtggcgtggggctggggcaccctccgacggcagagcctccttcagaaagtgcagctcaagtcttaaagacaccaaaactgagccatgggcacgcgccgtctccgggccatggcgttcactgcagggcgggggcggcaccgctcccctgtgactgcatcccgcctccctggggacctgcctgtggcaggaaggaatggggggccccagccccaggccgggaaggagccagcggccgacaaagcagaaacacccgctgctccacgtagcccctgctcgctgtccttgctctcagaagtcccggtcccatgtagatagaggggggcgcatcttaccaaagcatttcctcctggaggctacgccgctgtgctcccagtcaggcggctggtagggagctttgcctgccccggggataccctctgccagccgctggaagtgggaatgctggcgacagactgtgtcctctttcccaccttcatagcaggaatcacccggacccgactggctgggcttcgtgctagcgagggttctgggggtgggtcttggtgatcttgtcctatggggagtctgcagtggtctcagccacatcctatgtattttggctctggaggagcaaagctgtatcctggagttggtctgtgatttgccgacagccttgcaggctgggctcagggacaaagtcccccccaaaacccgcaggtcctcatgtccagacgctgcccagtcctgtcctgaaaacagcacgccccaggcccacagaaccccccaccctacatttgccttgggtggagctgggggtggtcctaggactgcgggtgcccttagctgaagggggtggggagaagcgtggactgggcagcctgtgggtaattggaggttcattgagaattgagtctttggaaacactaagaaaatcaaatttttaaaagttatttatggcctgggaaacaatttgcatttgtccccaaatacgcttagctgtgtgccgcttagaacgatgcgaaaccatccctctgtgtaagcccgtgccgtgtgactcgaagcctagcgccctccctgcgaagcatcagacgccacccagccctggggggaggcccacgcctgctggaccaacgcgggttctggggtgcacagcgccaggttaacgctgaagcctgccccgctgagcccaggagccgggaggcctgcgggctgacccagaatccgatcatgcacctgtcctcatgccagcggctttggctggggttggtctgaagcctgcacgcggcagttctttgttaaagatctgagggactcctcagtcctggggcgtcgccgcctgcagcctcttccaagccctgcgtccagcgagcgtcacagcacaacctgcaaaaacggagctgggctgcagctggggctggcatggactttcatttcagagattcggtttttaagaagatgcatgcctaatgtgttcttttttttttccaatgatttgtaatatacattttatgactggaaacttttttgtacaacactccaataaacattttgatttta

SEQ ID NO: 417824 - DNA, 4731 bp, Homo sapiens
catcttgcagccggcggcgcggattgaatgagcccgccgagcccgggccgccgtcgggagcagcgcaggccgcgagccgccgccaccatggccacgccgctgcccggccgcgcgggcgggcccgccacgccgctgtcgcccacgcgcctgtcgcggctgcaggagaaggaggagctgcgcgagctcaacgaccgcctggcgcactacatcgaccgcgtccgcgcgctggagctggagaacgaccggctcctgctcaagatctcagagaaggaggaggtgaccacgcgcgaggtgagtggcatcaaggcgctgtacgagtcggagctggccgatgcccggagagtcctggatgagacggctcgagagcgtgcccggctgcagatagagattgggaagctgagggcagagttggacgaggtcaacaagagcgccaagaagagggagggcgagcttacggtggcccagggccgtgtgaaggacctggagtccctgttccaccggagcgaggtggagctggcagctgccctcagcgacaagcgcggcctggagagtgacgtggctgagctgcgggcccagctggccaaggccgaggacggtcatgcagtggccaaaaagcagctggagaaggagacgctgatgcgtgtggacctggagaaccgctgccagagcctgcaggaggagctggacttccggaagagtgtgttcgaggaggaggtgcgggagacgcggcggcggcacgagcggcgcctggtggaggtggacagcagccggcagcaggagtacgacttcaagatggcacaggcgctggaggagctgcggagccagcacgacgagcaagtgcggctctacaagctggagctggagcagacctaccaggccaagctggacagcgccaagctgagctctgaccagaacgacaaggcggccagtgcggctcgcgaggagctgaaggaggcccgcatgcgcctggagtccctcagctaccagctctccggcctccagaagcaggccagtgccgctgaagatcgcattcgggagctggaggaggccatggccggggagcgggacaagttccggaagatgctggacgccaaggagcaggagatgacggagatgcgggacgtgatgcagcagcagctggccgagtaccaggagctgctggacgtgaagctggccctggacatggagatcaacgcctaccggaagctcctggagggcgaggaggagaggctgaagctgtcccccagcccatcctcgcgcgtcaccgtctcacgagccacctcgagcagcagcggcagcttgtccgccaccgggcgcctgggccgcagtaagcggaagcggctggaggtggaggagcccttgggcagcggcccaagcgtcctgggcacgggcacgggtggcagcggtggcttccacctggcccagcaggcctcggcctcgggtagcgtcagcatcgaggagatcgacctggagggcaagtttgtgcagctcaagaacaactcggacaaggatcagtctctggggaactggagaatcaagaggcaggtcttggagggggaggagatcgcctacaagttcacgcccaagtacatcctgcgcgccggccagatggtcacggtgtgggcagctggtgcgggggtggcccacagccccccctcgacgctggtgtggaagggccagagcagctggggcacgggcgagagcttccgcaccgtcctggttaacgcggatggcgaggaagtggccatgaggactgtgaagaagtcctcggtgatgcgtgagaatgagaatggggaggaagaggaggaggaagccgagtttggcgaggaggatcttttccaccaacagggggacccgaggaccacctcaagaggctgctacgtgatgtgaacccacactcctcatccacacacctttctttacccagagccactgaaaactatttttatatcattggctttctttagttcttgatacatttctagagaatttctaagcgaactgccagaacgtgtgggtgggtctcccccagccctccctcctggcgggtctcctccagcctcacttcgctgccacttcgccgctgccccggagacttttcaatcccaccccactcctcatctcaccatttggtcaaattggaagcccagggccaggacccggaggtttagaagatgcttgggcttggagggaggagggccggcgaggctagcgaggggacaggagacggccctgctgcggacggagcgcggaaactgcgtaggaattcagtggtggtgggtttttttaaggctttctacaaaaccaaattcagaatccaggcgtcgacctggtggggcccggggccaagcctgcattctggctgcccagcttcggacagcgggaactcctcaggcagccacgcagcgggtgtgggccagcatggggatggcgtggcccccagggcgggttttcactccgctgcctgggcttccagattcccgttctggcagcgcaccggccgggtttctcggaccgttgactttatttgggggagttttcccgcagttcagttcctgactgtgcaaggccaacagggcaggggaggggaagacctggggaaggaagaatgaggacagtcccgtcgtaagacctgtcacaacaataagcagggaggggagatgtggaggggacacatctggttgccttggaggcagaagctgtgagtttcagaacagctgtctgcagggaacgccaccatgttgaccctctggaggagagcgctgtggagcccctcccgtgttccagctccgtctgccctgtgcctatatatacacatgcgtctatccatactgtgcttttatctgtgattttctcgctgaaaccatgtttctcagacaggccaaggccacctgactcctatcacgacgcacccaagcccctcagtccagcttcccaatgcctggcaccccccttcggcaatagctcaccgtttacaccctccctcatagatacacagaagttatttttttaatggatatttatttttttacattggtcagtacacaggtcaggagctcacgccagggccttgaggacaggctgaccctcctccccggggtggcgtggggctggggcaccctccgacggcagagcctccttcagaaagtgcagctcaagtcttaaagacaccaaaactgagccatgggcacgcgccgtctccgggccatggcgttcactgcagggcgggggcggcaccgctcccctgtgactgcatcccgcctccctggggacctgcctgtggcaggaaggaatggggggccccagccccaggccgggaaggagccagcggccgacaaagcagaaacacccgctgctccacgtagcccctgctcgctgtccttgctctcagaagtcccggtcccatgtagatagaggggggcgcatcttaccaaagcatttcctcctggaggctacgccgctgtgctcccagtcaggcggctggtagggagctttgcctgccccggggataccctctgccagccgctggaagtgggaatgctggcgacagactgtgtcctctttcccaccttcatagcaggaatcacccggacccgactggctgggcttcgtgctagcgagggttctgggggtgggtcttggtgatcttgtcctatggggagtctgcagtggtctcagccacatcctatgtattttggctctggaggagcaaagctgtatcctggagttggtctgtgatttgccgacagccttgcaggctgggctcagggacaaagtcccccccaaaacccgcaggtcctcatgtccagacgctgcccagtcctgtcctgaaaacagcacgccccaggcccacagaaccccccaccctacatttgccttgggtggagctgggggtggtcctaggactgcgggtgcccttagctgaagggggtggggagaagcgtggactgggcagcctgtgggtaattggaggttcattgagaattgagtctttggaaacactaagaaaatcaaatttttaaaagttatttatggcctgggaaacaatttgcatttgtccccaaatacgcttagctgtgtgccgcttagaacgatgcgaaaccatccctctgtgtaagcccgtgccgtgtgactcgaagcctagcgccctccctgcgaagcatcagacgccacccagccctggggggaggcccacgcctgctggaccaacgcgggttctggggtgcacagcgccaggttaacgctgaagcctgccccgctgagcccaggagccgggaggcctgcgggctgacccagaatccgatcatgcacctgtcctcatgccagcggctttggctggggttggtctgaagcctgcacgcggcagttctttgttaaagatctgagggactcctcagtcctggggcgtcgccgcctgcagcctcttccaagccctgcgtccagcgagcgtcacagcacaacctgcaaaaacggagctgggctgcagctggggctggcatggactttcatttcagagattcggtttttaagaagatgcatgcctaatgtgttcttttttttttccaatgatttgtaatatacattttatgactggaaacttttttgtacaacactccaataaacattttgattttaaaaaccccccacaaaaaaccccggggcactaagcggggggcgaaaacgggtcccacgggcctgggccaattgtccggacccctttcttgcccacgg

SEQ ID NO: 417825 - DNA, 4688 bp, Homo sapiens
catcttgcagccggcggcgcggattgaatgagcccgccgagcccgggccgccgtcgggagcagcgcaggccgcgagccgccgccaccatggccacgccgctgcccggccgcgcgggcgggcccgccacgccgctgtcgcccacgcgcctgtcgcggctgcaggagaaggaggagctgcgcgagctcaacgaccgcctggcgcactacatcgaccgcgtccgcgcgctggagctggagaacgaccggctcctgctcaagatctcagagaaggaggaggtgaccacgcgcgaggtgagtggcatcaaggcgctgtacgagtcggagctggccgatgcccggagagtcctggatgagacggctcgagagcgtgcccggctgcagatagagattgggaagctgagggcagagttggacgaggtcaacaagagcgccaagaagagggagggcgagcttacggtggcccagggccgtgtgaaggacctggagtccctgttccaccggagcgaggtggagctggcagctgccctcagcgacaagcgcggcctggagagtgacgtggctgagctgcgggcccagctggccaaggccgaggacggtcatgcagtggccaaaaagcagctggagaaggagacgctgatgcgtgtggacctggagaaccgctgccagagcctgcaggaggagctggacttccggaagagtgtgttcgaggaggaggtgcgggagacgcggcggcggcacgagcggcgcctggtggaggtggacagcagccggcagcaggagtacgacttcaagatggcacaggcgctggaggagctgcggagccagcacgacgagcaagtgcggctctacaagctggagctggagcagacctaccaggccaagctggacagcgccaagctgagctctgaccagaacgacaaggcggccagtgcggctcgcgaggagctgaaggaggcccgcatgcgcctggagtccctcagctaccagctctccggcctccagaagcaggccagtgccgctgaagatcgcattcgggagctggaggaggccatggccggggagcgggacaagttccggaagatgctggacgccaaggagcaggagatgacggagatgcgggacgtgatgcagcagcagctggccgagtaccaggagctgctggacgtgaagctggccctggacatggagatcaacgcctaccggaagctcctggagggcgaggaggagaggctgaagctgtcccccagcccatcctcgcgcgtcaccgtctcacgagccacctcgagcagcagcggcagcttgtccgccaccgggcgcctgggccgcagtaagcggaagcggctggaggtggaggagcccttgggcagcggcccaagcgtcctgggcacgggcacgggtggcagcggtggcttccacctggcccagcaggcctcggcctcgggtagcgtcagcatcgaggagatcgacctggagggcaagtttgtgcagctcaagaacaactcggacaaggatcagtctctggggaactggagaatcaagaggcaggtcttggagggggaggagatcgcctacaagttcacgcccaagtacatcctgcgcgccggccagatggtcacggtgtgggcagctggtgcgggggtggcccacagccccccctcgacgctggtgtggaagggccagagcagctggggcacgggcgagagcttccgcaccgtcctggttaacgcggatggcgaggaagtggccatgaggactgtgaagaagtcctcggtgatgcgtgagaatgagaatggggaggaagaggaggaggaagccgagtttggcgaggaggatcttttccaccaacagggggacccgaggaccacctcaagaggctgctacgtgatgtgaacccacactcctcatccacacacctttctttacccagagccactgaaaactatttttatatcattggctttctttagttcttgatacatttctagagaatttctaagcgaactgccagaacgtgtgggtgggtctcccccagccctccctcctggcgggtctcctccagcctcacttcgctgccacttcgccgctgccccggagacttttcaatcccaccccactcctcatctcaccatttggtcaaattggaagcccagggccaggacccggaggtttagaagatgcttgggcttggagggaggagggccggcgaggctagcgaggggacaggagacggccctgctgcggacggagcgcggaaactgcgtaggaattcagtggtggtgggtttttttaaggctttctacaaaaccaaattcagaatccaggcgtcgacctggtggggcccggggccaagcctgcattctggctgcccagcttcggacagcgggaactcctcaggcagccacgcagcgggtgtgggccagcatggggatggcgtggcccccagggcgggttttcactccgctgcctgggcttccagattcccgttctggcagcgcaccggccgggtttctcggaccgttgactttatttgggggagttttcccgcagttcagttcctgactgtgcaaggccaacagggcaggggaggggaagacctggggaaggaagaatgaggacagtcccgtcgtaagacctgtcacaacaataagcagggaggggagatgtggaggggacacatctggttgccttggaggcagaagctgtgagtttcagaacagctgtctgcagggaacgccaccatgttgaccctctggaggagagcgctgtggagcccctcccgtgttccagctccgtctgccctgtgcctatatatacacatgcgtctatccatactgtgcttttatctgtgattttctcgctgaaaccatgtttctcagacaggccaaggccacctgactcctatcacgacgcacccaagcccctcagtccagcttcccaatgcctggcaccccccttcggcaatagctcaccgtttacaccctccctcatagatacacagaagttatttttttaatggatatttatttttttacattggtcagtacacaggtcaggagctcacgccagggccttgaggacaggctgaccctcctccccggggtggcgtggggctggggcaccctccgacggcagagcctccttcagaaagtgcagctcaagtcttaaagacaccaaaactgagccatgggcacgcgccgtctccgggccatggcgttcactgcagggcgggggcggcaccgctcccctgtgactgcatcccgcctccctggggacctgcctgtggcaggaaggaatggggggccccagccccaggccgggaaggagccagcggccgacaaagcagaaacacccgctgctccacgtagcccctgctcgctgtccttgctctcagaagtcccggtcccatgtagatagaggggggcgcatcttaccaaagcatttcctcctggaggctacgccgctgtgctcccagtcaggcggctggtagggagctttgcctgccccggggataccctctgccagccgctggaagtgggaatgctggcgacagactgtgtcctctttcccaccttcatagcaggaatcacccggacccgactggctgggcttcgtgctagcgagggttctgggggtgggtcttggtgatcttgtcctatggggagtctgcagtggtctcagccacatcctatgtattttggctctggaggagcaaagctgtatcctggagttggtctgtgatttgccgacagccttgcaggctgggctcagggacaaagtcccccccaaaacccgcaggtcctcatgtccagacgctgcccagtcctgtcctgaaaacagcacgccccaggcccacagaaccccccaccctacatttgccttgggtggagctgggggtggtcctaggactgcgggtgcccttagctgaagggggtggggagaagcgtggactgggcagcctgtgggtaattggaggttcattgagaattgagtctttggaaacactaagaaaatcaaatttttaaaagttatttatggcctgggaaacaatttgcatttgtccccaaatacgcttagctgtgtgccgcttagaacgatgcgaaaccatccctctgtgtaagcccgtgccgtgtgactcgaagcctagcgccctccctgcgaagcatcagacgccacccagccctggggggaggcccacgcctgctggaccaacgcgggttctggggtgcacagcgccaggttaacgctgaagcctgccccgctgagcccaggagccgggaggcctgcgggctgacccagaatccgatcatgcacctgtcctcatgccagcggctttggctggggttggtctgaagcctgcacgcggcagttctttgttaaagatctgagggactcctcagtcctggggcgtcgccgcctgcagcctcttccaagccctgcgtccagcgagcgtcacagcacaacctgcaaaaacggagctgggctgcagctggggctggcatggactttcatttcagagattcggtttttaagaagatgcatgcctaatgtgttcttcccatgtttgtacttccttctgactggaatttttgtcacccccataaccttgtttcacacacaacaaacaacaacccggggtttgcgggggaaagtaaggcggtcgctccctttgagggaggcccaggaatacg

SEQ ID NO: 417826 - DNA, 4458 bp, Homo sapiens
catcttgcagccggcggcgcggattgaatgagcccgccgagcccgggccgccgtcgggagcagcgcaggccgcgagccgccgccaccatggccacgccgctgcccggccgcgcgggcgggcccgccacgccgctgtcgcccacgcgcctgtcgcggctgcaggagaaggaggagctgcgcgagctcaacgaccgcctggcgcactacatcgaccgcgtccgcgcgctggagctggagaacgaccggctcctgctcaagatctcagagaaggaggaggtgaccacgcgcgaggtgagtggcatcaaggcgctgtacgagtcggagctggccgatgcccggagagtcctggatgagacggctcgagagcgtgcccggctgcagatagagattgggaagctgagggcagagttggacgaggtcaacaagagcgccaagaagagggagggcgagcttacggtggcccagggccgtgtgaaggacctggagtccctgttccaccggagcgaggtggagctggcagctgccctcagcgacaagcgcggcctggagagtgacgtggctgagctgcgggcccagctggccaaggccgaggacggtcatgcagtggccaaaaagcagctggagaaggagacgctgatgcgtgtggacctggagaaccgctgccagagcctgcaggaggagctggacttccggaagagtgtgttcgaggaggaggtgcgggagacgcggcggcggcacgagcggcgcctggtggaggtggacagcagccggcagcaggagtacgacttcaagatggcacaggcgctggaggagctgcggagccagcacgacgagcaagtgcggctctacaagctggagctggagcagacctaccaggccaagctggacagcgccaagctgagctctgaccagaacgacaaggcggccagtgcggctcgcgaggagctgaaggaggcccgcatgcgcctggagtccctcagctaccagctctccggcctccagaagcaggccagtgccgctgaagatcgcattcgggagctggaggaggccatggccggggagcgggacaagttccggaagatgctggacgccaaggagcaggagatgacggagatgcgggacgtgatgcagcagcagctggccgagtaccaggagctgctggacgtgaagctggccctggacatggagatcaacgcctaccggaagctcctggagggcgaggaggagaggctgaagctgtcccccagcccatcctcgcgcgtcaccgtctcacgagccacctcgagcagcagcggcagcttgtccgccaccgggcgcctgggccgcagtaagcggaagcggctggaggtggaggagcccttgggcagcggcccaagcgtcctgggcacgggcacgggtggcagcggtggcttccacctggcccagcaggcctcggcctcgggtagcgtcagcatcgaggagatcgacctggagggcaagtttgtgcagctcaagaacaactcggacaaggatcagtctctggggaactggagaatcaagaggcaggtcttggagggggaggagatcgcctacaagttcacgcccaagtacatcctgcgcgccggccagatggtcacggtgtgggcagctggtgcgggggtggcccacagccccccctcgacgctggtgtggaagggccagagcagctggggcacgggcgagagcttccgcaccgtcctggttaacgcggatggcgaggaagtggccatgaggactgtgaagaagtcctcggtgatgcgtgagaatgagaatggggaggaagaggaggaggaagccgagtttggcgaggaggatcttttccaccaacagggggacccgaggaccacctcaagaggctgctacgtgatgtgaacccacactcctcatccacacacctttctttacccagagccactgaaaactatttttatatcattggctttctttagttcttgatacatttctagagaatttctaagcgaactgccagaacgtgtgggtgggtctcccccagccctccctcctggcgggtctcctccagcctcacttcgctgccacttcgccgctgccccggagacttttcaatcccaccccactcctcatctcaccatttggtcaaattggaagcccagggccaggacccggaggtttagaagatgcttgggcttggagggaggagggccggcgaggctagcgaggggacaggagacggccctgctgcggacggagcgcggaaactgcgtaggaattcagtggtggtgggtttttttaaggctttctacaaaaccaaattcagaatccaggcgtcgacctggtggggcccggggccaagcctgcattctggctgcccagcttcggacagcgggaactcctcaggcagccacgcagcgggtgtgggccagcatggggatggcgtggcccccagggcgggttttcactccgctgcctgggcttccagattcccgttctggcagcgcaccggccgggtttctcggaccgttgactttatttgggggagttttcccgcagttcagttcctgactgtgcaaggccaacagggcaggggaggggaagacctggggaaggaagaatgaggacagtcccgtcgtaagacctgtcacaacaataagcagggaggggagatgtggaggggacacatctggttgccttggaggcagaagctgtgagtttcagaacagctgtctgcagggaacgccaccatgttgaccctctggaggagagcgctgtggagcccctcccgtgttccagctccgtctgccctgtgcctatatatacacatgcgtctatccatactgtgcttttatctgtgattttctcgctgaaaccatgtttctcagacaggccaaggccacctgactcctatcacgacgcacccaagcccctcagtccagcttcccaatgcctggcaccccccttcggcaatagctcaccgtttacaccctccctcatagatacacagaagttatttttttaatggatatttatttttttacattggtcagtacacaggtcaggagctcacgccagggccttgaggacaggctgaccctcctccccggggtggcgtggggctggggcaccctccgacggcagagcctccttcagaaagtgcagctcaagtcttaaagacaccaaaactgagccatgggcacgcgccgtctccgggccatggcgttcactgcagggcgggggcggcaccgctcccctgtgactgcatcccgcctccctggggacctgcctgtggcaggaaggaatggggggccccagccccaggccgggaaggagccagcggccgacaaagcagaaacacccgctgctccacgtagcccctgctcgctgtccttgctctcagaagtcccggtcccatgtagatagaggggggcgcatcttaccaaagcatttcctcctggaggctacgccgctgtgctcccagtcaggcggctggtagggagctttgcctgccccggggataccctctgccagccgctggaagtgggaatgctggcgacagactgtgtcctctttcccaccttcatagcaggaatcacccggacccgactggctgggcttcgtgctagcgagggttctgggggtgggtcttggtgatcttgtcctatggggagtctgcagtggtctcagccacatcctatgtattttggctctggaggagcaaagctgtatcctggagttggtctgtgatttgccgacagccttgcaggctgggctcagggacaaagtcccccccaaaacccgcaggtcctcatgtccagacgctgcccagtcctgtcctgaaaacagcacgccccaggcccacagaaccccccaccctacatttgccttgggtggagctgggggtggtcctaggactgcgggtgcccttagctgaagggggtggggagaagcgtggactgggcagcctgtgggtaattggaggttcattgagaattgagtctttggaaacactaagaaaatcaaatttttaaaagttatttatggcctgggaaacaatttgcatttgtccccaaatacgcttagctgtgtgccgcttagaacgatgcgaaaccatccctctgtgtaagcccgtgccgtgtgactcgaagcctagcgccctccctgcgaagcatcagacgccacccagccctggggggaggcccacgcctgctggaccaacgcgggttctggggtgcacagcgccaggttaacgctgaagccaagccctgcgtccagcgagcgtcacagcacaacctgcaaaaacggagctgggctgcagctggggctggcatggactttcatttcagagattcggtttttaagaagatgcatgcctaatgtgttcttttttttttccaatgatttgtaatatacattttatgactggaaacttttttgtacaacactccaataaacattttgatttta

SEQ ID NO: 417827 - DNA, 3891 bp, Homo sapiens
  misc_feature (3842)..(3842): n is a, c, g, or t
catcttgcagccggcggcgcggattgaatgagcccgccgagcccgggccgccgtcgggagcagcgcaggccgcgagccgccgccaccatggccacgccgctgcccggccgcgcgggcgggcccgccacgccgctgtcgcccacgcgcctgtcgcggctgcaggagaaggaggagctgcgcgagctcaacgaccgcctggcgcactacatcgaccgcgtccgcgcgctggagctggagaacgaccggctcctgctcaagatctcagagaaggaggaggtgaccacgcgcgaggtgagtggcatcaaggcgctgtacgagtcggagctggccgatgcccggagagtcctggatgagacggctcgagagcgtgcccggctgcagatagagattgggaagctgagggcagagttggacgaggtcaacaagagcgccaagaagagggagggcgagcttacggtggcccagggccgtgtgaaggacctggagtccctgttccaccggagcgaggtggagctggcagctgccctcagcgacaagcgcggcctggagagtgacgtggctgagctgcgggcccagctggccaaggccgaggacggtcatgcagtggccaaaaagcagctggagaaggagacgctgatgcgtgtggacctggagaaccgctgccagagcctgcaggaggagctggacttccggaagagtgtgttcgaggaggaggtgcgggagacgcggcggcggcacgagcggcgcctggtggaggtggacagcagccggcagcaggagtacgacttcaagatggcacaggcgctggaggagctgcggagccagcacgacgagcaagtgcggctctacaagctggagctggagcagacctaccaggccaagctggacagcgccaagctgagctctgaccagaacgacaaggcggccagtgcggctcgcgaggagctgaaggaggcccgcatgcgcctggagtccctcagctaccagctctccggcctccagaagcaggccagtgccgctgaagatcgcattcgggagctggaggaggccatggccggggagcgggacaagttccggaagatgctggacgccaaggagcaggagatgacggagatgcgggacgtgatgcagcagcagctggccgagtaccaggagctgctggacgtgaagctggccctggacatggagatcaacgcctaccggaagctcctggagggcgaggaggagaggctgaagctgtcccccagcccatcctcgcgcgtcaccgtctcacgagccacctcgagcagcagcggcagcttgtccgccaccgggcgcctgggccgcagtaagcggaagcggctggaggtggaggagcccttgggcagcggcccaagcgtcctgggcacgggcacgggtggcagcggtggcttccacctggcccagcaggcctcggcctcgggtagcgtcagcatcgaggagatcgacctggagggcaagtttgtgcagctcaagaacaactcggacaaggatcagtctctggggaactggagaatcaagaggcaggtcttggagggggaggagatcgcctacaagttcacgcccaagtacatcctgcgcgccggccagatggtcacggtgtgggcagctggtgcgggggtggcccacagccccccctcgacgctggtgtggaagggccagagcagctggggcacgggcgagagcttccgcaccgtcctggttaacgcggatggcgaggaagtggccatgaggactgtgaagaagtcctcggtgatgcgtgagaatgagaatggggaggaagaggaggaggaagccgagtttggcgaggaggatcttttccaccaacagggggacccgaggaccacctcaagaggctgctacgtgatgtgaacccacactcctcatccacacacctttctttacccagagccactgaaaactatttttatatcattggctttctttagttcttgatacatttctagagaatttctaagcgaactgccagaacgtgtgggtgggtctcccccagccctccctcctggcgggtctcctccagcctcacttcgctgccacttcgccgctgccccggagacttttcaatcccaccccactcctcatctcaccatttggtcaaattggaagcccagggccaggacccggaggtttagaagatgcttgggcttggagggaggagggccggcgaggctagcgaggggacaggagacggccctgctgcggacggagcgcggaaactgcgtaggaattcagtggtggtgggtttttttaaggctttctacaaaaccaaattcagaatccaggcgtcgacctggtggggcccggggccaagcctgcattctggctgcccagcttcggacagcgggaactcctcaggcagccacgcagcgggtgtgggccagcatggggatggcgtggcccccagggcgggttttcactccgctgcctgggcttccagattcccgttctggcagcgcaccggccgggtttctcggaccgttgactttatttgggggagttttcccgcagttcagttcctgactgtgcaaggccaacagggcaggggaggggaagacctggggaaggaagaatgaggacagtcccgtcgtaagacctgtcacaacaataagcagggaggggagatgtggaggggacacatctggttgccttggaggcagaagctgtgagtttcagaacagctgtctgcagggaacgccaccatgttgaccctctggaggagagcgctgtggagcccctcccgtgttccagctccgtctgccctgtgcctatatatacacatgcgtctatccatactgtgcttttatctgtgattttctcgctgaaaccatgtttctcagacaggccaaggccacctgactcctatcacgacgcacccaagcccctcagtccagcttcccaatgcctggcaccccccttcggcaatagctcaccgtttacaccctccctcatagatacacagaagttatttttttaatggatatttatttttttacattggtcagtacacaggtcaggagctcacgccagggccttgaggacaggctgaccctcctccccggggtggcgtggggctggggcaccctccgacggcagagcctccttcagaaagtgcagctcaagtcttaaagacaccaaaactgagccatgggcacgcgccgtctccgggccatggcgttcactgcagggcgggggcggcaccgctcccctgtgactgcatcccgcctccctggggacctgcctgtggcaggaaggaatggggggccccagccccaggccgggaaggagccagcggccgacaaagcagaaacacccgctgctccacgtagcccctgctcgctgtccttgctctcagaagtcccggtcccatgtagatagaggggggcgcatcttaccaaagcatttcctcctggaggctacgccgctgtgctcccagtcaggcggctggtagggagctttgcctgccccggggataccctctgccagccgctggaagtgggaatgctggcgacagactgtgtcctctttcccaccttcatagcaggaatcacccggacccgactggctgggcttcgtgctagcgagggttctgggggtgggtcttggtgatcttgtcctatggggagtctgcagtggtctcagccacatcctatgtattttggctctggaggagcaaagctgtatcctggagttggtctgtgatttgccgacagccttgcaggctgggctcagggacaaagtcccccccaaaacccgcaggtcctcatgtccagacgctgcccagtcctgtcctgaaaacagccagncaaaaaccacctattgtggtgggcgggggccaacgcgggccacaggggg

SEQ ID NO: 417828 - DNA, 1799 bp, Homo sapiens
  misc_feature (624)..(624): n is a, c, g, or t
gctaggcatcagggctgggttaaatgtacgaggcgaaaccatccctctgtgtaagccgtgccgtgtgactcgaagcctagcgccctccctgcgaagcatcagacgccacccagccctggggaggagggtcagcctgttgctcctccgcggggttgtggtgtggctaggggccagctccgagcgtgcagagctctccttgcatgaaactgacagatcaagtgattacatgacaccattagaactgaacctatggagtcatgcgccgttgttcctgcggtcctatgggcggttctacgtgctagggggctgtgggtgctggaaacccgtgtccccctggtgacttgctatcgcctgaacatcatccttgagggagccctgccctgatgtgcatggaagcgatatggcgggcgtcccagctctagcgacgccgcataggatccagcggacgtcaaagcagaaacagccgatgctccaacgttagccctcctgctcgcctgtcgcttgtcgtcatctacaattcccggatcactcacctggtatgattagagagggagtgcgacttgtcttaactcgatagatgcatttttctctcctgcgcagagtcgtatcgcgcgacattgattncctctccagatcgaaggcggctggtagggagctttgcctgccccggggataccctctgccagccgctggaagtgggaatgctggcgacagactgtgtcctctttcccaccttcatagcaggaatcacccggacccgactggctgggcttcgtgctagcgagggttctgggggtgggtcttggtgatcttgtcctatggggagtctgcagtggtctcagccacatcctatgtattttggctctggaggagcaaagctgtatcctggagttggtctgtgatttgccgacagccttgcaggctgggctcagggacaaagtcccccccaaaacccgcaggtcctcatgtccagacgctgcccagtcctgtcctgaaaacagcacgccccaggcccacagaaccccccaccctacatttgccttgggtggagctgggggtggtcctaggactgcgggtgcccttagctgaagggggtggggagaagcgtggactgggcagcctgtgggtaattggaggttcattgagaattgagtctttggaaacactaagaaaatcaaatttttaaaagttatttatggcctgggaaacaatttgcatttgtccccaaatacgcttagctgtgtgccgcttagaacgatgcgaaaccatccctctgtgtaagcccgtgccgtgtgactcgaagcctagcgccctccctgcgaagcatcagacgccacccagccctggggggaggcccacgcctgctggaccaacgcgggttctggggtgcacagcgccaggttaacgctgaagcctgccccgctgagcccaggagccgggaggcctgcgggctgacccagaatccgatcatgcacctgtcctcatgccagcggctttggctggggttggtctgaagcctgcacgcggcagttctttgttaaagatctgagggactcctcagtcctggggcgtcgccgcctgcagcctcttccaagccctgcgtccagcgagcgtcacagcacaacctgcaaaaacggagctgggctgcagctggggctggcatggactttcatttcagagattcggtttttaagaagatgcatgcctaatgtgttcttttttttttccaatgatttgtaatatacattttatgactggaaacttttttgtacaacactccaataaacattttgatttta

SEQ ID NO: 417829 - DNA, 1088 bp, Homo sapiens
aacggctaggtgcgaggctggggtgtatagcaggaatcacccggacccgactggctgggcttcgtgctagcgagggttctgggggtgggtcttggtgatcttgtcctatggggagtctgcagtggtctcagccacatcctatgtattttggctctggaggagcaaagctgtatcctggagttggtctgtgatttgccgacagccttgcaggctgggctcagggacaaagtcccccccaaaacccgcaggtcctcatgtccagacgctgcccagtcctgtcctgaaaacagcacgccccaggcccacagaaccccccaccctacatttgccttgggtggagctgggggtggtcctaggactgcgggtgcccttagctgaagggggtggggagaagcgtggactgggcagcctgtgggtaattggaggttcattgagaattgagtctttggaaacactaagaaaatcaaatttttaaaagttatttatggcctgggaaacaatttgcatttgtccccaaatacgcttagctgtgtgccgcttagaacgatgcgaaaccatccctctgtgtaagcccgtgccgtgtgactcgaagcctagcgccctccctgcgaagcatcagacgccacccagccctggggggaggcccacgcctgctggaccaacgcgggttctggggtgcacagcgccaggttaacgctgaagcctgccccgctgagcccaggagccgggaggcctgcgggctgacccagaatccgatcatgcacctgtcctcatgccagcggctttggctggggttggtctgaagcctgcacgcggcagttctttgttaaagatctgagggactcctcagtcctggggcgtcgccgcctgcagcctcttccaagccctgcgtccagcgagcgtcacagcacaacctgcaaaaacggagctgggctgcagctggggctggcatggactttcatttcagagattcggtttttaagaagatgcatgcctaatgtgttcttttttttttccaatgatttgtaatatacattttatgactggaaacttttttgtacaacactccaataaacattttgatttta

SEQ ID NO: 417830 - DNA, 2823 bp, Homo sapiens
catcttgcagccggcggcgcggattgaatgagcccgccgagcccgggccgccgtcgggagcagcgcaggccgcgagccgccgccaccatggccacgccgctgcccggccgcgcgggcgggcccgccacgccgctgtcgcccacgcgcctgtcgcggctgcaggagaaggaggagctgcgcgagctcaacgaccgcctggcgcactacatcgaccgcgtccgcgcgctggagctggagaacgaccggctcctgctcaagatctcagagaaggaggaggtgaccacgcgcgaggtgagtggcatcaaggcgctgtacgagtcggagctggccgatgcccggagagtcctggatgagacggctcgagagcgtgcccggctgcagatagagattgggaagctgagggcagagttggacgaggtcaacaagagcgccaagaagagggagggcgagcttacggtggcccagggccgtgtgaaggacctggagtccctgttccaccggagcgaggtggagctggcagctgccctcagcgacaagcgcggcctggagagtgacgtggctgagctgcgggcccagctggccaaggccgaggacggtcatgcagtggccaaaaagcagctggagaaggagacgctgatgcgtgtggacctggagaaccgctgccagagcctgcaggaggagctggacttccggaagagtgtgttcgaggaggaggtgcgggagacgcggcggcggcacgagcggcgcctggtggaggtggacagcagccggcagcaggagtacgacttcaagatggcacaggcgctggaggagctgcggagccagcacgacgagcaagtgcggctctacaagctggagctggagcagacctaccaggccaagctggacagcgccaagctgagctctgaccagaacgacaaggcggccagtgcggctcgcgaggagctgaaggaggcccgcatgcgcctggagtccctcagctaccagctctccggcctccagaagcaggccagtgccgctgaagatcgcattcgggagctggaggaggccatggccggggagcgggacaagttccggaagatgctggacgccaaggagcaggagatgacggagatgcgggacgtgatgcagcagcagctggccgagtaccaggagctgctggacgtgaagctggccctggacatggagatcaacgcctaccggaagctcctggagggcgaggaggagaggctgaagctgtcccccagcccatcctcgcgcgtcaccgtctcacgagccacctcgagcagcagcggcagcttgtccgccaccgggcgcctgggccgcagtaagcggaagcggctggaggtggaggagcccttgggcagcggcccaagcgtcctgggcacgggcacgggtggcagcggtggcttccacctggcccagcaggcctcggcctcgggtagcgtcagcatcgaggagatcgacctggagggcaagtttgtgcagctcaagaacaactcggacaaggatcagtctctggggaactggagaatcaagaggcaggtcttggagggggaggagatcgcctacaagttcacgcccaagtacatcctgcgcgccggccagatggtcacggtgtgggcagctggtgcgggggtggcccacagccccccctcgacgctggtgtggaagggccagagcagctggggcacgggcgagagcttccgcaccgtcctggttaacgcggatggcgaggaagtggccatgaggactgtgaagaagtcctcggtgatgcgtgagaatgagaatggggaggaagaggaggaggaagccgagtttggcgaggaggatcttttccaccaacagggggacccgaggaccacctcaagaggctgctacgtgatgtgaacccacactcctcatccacacacctttctttacccagagccactgaaaactatttttatatcattggctttctttagttcttgatacatttctagagaatttctaagcgaactgccagaacgtgtgggtgggtctcccccagccctccctcctggcgggtctcctccagcctcacttcgctgccacttcgccgctgccccggagacttttcaatcccaccccactcctcatctcaccatttggtcaaattggaagcccagggccaggacccggaggtttagaagatgcttgggcttggagggaggagggccggcgaggctagcgaggggacaggagacggccctgctgcggacggagcgcggaaactgcgtaggaattcagtggtggtgggtttttttaaggctttctacaaaaccaaattcagaatccaggcgtcgacctggtggggcccggggccaagcctgcattctggctgcccagcttcggacagcgggaactcctcaggcagccacgcagcgggtgtgggccagcatggggatggcgtggcccccagggcgggttttcactccgctgcctgggcttccagattcccgttctggcagcgcaccggccgggtttctcggaccgttgactttatttgggggagttttcccgcagttcagttcctgactgtgcaaggccaacagggcaggggaggggaagacctggggaaggaagaatgaggacagtcccgtcgtaagacctgtcacaacaataagcagggaggggagatgtggaggggacacatctggttgccttggaggaaaaatctttagtttatttatataggtgttagagggtaactgccttatttttacccttttaagttcagctgttttttgacaatattaattgtttaaagtacgtattgaatggttttttttatatcggttg

SEQ ID NO: 417831 - DNA, 3161 bp, Homo sapiens
catcttgcagccggcggcgcggattgaatgagcccgccgagcccgggccgccgtcgggagcagcgcaggccgcgagccgccgccaccatggccacgccgctgcccggccgcgcgggcgggcccgccacgccgctgtcgcccacgcgcctgtcgcggctgcaggagaaggaggagctgcgcgagctcaacgaccgcctggcgcactacatcgaccgcgtccgcgcgctggagctggagaacgaccggctcctgctcaagatctcagagaaggaggaggtgaccacgcgcgaggtgagtggcatcaaggcgctgtacgagtcggagctggccgatgcccggagagtcctggatgagacggctcgagagcgtgcccggctgcagatagagattgggaagctgagggcagagttggacgaggtcaacaagagcgccaagaagagggagggcgagcttacggtggcccagggccgtgtgaaggacctggagtccctgttccaccggagcgaggtggagctggcagctgccctcagcgacaagcgcggcctggagagtgacgtggctgagctgcgggcccagctggccaaggccgaggacggtcatgcagtggccaaaaagcagctggagaaggagacgctgatgcgtgtggacctggagaaccgctgccagagcctgcaggaggagctggacttccggaagagtgtgttcgaggaggaggtgcgggagacgcggcggcggcacgagcggcgcctggtggaggtggacagcagccggcagcaggagtacgacttcaagatggcacaggcgctggaggagctgcggagccagcacgacgagcaagtgcggctctacaagctggagctggagcagacctaccaggccaagctggacagcgccaagctgagctctgaccagaacgacaaggcggccagtgcggctcgcgaggagctgaaggaggcccgcatgcgcctggagtccctcagctaccagctctccggcctccagaagcaggccagtgccgctgaagatcgcattcgggagctggaggaggccatggccggggagcgggacaagttccggaagatgctggacgccaaggagcaggagatgacggagatgcgggacgtgatgcagcagcagctggccgagtaccaggagctgctggacgtgaagctggccctggacatggagatcaacgcctaccggaagctcctggagggcgaggaggagaggctgaagctgtcccccagcccatcctcgcgcgtcaccgtctcacgagccacctcgagcagcagcggcagcttgtccgccaccgggcgcctgggccgcagtaagcggaagcggctggaggtggaggagcccttgggcagcggcccaagcgtcctgggcacgggcacgggtggcagcggtggcttccacctggcccagcaggcctcggcctcgggtagcgtcagcatcgaggagatcgacctggagggcaagtttgtgcagctcaagaacaactcggacaaggatcagtctctggggaactggagaatcaagaggcaggtcttggagggggaggagatcgcctacaagttcacgcccaagtacatcctgcgcgccggccagatggtcacggtgtgggcagctggtgcgggggtggcccacagccccccctcgacgctggtgtggaagggccagagcagctggggcacgggcgagagcttccgcaccgtcctggttaacgcggatggcgaggaagtggccatgaggactgtgaagaagtcctcggtgatgcgtgagaatgagaatggggaggaagaggaggaggaagccgagtttggcgaggaggatcttttccaccaacagggggacccgaggaccacctcaagaggctgctacgtgatgtgaacccacactcctcatccacacacctttctttacccagagccactgaaaactatttttatatcattggctttctttagttcttgatacatttctagagaatttctaagcgaactgccagaacgtgtgggtgggtctcccccagccctccctcctggcgggtctcctccagcctcacttcgctgccacttcgccgctgccccggagacttttcaatcccaccccactcctcatctcaccatttggtcaaattggaagcccagggccaggacccggaggtttagaagatgcttgggcttggagggaggagggccggcgaggctagcgaggggacaggagacggccctgctgcggacggagcgcggaaactgcgtaggaattcagtggtggtgggtttttttaaggctttctacaaaaccaaattcagaatccaggcgtcgacctggtggggcccggggccaagcctgcattctggctgcccagcttcggacagcgggaactcctcaggcagccacgcagcgggtgtgggccagcatggggatggcgtggcccccagggcgggttttcactccgctgcctgggcttccagattcccgttctggcagcgcaccggccgggtttctcggaccgttgactttatttgggggagttttcccgcagttcagttcctgacttgtgcttttatctgtgattttctcgctgaaaccatgtttctcagacaggccaaggccacctgactcctatcacgacgcacccaagcccctcagtccagcttcccaatgcctggcaccccccttcggcaatagctcaccgtttacaccctccctcatagatacacagaagttatttttttaatggatatttatttttttacattggtcagtacacaggtcaggagctcacgccagggccttgaggacaggctgaccctcctccccaggccgggaaggagccagcggccgacaaagcagaaacacccgctgctccacgtagcccctgctcgctgtccttgctctcagaagtcccggtcccatgtagatagaggggggcgcatcttaccaaagcatttcctcctggaggctacgccgctgtgctcccagtcaggcggctggtagggagctttgcctgccccggggataccctctgccagccgctggaagtgggaatgctggcgacagactgtgtcctctttcccaccttcactttttgcgattaccggccattgtggttctgtcaggtcggggggcctgggctctcctcggggtccggttccc

SEQ ID NO: 417832 - DNA, 2453 bp, Homo sapiens
  misc_feature (2413)..(2413): n is a, c, g, or t
catcttgcagccggcggcgcggattgaatgagcccgccgagcccgggccgccgtcgggagcagcgcaggccgcgagccgccgccaccatggccacgccgctgcccggccgcgcgggcgggcccgccacgccgctgtcgcccacgcgcctgtcgcggctgcaggagaaggaggagctgcgcgagctcaacgaccgcctggcgcactacatcgaccgcgtccgcgcgctggagctggagaacgaccggctcctgctcaagatctcagagaaggaggaggtgaccacgcgcgaggtgagtggcatcaaggcgctgtacgagtcggagctggccgatgcccggagagtcctggatgagacggctcgagagcgtgcccggctgcagatagagattgggaagctgagggcagagttggacgaggtcaacaagagcgccaagaagagggagggcgagcttacggtggcccagggccgtgtgaaggacctggagtccctgttccaccggagcgaggtggagctggcagctgccctcagcgacaagcgcggcctggagagtgacgtggctgagctgcgggcccagctggccaaggccgaggacggtcatgcagtggccaaaaagcagctggagaaggagacgctgatgcgtgtggacctggagaaccgctgccagagcctgcaggaggagctggacttccggaagagtgtgttcgaggaggaggtgcgggagacgcggcggcggcacgagcggcgcctggtggaggtggacagcagccggcagcaggagtacgacttcaagatggcacaggcgctggaggagctgcggagccagcacgacgagcaagtgcggctctacaagctggagctggagcagacctaccaggccaagctggacagcgccaagctgagctctgaccagaacgacaaggcggccagtgcggctcgcgaggagctgaaggaggcccgcatgcgcctggagtccctcagctaccagctctccggcctccagaagcaggccagtgccgctgaagatcgcattcgggagctggaggaggccatggccggggagcgggacaagttccggaagatgctggacgccaaggagcaggagatgacggagatgcgggacgtgatgcagcagcagctggccgagtaccaggagctgctggacgtgaagctggccctggacatggagatcaacgcctaccggaagctcctggagggcgaggaggagaggctgaagctgtcccccagcccatcctcgcgcgtcaccgtctcacgagccacctcgagcagcagcggcagcttgtccgccaccgggcgcctgggccgcagtaagcggaagcggctggaggtggaggagcccttgggcagcggcccaagcgtcctgggcacgggcacgggtggcagcggtggcttccacctggcccagcaggcctcggcctcgggtagcgtcagcatcgaggagatcgacctggagggcaagtttgtgcagctcaagaacaactcggacaaggatcagtctctggggaactggagaatcaagaggcaggtcttggagggggaggagatcgcctacaagttcacgcccaagtacatcctgcgcgccggccagatggtcacggtgtgggcagctggtgcgggggtggcccacagccccccctcgacgctggtgtggaagggccagagcagctggggcacgggcgagagcttccgcaccgtcctggttaacgcggatggcgaggaagtggccatgaggactgtgaagaagtcctcggtgatgcgtgagaatgagaatggggaggaagaggaggaggaagccgagtttggcgaggaggatcttttccaccaacagggggacccgaggaccacctcaagaggctgctacgtgatgtgaacccacactcctcatccacacacctttctttacccagagccactgaaaactatttttatatcattggctttctttagttcttgatacatttctagagaatttctaagcgaactgccagaacgtgtgggtgggtctcccccagccctccctcctggcgggtctcctccagcctcacttcgctgccacttcgccgctgccccggagacttttcaatcccaccccactcccgtaccagggagtggggccagtgcgtgtgaagggggcaaagagggtatggcctaaggaagagcgctgaccctaaggaaggacatgattgctctgtaacaggagagagaaaagagaagataccagattcggggatggaaagatgagagtcccattctaatggctattttcatccattttctcaaagactgggggagttaaactggggagagggaacaggaggctgaactgggaccaaactgttttcagacctgcttggttaatgctgagactgccaatgggaggcgggaaacgctgnccccctctctaagatgcagctcctctctccaggaccccca

SEQ ID NO: 417833 - DNA, 2204 bp, Homo sapiens
catcttgcagccggcggcgcggattgaatgagcccgccgagcccgggccgccgtcgggagcagcgcaggccgcgagccgccgccaccatggccacgccgctgcccggccgcgcgggcgggcccgccacgccgctgtcgcccacgcgcctgtcgcggctgcaggagaaggaggagctgcgcgagctcaacgaccgcctggcgcactacatcgaccgcgtccgcgcgctggagctggagaacgaccggctcctgctcaagatctcagagaaggaggaggtgaccacgcgcgaggtgagtggcatcaaggcgctgtacgagtcggagctggccgatgcccggagagtcctggatgagacggctcgagagcgtgcccggctgcagatagagattgggaagctgagggcagagttggacgaggtcaacaagagcgccaagaagagggagggcgagcttacggtggcccagggccgtgtgaaggacctggagtccctgttccaccggagcgaggtggagctggcagctgccctcagcgacaagcgcggcctggagagtgacgtggctgagctgcgggcccagctggccaaggccgaggacggtcatgcagtggccaaaaagcagctggagaaggagacgctgatgcgtgtggacctggagaaccgctgccagagcctgcaggaggagctggacttccggaagagtgtgttcgaggaggaggtgcgggagacgcggcggcggcacgagcggcgcctggtggaggtggacagcagccggcagcaggagtacgacttcaagatggcacaggcgctggaggagctgcggagccagcacgacgagcaagtgcggctctacaagctggagctggagcagacctaccaggccaagctggacagcgccaagctgagctctgaccagaacgacaaggcggccagtgcggctcgcgaggagctgaaggaggcccgcatgcgcctggagtccctcagctaccagctctccggcctccagaagcaggccagtgccgctgaagatcgcattcgggagctggaggaggccatggccggggagcgggacaagttccggaagatgctggacgccaaggagcaggagatgacggagatgcgggacgtgatgcagcagcagctggccgagtaccaggagctgctggacgtgaagctggccctggacatggagatcaacgcctaccggaagctcctggagggcgaggaggagaggctgaagctgtcccccagcccatcctcgcgcgtcaccgtctcacgagccacctcgagcagcagcggcagcttgtccgccaccgggcgcctgggccgcagtaagcggaagcggctggaggtggaggagcccttgggcagcggcccaagcgtcctgggcacgggcacgggtggcagcggtggcttccacctggcccagcaggcctcggcctcgggtagcgtcagcatcgaggagatcgacctggagggcaagtttgtgcagctcaagaacaactcggacaaggatcagtctctggggaactggagaatcaagaggcaggtcttggagggggaggagatcgcctacaagttcacgcccaagtacatcctgcgcgccggccagatggtcacggtgtgggcagctggtgcgggggtggcccacagccccccctcgacgctggtgtggaagggccagagcagctggggcacgggcgagagcttccgcaccgtcctggttaacgcggatggcgaggaagtggccatgaggactgtgaagaagtcctcggtgatgcgtgagaatgagaatggggaggaagaggaggaggaagccgagtttggcgaggaggatcttttccaccaacagtgagcctccgacgctgttgcacaagctgactcttcgtcacgtgatgcgaccgggctccgccccggcggcaacacgctgtatagacgcgccgggtgcctcgtgcgcatgcgcggcaggcccttcgggacgagctggaggcagagcgtgagtacaaagtgatcggcctcggccgcacgtagtagcccccctactccccggccaagtcagggcctccctcttcccgcggagtcgcaaccacgggtagctcgtgtaggtaacggcaggtccaggcctccgcatgagcggagggccccccgcgcgaccttgaatggcccgggcgcgcgcggtcgtgtgggagttgtagtcctccgtccccg

SEQ ID NO: 417834 - DNA, 1781 bp, Homo sapiens
catcttgcagccggcggcgcggattgaatgagcccgccgagcccgggccgccgtcgggagcagcgcaggccgcgagccgccgccaccatggccacgccgctgcccggccgcgcgggcgggcccgccacgccgctgtcgcccacgcgcctgtcgcggctgcaggagaaggaggagctgcgcgagctcaacgaccgcctggcgcactacatcgaccgcgtccgcgcgctggagctggagaacgaccggctcctgctcaagatctcagagaaggaggaggtgaccacgcgcgaggtgagtggcatcaaggcgctgtacgagtcggagctggccgatgcccggagagtcctggatgagacggctcgagagcgtgcccggctgcagatagagattgggaagctgagggcagagttggacgaggtcaacaagagcgccaagaagagggagggcgagcttacggtggcccagggccgtgtgaaggacctggagtccctgttccaccggagcgaggtggagctggcagctgccctcagcgacaagcgcggcctggagagtgacgtggctgagctgcgggcccagctggccaaggccgaggacggtcatgcagtggccaaaaagcagctggagaaggagacgctgatgcgtgtggacctggagaaccgctgccagagcctgcaggaggagctggacttccggaagagtgtgttcgaggaggaggtgcgggagacgcggcggcggcacgagcggcgcctggtggaggtggacagcagccggcagcaggagtacgacttcaagatggcacaggcgctggaggagctgcggagccagcacgacgagcaagtgcggctctacaagctggagctggagcagacctaccaggccaagctggacagcgccaagctgagctctgaccagaacgacaaggcggccagtgcggctcgcgaggagctgaaggaggcccgcatgcgcctggagtccctcagctaccagctctccggcctccagaagcaggccagtgccgctgaagatcgcattcgggagctggaggaggccatggccggggagcgggacaagttccggaagatgctggacgccaaggagcaggagatgacggagatgcgggacgtgatgcagcagcagctggccgagtaccaggagctgctggacgtgaagctggccctggacatggagatcaacgcctaccggaagctcctggagggcgaggaggagaggctgaagctgtcccccagcccatcctcgcgcgtcaccgtctcacgagccacctcgagcagcagcggcagcttgtccgccaccgggcgcctgggccgcagtaagcggaagcggctggaggtggaggagcccttgggcagcggcccaagcgtcctgggcacgggcacgggtggcagcggtggcttccacctggcccagcaggcctcggcctcgggtagcgtcagcatcgaggagatcgacctggagggcaagtttgtgcagctcaagaacaactcggacaaggatcagtctctggggaactggagaatcaagaggcaggtcttggagggggaggagatcgcctacaagttcacgcccaagtacatcctgcgcgccggccagatggtcacggtgtgggcacctggtgcgggggtgctctataccacttcctttttactatcttggatatgtccctttactttattgagtacatccttctgtaagttttcatctccttttctctttatataatgcttctaattgtgcgtctcatggtattaatccctaccccacgt

SEQ ID NO: 417835 - DNA, 484 bp, Homo sapiens
  misc_feature (80)..(80): n is a, c, g, or t
ccaaatttccaccacgccaatcaatcaaaattaatcaaacgacaaaaaaaaacccccatcgcagacacagctaaatgtcncgccaagccagccgtgcgctccgcaaaagcgaatcgtcgttatcaggcggtaagagacaaattacatctctccgctcaaggaaagttataatgcttttcaagggaccagaggcttttaaggtttaaatatcgaatgaagcataaggtcccccccaaaacccgcaggtcctggggcgtcgccgcctgcagcctcttccaagccctgcgtccagcgagcgtcacagcacaacctgcaaaaacggagctgggctgcagctggggctggcatggactttcatttcagagattcggtttttaagaagatgcatgcctaatgtgttcttttttttttccaatgatttgtaatatacattttatgactggaaacttttttgtacaacactccaataaacattttgatttta

SEQ ID NO: 417836 - DNA, 401 bp, Homo sapiens
acccccaaggaaaaaggtcactggctagtgtagctagtgtaaacaggacccaggcgatgcatgggaccctgcccttttttttctagtgagcctccgacgctgttgcacaagctgactcttcgtcacgtgatgcgaccgggctccgccccggcggcaacacgctgtatagacgcgccgggtgcctcgtgcgcatgcgcggcaggcccttcgggacgagctggaggcagagcgtgagtacaaagtgatcggcctcggccgcacgtagtagcccccctactccccggccaagtcagggcctccctcttcccgcggagtcgcaaccacgggtagctcgtgtaggtaacggcaggtccaggcctccgcatgagcggagggccccccgcgcgaccttgaatggcccg

SEQ ID NO: 417837 - DNA, 4635 bp, Homo sapiens
catcttgcagccggcggcgcggattgaatgagcccgccgagcccgggccgccgtcgggagcagcgcaggccgcgagccgccgccaccatggccacgccgctgcccggccgcgcgggcgggcccgccacgccgctgtcgcccacgcgcctgtcgcggctgcaggagaaggaggagctgcgcgagctcaacgaccgcctggcgcactacatcgaccgcgtccgcgcgctggagctggagaacgaccggctcctgctcaagatctcagagaaggaggaggtgaccacgcgcgaggtgagtggcatcaaggcgctgtacgagtcggagctggccgatgcccggagagtcctggatgagacggctcgagagcgtgcccggctgcagatagagattgggaagctgagggcagagttggacgaggtcaacaagagcgccaagaagagggagggcgagcttacggtggcccagggccgtgtgaaggacctggagtccctgttccaccggagcgaggtggagctggcagctgccctcagcgacaagcgcggcctggagagtgacgtggctgagctgcgggcccagctggccaaggccgaggacggtcatgcagtggccaaaaagcagctggagaaggagacgctgatgcgtgtggacctggagaaccgctgccagagcctgcaggaggagctggacttccggaagagtgtgttcgaggaggaggtgcgggagacgcggcggcggcacgagcggcgcctggtggaggtggacagcagccggcagcaggagtacgacttcaagatggcacaggcgctggaggagctgcggagccagcacgacgagcaagtgcggctctacaagctggagctggagcagacctaccaggccaagctggacagcgccaagctgagctctgaccagaacgacaaggcggccagtgcggctcgcgaggagctgaaggaggcccgcatgcgcctggagtccctcagctaccagctctccggcctccagaagcaggccagtgccgctgaagatcgcattcgggagctggaggaggccatggccggggagcgggacaagttccggaagatgctggacgccaaggagcaggagatgacggagatgcgggacgtgatgcagcagcagctggccgagtaccaggagctgctggacgtgaagctggccctggacatggagatcaacgcctaccggaagctcctggagggcgaggaggagaggctgaagctgtcccccagcccatcctcgcgcgtcaccgtctcacgagccacctcgagcagcagcggcagcttgtccgccaccgggcgcctgggccgcagtaagcggaagcggctggaggtggaggagcccttgggcagcggcccaagcgtcctgggcacgggcacgggtggcagcggtggcttccacctggcccagcaggcctcggcctcgggtagcgtcagcatcgaggagatcgacctggagggcaagtttgtgcagctcaagaacaactcggacaaggatcagtctctggggaactggagaatcaagaggcaggtcttggagggggaggagatcgcctacaagttcacgcccaagtacatcctgcgcgccggccagatggtcacggtgtgggcagctggtgcgggggtggcccacagccccccctcgacgctggtgtggaagggccagagcagctggggcacgggcgagagcttccgcaccgtcctggttaacgcggatggcgaggaagtggccatgaggactgtgaagaagtcctcggtgatgcgtgagaatgagaatggggaggaagaggaggaggaagccgagtttggcgaggaggatcttttccaccaacagggggacccgaggaccacctcaagaggctgctacgtgatgtgaacccacactcctcatccacacacctttctttacccagagccactgaaaactatttttatatcattggctttctttagttcttgatacatttctagagaatttctaagcgaactgccagaacgtgtgggtgggtctcccccagccctccctcctggcgggtctcctccagcctcacttcgctgccacttcgccgctgccccggagacttttcaatcccaccccactcctcatctcaccatttggtcaaattggaagcccagggccaggacccggaggtttagaagatgcttgggcttggagggaggagggccggcgaggctagcgaggggacaggagacggccctgctgcggacggagcgcggaaactgcgtaggaattcagtggtggtgggtttttttaaggctttctacaaaaccaaattcagaatccaggcgtcgacctggtggggcccggggccaagcctgcattctggctgcccagcttcggacagcgggaactcctcaggcagccacgcagcgggtgtgggccagcatggggatggcgtggcccccagggcgggttttcactccgctgcctgggcttccagattcccgttctggcagcgcaccggccgggtttctcggaccgttgactttatttgggggagttttcccgcagttcagttcctgactgtgcaaggccaacagggcaggggaggggaagacctggggaaggaagaatgaggacagtcccgtcgtaagacctgtcacaacaataagcagggaggggagatgtggaggggacacatctggttgccttggaggcagaagctgtgagtttcagaacagctgtctgcagggaacgccaccatgttgaccctctggaggagagcgctgtggagcccctcccgtgttccagctccgtctgccctgtgcctatatatacacatgcgtctatccatactgtgcttttatctgtgattttctcgctgaaaccatgtttctcagacaggccaaggccacctgactcctatcacgacgcacccaagcccctcagtccagcttcccaatgcctggcaccccccttcggcaatagctcaccgtttacaccctccctcatagatacacagaagttatttttttaatggatatttatttttttacattggtcagtacacaggtcaggagctcacgccagggccttgaggacaggctgaccctcctccccggggtggcgtggggctggggcaccctccgacggcagagcctccttcagaaagtgcagctcaagtcttaaagacaccaaaactgagccatgggcacgcgccgtctccgggccatggcgttcactgcagggcgggggcggcaccgctcccctgtgactgcatcccgcctccctggggacctgcctgtggcaggaaggaatggggggccccagccccaggccgggaaggagccagcggccgacaaagcagaaacacccgctgctccacgtagcccctgctcgctgtccttgctctcagaagtcccggtcccatgtagatagaggggggcgcatcttaccaaagcatttcctcctggaggctacgccgctgtgctcccagtcaggcggctggtagggagctttgcctgccccggggataccctctgccagccgctggaagtgggaatgctggcgacagactgtgtcctctttcccaccttcatagcaggaatcacccggacccgactggctgggcttcgtgctagcgagggttctgggggtgggtcttggtgatcttgtcctatggggagtctgcagtggtctcagccacatcctatgtattttggctctggaggagcaaagctgtatcctggagttggtctgtgatttgccgacagccttgcaggctgggctcagggacaaagtcccccccaaaacccgcaggtcctcatgtccagacgctgcccagtcctgtcctgaaaacagcacgccccaggcccacagaaccccccaccctacatttgccttgggtggagctgggggtggtcctaggactgcgggtgcccttagctgaagggggtggggagaagcgtggactgggcagcctgtgggtaattggaggttcattgagaattgagtctttggaaacactaagaaaatcaaatttttaaaagttatttatggcctgggaaacaatttgcatttgtccccaaatacgcttagctgtgtgccgcttagaacgatgcgaaaccatccctctgtgtaagcccgtgccgtgtgactcgaagcctagcgccctccctgcgaagcatcagacgccacccagccctggggggaggcccacgcctgctggaccaacgcgggttctggggtgcacagcgccaggttaacgctgaagcctgccccgctgagcccaggagccgggaggcctgcgggctgacccagaatccgatcatgcacctgtcctcatgccagcggctttggctggggttggtctgaagcctgcacgcggcagttctttgttaaagatctgagggactcctcagtcctggggcgtcgccgcctgcagcctcttccaagccctgcgtccagcgagcgtcacagcacaacctgcaaaaacggagctgggctgcagctggggctggcatggactttcatttcagagattcggtttttaagaagatgcatgcctaatgtgttcttttttttttccaatgatttgtaatatacattttatgactggaaacttttttgtacaacactccaataaacattttgatttta

SEQ ID NO: 417838 - DNA, 4049 bp, Homo sapiens
tcactgtcctggtttggggctcagcttttcattattgttatcagacgctgatgcgtgtggacctggagaaccgctgccagagcctgcaggaggagctggacttccggaagagtgtgttcgaggaggaggtgcgggagacgcggcggcggcacgagcggcgcctggtggaggtggacagcagccggcagcaggagtacgacttcaagatggcacaggcgctggaggagctgcggagccagcacgacgagcaagtgcggctctacaagctggagctggagcagacctaccaggccaagctggacagcgccaagctgagctctgaccagaacgacaaggcggccagtgcggctcgcgaggagctgaaggaggcccgcatgcgcctggagtccctcagctaccagctctccggcctccagaagcaggccagtgccgctgaagatcgcattcgggagctggaggaggccatggccggggagcgggacaagttccggaagatgctggacgccaaggagcaggagatgacggagatgcgggacgtgatgcagcagcagctggccgagtaccaggagctgctggacgtgaagctggccctggacatggagatcaacgcctaccggaagctcctggagggcgaggaggagaggctgaagctgtcccccagcccatcctcgcgcgtcaccgtctcacgagccacctcgagcagcagcggcagcttgtccgccaccgggcgcctgggccgcagtaagcggaagcggctggaggtggaggagcccttgggcagcggcccaagcgtcctgggcacgggcacgggtggcagcggtggcttccacctggcccagcaggcctcggcctcgggtagcgtcagcatcgaggagatcgacctggagggcaagtttgtgcagctcaagaacaactcggacaaggatcagtctctggggaactggagaatcaagaggcaggtcttggagggggaggagatcgcctacaagttcacgcccaagtacatcctgcgcgccggccagatggtcacggtgtgggcagctggtgcgggggtggcccacagccccccctcgacgctggtgtggaagggccagagcagctggggcacgggcgagagcttccgcaccgtcctggttaacgcggatggcgaggaagtggccatgaggactgtgaagaagtcctcggtgatgcgtgagaatgagaatggggaggaagaggaggaggaagccgagtttggcgaggaggatcttttccaccaacagggggacccgaggaccacctcaagaggctgctacgtgatgtgaacccacactcctcatccacacacctttctttacccagagccactgaaaactatttttatatcattggctttctttagttcttgatacatttctagagaatttctaagcgaactgccagaacgtgtgggtgggtctcccccagccctccctcctggcgggtctcctccagcctcacttcgctgccacttcgccgctgccccggagacttttcaatcccaccccactcctcatctcaccatttggtcaaattggaagcccagggccaggacccggaggtttagaagatgcttgggcttggagggaggagggccggcgaggctagcgaggggacaggagacggccctgctgcggacggagcgcggaaactgcgtaggaattcagtggtggtgggtttttttaaggctttctacaaaaccaaattcagaatccaggcgtcgacctggtggggcccggggccaagcctgcattctggctgcccagcttcggacagcgggaactcctcaggcagccacgcagcgggtgtgggccagcatggggatggcgtggcccccagggcgggttttcactccgctgcctgggcttccagattcccgttctggcagcgcaccggccgggtttctcggaccgttgactttatttgggggagttttcccgcagttcagttcctgactgtgcaaggccaacagggcaggggaggggaagacctggggaaggaagaatgaggacagtcccgtcgtaagacctgtcacaacaataagcagggaggggagatgtggaggggacacatctggttgccttggaggcagaagctgtgagtttcagaacagctgtctgcagggaacgccaccatgttgaccctctggaggagagcgctgtggagcccctcccgtgttccagctccgtctgccctgtgcctatatatacacatgcgtctatccatactgtgcttttatctgtgattttctcgctgaaaccatgtttctcagacaggccaaggccacctgactcctatcacgacgcacccaagcccctcagtccagcttcccaatgcctggcaccccccttcggcaatagctcaccgtttacaccctccctcatagatacacagaagttatttttttaatggatatttatttttttacattggtcagtacacaggtcaggagctcacgccagggccttgaggacaggctgaccctcctccccggggtggcgtggggctggggcaccctccgacggcagagcctccttcagaaagtgcagctcaagtcttaaagacaccaaaactgagccatgggcacgcgccgtctccgggccatggcgttcactgcagggcgggggcggcaccgctcccctgtgactgcatcccgcctccctggggacctgcctgtggcaggaaggaatggggggccccagccccaggccgggaaggagccagcggccgacaaagcagaaacacccgctgctccacgtagcccctgctcgctgtccttgctctcagaagtcccggtcccatgtagatagaggggggcgcatcttaccaaagcatttcctcctggaggctacgccgctgtgctcccagtcaggcggctggtagggagctttgcctgccccggggataccctctgccagccgctggaagtgggaatgctggcgacagactgtgtcctctttcccaccttcatagcaggaatcacccggacccgactggctgggcttcgtgctagcgagggttctgggggtgggtcttggtgatcttgtcctatggggagtctgcagtggtctcagccacatcctatgtattttggctctggaggagcaaagctgtatcctggagttggtctgtgatttgccgacagccttgcaggctgggctcagggacaaagtcccccccaaaacccgcaggtcctcatgtccagacgctgcccagtcctgtcctgaaaacagcacgccccaggcccacagaaccccccaccctacatttgccttgggtggagctgggggtggtcctaggactgcgggtgcccttagctgaagggggtggggagaagcgtggactgggcagcctgtgggtaattggaggttcattgagaattgagtctttggaaacactaagaaaatcaaatttttaaaagttatttatggcctgggaaacaatttgcatttgtccccaaatacgcttagctgtgtgccgcttagaacgatgcgaaaccatccctctgtgtaagcccgtgccgtgtgactcgaagcctagcgccctccctgcgaagcatcagacgccacccagccctggggggaggcccacgcctgctggaccaacgcgggttctggggtgcacagcgccaggttaacgctgaagcctgccccgctgagcccaggagccgggaggcctgcgggctgacccagaatccgatcatgcacctgtcctcatgccagcggctttggctggggttggtctgaagcctgcacgcggcagttctttgttaaagatctgagggactcctcagtcctggggcgtcgccgcctgcagcctcttccaagccctgcgtccagcgagcgtcacagcacaacctgcaaaaacggagctgggctgcagctggggctggcatggactttcatttcagagattcggtttttaagaagatgcatgcctaatgtgttcttttttttttccaatgatttgtaatatacattttatgactggaaacttttttgtacaacactccaataaacattttgatttta

SEQ ID NO: 417839 - DNA, 3880 bp, Homo sapiens
catcttgcagccggcggcgcggattgaatgagcccgccgagcccgggccgccgtcgggagcagcgcaggccgcgagccgccgccaccatggccacgccgctgcccggccgcgcgggcgggcccgccacgccgctgtcgcccacgcgcctgtcgcggctgcaggagaaggaggagctgcgcgagctcaacgaccgcctggcgcactacatcgaccgcgtccgcgcgctggagctggagaacgaccggctcctgctcaagatctcagagaaggaggaggtgaccacgcgcgaggtgagtggcatcaaggcgctgtacgagtcggagctggccgatgcccggagagtcctggatgagacggctcgagagcgtgcccggctgcagatagagattgggaagctgagggcagagttggacgaggtcaacaagagcgccaagaagagggagggcgagcttacggtggcccagggccgtgtgaaggacctggagtccctgttccaccggagcgaggtggagctggcagctgccctcagcgacaagcgcggcctggagagtgacgtggctgagctgcgggcccagctggccaaggccgaggacggtcatgcagtggccaaaaagcagctggagaaggagacgctgatgcgtgtggacctggagaaccgctgccagagcctgcaggaggagctggacttccggaagagtgtgttcgaggaggaggtgcgggagacgcggcggcggcacgagcggcgcctggtggaggtggacagcagccggcagcaggagtacgacttcaagatggcacaggcgctggaggagctgcggagccagcacgacgagcaagtgcggctctacaagctggagctggagcagacctaccaggccaagctggacagcgccaagctgagctctgaccagaacgacaaggcggccagtgcggctcgcgaggagctgaaggaggcccgcatgcgcctggagtccctcagctaccagctctccggcctccagaagcaggccagtgccgctgaagatcgcattcgggagctggaggaggccatggccggggagcgggacaagttccggaagatgctggacgccaaggagcaggagatgacggagatgcgggacgtgatgcagcagcagctggccgagtaccaggagctgctggacgtgaagctggccctggacatggagatcaacgcctaccggaagctcctggagggcgaggaggagaggctgaagctgtcccccagcccatcctcgcgcgtcaccgtctcacgagccacctcgagcagcagcggcagcttgtccgccaccgggcgcctgggccgcagtaagcggaagcggctggaggtggaggagcccttgggcagcggcccaagcgtcctgggcacgggcacgggtggcagcggtggcttccacctggcccagcaggcctcggcctcgggtagcgtcagcatcgaggagatcgacctggagggcaagtttgtgcagctcaagaacaactcggacaaggatcagtctctggggaactggagaatcaagaggcaggtcttggagggggaggagatcgcctacaagttcacgcccaagtacatcctgcgcgccggccagatggtcacggtgtgggcagctggtgcgggggtggcccacagccccccctcgacgctggtgtggaagggccagagcagctggggcacgggcgagagcttccgcaccgtcctggttaacgcggatggcgagcgcaccggccgggtttctcggaccgttgactttatttgggggagttttcccgcagttcagttcctgactgtgcaaggccaacagggcaggggaggggaagacctggggaaggaagaatgaggacagtcccgtcgtaagacctgtcacaacaataagcagggaggggagatgtggaggggacacatctggttgccttggaggcagaagctgtgagtttcagaacagctgtctgcagggaacgccaccatgttgaccctctggaggagagcgctgtggagcccctcccgtgttccagctccgtctgccctgtgcctatatatacacatgcgtctatccatactgtgcttttatctgtgattttctcgctgaaaccatgtttctcagacaggccaaggccacctgactcctatcacgacgcacccaagcccctcagtccagcttcccaatgcctggcaccccccttcggcaatagctcaccgtttacaccctccctcatagatacacagaagttatttttttaatggatatttatttttttacattggtcagtacacaggtcaggagctcacgccagggccttgaggacaggctgaccctcctccccggggtggcgtggggctggggcaccctccgacggcagagcctccttcagaaagtgcagctcaagtcttaaagacaccaaaactgagccatgggcacgcgccgtctccgggccatggcgttcactgcagggcgggggcggcaccgctcccctgtgactgcatcccgcctccctggggacctgcctgtggcaggaaggaatggggggccccagccccaggccgggaaggagccagcggccgacaaagcagaaacacccgctgctccacgtagcccctgctcgctgtccttgctctcagaagtcccggtcccatgtagatagaggggggcgcatcttaccaaagcatttcctcctggaggctacgccgctgtgctcccagtcaggcggctggtagggagctttgcctgccccggggataccctctgccagccgctggaagtgggaatgctggcgacagactgtgtcctctttcccaccttcatagcaggaatcacccggacccgactggctgggcttcgtgctagcgagggttctgggggtgggtcttggtgatcttgtcctatggggagtctgcagtggtctcagccacatcctatgtattttggctctggaggagcaaagctgtatcctggagttggtctgtgatttgccgacagccttgcaggctgggctcagggacaaagtcccccccaaaacccgcaggtcctcatgtccagacgctgcccagtcctgtcctgaaaacagcacgccccaggcccacagaaccccccaccctacatttgccttgggtggagctgggggtggtcctaggactgcgggtgcccttagctgaagggggtggggagaagcgtggactgggcagcctgtgggtaattggaggttcattgagaattgagtctttggaaacactaagaaaatcaaatttttaaaagttatttatggcctgggaaacaatttgcatttgtccccaaatacgcttagctgtgtgccgcttagaacgatgcgaaaccatccctctgtgtaagcccgtgccgtgtgactcgaagcctagcgccctccctgcgaagcatcagacgccacccagccctggggggaggcccacgcctgctggaccaacgcgggttctggggtgcacagcgccaggttaacgctgaagcctgccccgctgagcccaggagccgggaggcctgcgggctgacccagaatccgatcatgcacctgtcctcatgccagcggctttggctggggttggtctgaagcctgcacgcggcagttctttgttaaagatctgagggactcctcagtcctggggcgtcgccgcctgcagcctcttccaagccctgcgtccagcgagcgtcacagcacaacctgcaaaaacggagctgggctgcagctggggctggcatggactttcatttcagagattcggtttttaagaagatgcatgcctaatgtgttcttttttttttccaatgatttgtaatatacattttatgactggaaacttttttgtacaacactccaataaacattttgatttta

SEQ ID NO: 417840 - DNA, 4150 bp, Homo sapiens
catcttgcagccggcggcgcggattgaatgagcccgccgagcccgggccgccgtcgggagcagcgcaggccgcgagccgccgccaccatggccacgccgctgcccggccgcgcgggcgggcccgccacgccgctgtcgcccacgcgcctgtcgcggctgcaggagaaggaggagctgcgcgagctcaacgaccgcctggcgcactacatcgaccgcgtccgcgcgctggagctggagaacgaccggctcctgctcaagatctcagagaaggaggaggtgaccacgcgcgaggtgagtggcatcaaggcgctgtacgagtcggagctggccgatgcccggagagtcctggatgagacggctcgagagcgtgcccggctgcagatagagattgggaagctgagggcagagttggacgaggtcaacaagagcgccaagaagagggagggcgagcttacggtggcccagggccgtgtgaaggacctggagtccctgttccaccggagcgaggtggagctggcagctgccctcagcgacaagcgcggcctggagagtgacgtggctgagctgcgggcccagctggccaaggccgaggacggtcatgcagtggccaaaaagcagctggagaaggagacgctgatgcgtgtggacctggagaaccgctgccagagcctgcaggaggagctggacttccggaagagtgtgttcgaggaggaggtgcgggagacgcggcggcggcacgagcggcgcctggtggaggtggacagcagccggcagcaggagtacgacttcaagatggcacaggcgctggaggagctgcggagccagcacgacgagcaagtgcggctctacaagctggagctggagcagacctaccaggccaagctggacagcgccaagctgagctctgaccagaacgacaaggcggccagtgcggctcgcgaggagctgaaggaggcccgcatgcgcctggagtccctcagctaccagctctccggcctccagaagcaggccagtgccgctgaagatcgcattcgggagctggaggaggccatggccggggagcgggacaagttccggaagatgctggacgccaaggagcaggagatgacggagatgcgggacgtgatgcagcagcagctggccgagtaccaggagctgctggacgtgaagctggccctggacatggagatcaacgcctaccggaagctcctggagggcgaggaggagaggctgaagctgtcccccagcccatcctcgcgcgtcaccgtctcacgagccacctcgagcagcagcggcagcttgtccgccaccgggcgcctgggccgcagtaagcggaagcggctggaggtggaggagcccttgggcagcggcccaagcgtcctgggcacgggcacgggtggcagcggtggcttccacctggcccagcaggcctcggcctcgggtagcgtcagcatcgaggagatcgacctggagggcaagtttgtgcagctcaagaacaactcggacaaggatcagtctctggggaactggagaatcaagaggcaggtcttggagggggaggagatcgcctacaagttcacgcccaagtacatcctgcgcgccggccagatggtcacggtgtgggcagctggtgcgggggtggcccacagccccccctcgacgctggtgtggaagggccagagcagctggggcacgggcgagagcttccgcaccgtcctggttaacgcggatggcgaggaagtggccatgaggactgtgaagaagtcctcggtgatgcgtgagaatgagaatggggaggaagaggaggaggaagccgagtttggcgaggaggatcttttccaccaacagggggacccgaggaccacctcaagaggctgctacgtgatgtgaacccacactcctcatccacacacctttctttacccagagccactgaaaactatttttatatcattggctttctttagttcttgatacatttctagagaatttctaagcgaactgccagaacgtgtgggtgggtctcccccagccctccctcctggcgggtctcctccagcctcacttcgctgccacttcgccgctgccccggagacttttcaatcccaccccactcctcatctcaccatttggtcaaattggaagcccagggccaggacccggaggtttagaagatgcttgggcttggagggaggagggccggcgaggctagcgaggggacaggagacggccctgctgcggacggagcgcggaaactgcgtaggaattcagtggtggtgggtttttttaaggctttctacaaaaccaaattcagaatccaggcgtcgacctggtggggcccggggccaagcctgcattctggctgcccagcttcggacagcgggaactcctcaggcagccacgcagcgggtgtgggccagcatggggatggcgtggcccccagggcgggttttcactccgctgcctgggcttccagattcccgttctggcagcgcaccggccgggtttctcggaccgttgactttatttgggggagttttcccgcagttcagttcctgacttgtgcttttatctgtgattttctcgctgaaaccatgtttctcagacaggccaaggccacctgactcctatcacgacgcacccaagcccctcagtccagcttcccaatgcctggcaccccccttcggcaatagctcaccgtttacaccctccctcatagatacacagaagttatttttttaatggatatttatttttttacattggtcagtacacaggtcaggagctcacgccagggccttgaggacaggctgaccctcctccccaggccgggaaggagccagcggccgacaaagcagaaacacccgctgctccacgtagcccctgctcgctgtccttgctctcagaagtcccggtcccatgtagatagaggggggcgcatcttaccaaagcatttcctcctggaggctacgccgctgtgctcccagtcaggcggctggtagggagctttgcctgccccggggataccctctgccagccgctggaagtgggaatgctggcgacagactgtgtcctctttcccaccttcatagcaggaatcacccggacccgactggctgggcttcgtgctagcgagggttctgggggtgggtcttggtgatcttgtcctatggggagtctgcagtggtctcagccacatcctatgtattttggctctggaggagcaaagctgtatcctggagttggtctgtgatttgccgacagccttgcaggctgggctcagggacaaagtcccccccaaaacccgcaggtcctcatgtccagacgctgcccagtcctgtcctgaaaacagcacgccccaggcccacagaaccccccaccctacatttgccttgggtggagctgggggtggtcctaggactgcgggtgcccttagctgaagggggtggggagaagcgtggactgggcagcctgtgggtaattggaggttcattgagaattgagtctttggaaacactaagaaaatcaaatttttaaaagttatttatggcctgggaaacaatttgcatttgtccccaaatacgcttagctgtgtgccgcttagaacgatgcgaaaccatccctctgtgtaagcccgtgccgtgtgactcgaagcctagcgccctccctgcgaagcatcagacgccacccagccctggggggaggcccacgcctgctggaccaacgcgggttctggggtgcacagcgccaggttaacgctgaagcctgccccgctgagcccaggagccgggaggcctgcgggctgacccagaatccgatcatgcacctgtcctcatgccagcggctttggctggggttggtctgaagcctgcacgcggcagttctttgttaaagatctgagggactcctcagtcctggggcgtcgccgcctgcagcctcttccaagccctgcgtccagcgagcgtcacagcacaacctgcaaaaacggagctgggctgcagctggggctggcatggactttcatttcagagattcggtttttaagaagatgcatgcctaatgtgttcttttttttttccaatgatttgtaatatacattttatgactggaaacttttttgtacaacactccaataaacattttgatttta

SEQ ID NO: 417841 - DNA, 4484 bp, Homo sapiens
catcttgcagccggcggcgcggattgaatgagcccgccgagcccgggccgccgtcgggagcagcgcaggccgcgagccgccgccaccatggccacgccgctgcccggccgcgcgggcgggcccgccacgccgctgtcgcccacgcgcctgtcgcggctgcaggagaaggaggagctgcgcgagctcaacgaccgcctggcgcactacatcgaccgcgtccgcgcgctggagctggagaacgaccggctcctgctcaagatctcagagaaggaggaggtgaccacgcgcgaggtgagtggcatcaaggcgctgtacgagtcggagctggccgatgcccggagagtcctggatgagacggctcgagagcgtgcccggctgcagatagagattgggaagctgagggcagagttggacgaggtcaacaagagcgccaagaagagggagggcgagcttacggtggcccagggccgtgtgaaggacctggagtccctgttccaccggagcgaggtggagctggcagctgccctcagcgacaagcgcggcctggagagtgacgtggctgagctgcgggcccagctggccaaggccgaggacggtcatgcagtggccaaaaagcagctggagaaggagacgctgatgcgtgtggacctggagaaccgctgccagagcctgcaggaggagctggacttccggaagagtgtgttcgaggaggaggtgcgggagacgcggcggcggcacgagcggcgcctggtggaggtggacagcagccggcagcaggagtacgacttcaagatggcacaggcgctggaggagctgcggagccagcacgacgagcaagtgcggctctacaagctggagctggagcagacctaccaggccaagctggacagcgccaagctgagctctgaccagaacgacaaggcggccagtgcggctcgcgaggagctgaaggaggcccgcatgcgcctggagtccctcagctaccagctctccggcctccagaagcaggccagtgccgctgaagatcgcattcgggagctggaggaggccatggccggggagcgggacaagttccggaagatgctggacgccaaggagcaggagatgacggagatgcgggacgtgatgcagcagcagctggccgagtaccaggagctgctggacgtgaagctggccctggacatggagatcaacgcctaccggaagctcctggagggcgaggaggagaggctgaagctgtcccccagcccatcctcgcgcgtcaccgtctcacgagccacctcgagcagcagcggcagcttgtccgccaccgggcgcctgggccgcagtaagcggaagcggctggaggtggaggagcccttgggcagcggcccaagcgtcctgggcacgggcacgggtggcagcggtggcttccacctggcccagcaggcctcggcctcgggtagcgtcagcatcgaggagatcgacctggagggcaagtttgtgcagctcaagaacaactcggacaaggatcagtctctggggaactggagaatcaagaggcaggtcttggagggggaggagatcgcctacaagttcacgcccaagtacatcctgcgcgccggccagatggtcacggtgtgggcagctggtgcgggggtggcccacagccccccctcgacgctggtgtggaagggccagagcagctggggcacgggcgagagcttccgcaccgtcctggttaacgcggatggcgaggaagtggccatgaggactgtgaagaagtcctcggtgatgcgtgagaatgagaatggggaggaagaggaggaggaagccgagtttggcgaggaggatcttttccaccaacagggggacccgaggaccacctcaagaggctgctacgtgatgtgaacccacactcctcatccacacacctttctttacccagagccactgaaaactatttttatatcattggctttctttagttcttgatacatttctagagaatttctaagcgaactgccagaacgtgtgggtgggtctcccccagccctccctcctggcgggtctcctccagcctcacttcgctgccacttcgccgctgccccggagacttttcaatcccaccccactcctcatctcaccatttggtcaaattggaagcccagggccaggacccggaggtttagaagatgcttgggcttggagggaggagggccggcgaggctagcgaggggacaggagacggccctgctgcggacggagcgcggaaactgcgtaggaattcagtggtggtgggtttttttaaggctttctacaaaaccaaattcagaatccaggcgtcgacctggtggggcccggggccaagcctgcattctggctgcccagcttcggacagcgggaactcctcaggcagccacgcagcgggtgtgggccagcatggggatggcgtggcccccagggcgggttttcactccgctgcctgggcttccagattcccgttctggcagcgcaccggccgggtttctcggaccgttgactttatttgggggagttttcccgcagttcagttcctgactgtgcaaggccaacagggcaggggaggggaagacctggggaaggaagaatgaggacagtcccgtcgtaagacctgtcacaacaataagcagggaggggagatgtggaggggacacatctggttgccttggaggcagaagctgtgagtttcagaacagctgtctgcagggaacgccaccatgttgaccctctggaggagagcgctgtggagcccctcccgtgttccagctccgtctgccctgtgcctatatatacacatgcgtctatccatactgtgcttttatctgtgattttctcgctgaaaccatgtttctcagacaggccaaggccacctgactcctatcacgacgcacccaagcccctcagtccagcttcccaatgcctggcaccccccttcggcaatagctcaccgtttacaccctccctcatagatacacagaagttatttttttaatggatatttatttttttacattggtcagtacacaggtcaggagctcacgccagggccttgaggacaggctgaccctcctccccggggtggcgtggggctggggcaccctccgacggcagagcctccttcagaaagtgcagctcaagtcttaaagacaccaaaactgagccatgggcacgcgccgtctccgggccatggcgttcactgcagggcgggggcggcaccgctcccctgtgactgcatcccgcctccctggggacctgcctgtggcaggaaggaatggggggccccagccccaggccgggaaggagccagcggccgacaaagcagaaacacccgctgctccacgtagcccctgctcgctgtccttgctctcagaagtcccggtcccatgtagatagaggggggcgcatcttaccaaagcatttcctcctggaggctacgccgctgtgctcccagtcaggcggctggtagggagctttgcctgccccggggataccctctgccagccgctggaagtgggaatgctggcgacagactgtgtcctctttcccaccttcatagcaggaatcacccggacccgactggctgggcttcgtgctagcgagggttctgggggtgggtcttggtgatcttgtcctatggggagtctgcagtggtctcagccacatcctatgtattttggctctggaggagcaaagctgtatcctggagttggtctgtgatttgccgacagccttgcaggctgggctcagggacaaagtcccccccaaaacccgcaggtcctcatgtccagacgctgcccagtcctgtcctgaaaacagcacgccccaggcccacagaaccccccaccctacatttgccttgggtggagctgggggtggtcctaggactgcgggtgcccttagctgaagggggtggggagaagcgtggactgggcagcctgtgggtaattggaggttcattgagaattgagtctttggaaacactaagaaaatcaaatttttaaaagttatttatggcctgggaaacaatttgcatttgtccccaaatacgcttagctgtgtgccgcttagaacgatgcgaaaccatccctctgtgtaagcccgtgccgtgtgactcgaagcctagcgccctccctgcgaagcatcagacgccacccagccctggggggaggcccacgcctgctggaccaacgcgggttctggggtgcacagcgccaggttaacgctgaagctgccgtgagccatgagcggaaggctgggtgaccagatcgatctgactgtctcttgcaaggtggtgggtgttgagctgacgcggagtctgtaagacgggatcccactgggtcgtgacttcagctggtcgagttcgacctcggaagggggggggggttcaacgtaaaaccttttcctattatggctcctttaaaaagggaggggcgcctctaccatttcctttcttcctctttggg

SEQ ID NO: 417842 - DNA, 1887 bp, Homo sapiens
gcctggtggcgaattcggcacgaggatgagcccgccgagcccgggccgccgtcgggagcagcgcaggccgcgagccgccgccaccatggccacgccgctgcccggccgcgcgggcgggcccgccacgccgctgtcgcccacgcgcctgtcgcggctgcaggagaaggaggagctgcgcgagctcaacgaccgcctggcgcactacatcgaccgcgtccgcgcgctggagctggagaacgaccggctcctgctcaagatctcagagaaggaggaggtgaccacgcgcgaggtgagtggcatcaaggcgctgtacgagtcggagctggccgatgcccggagagtcctggatgagacggctcgagagcgtgcccggctgcagatagagattgggaagctgagggcagagttggacgaggtcaacaagagcgccaagaagagggagggcgagcttacggtggcccagggccgtgtgaaggacctggagtccctgttccaccggagcgaggtggagctggcagctgccctcagcgacaagcgcggcctggagagtgacgtggctgagctgcgggcccagctggccaaggccgaggacggtcatgcagtggccaaaaagcagctggagaagggctgtccttgctctcagaagtcccggtcccatgtagatagaggggggcgcatcttaccaaagcatttcctcctggaggctacgccgctgtgctcccagtcaggcggctggtagggagctttgcctgccccggggataccctctgccagccgctggaagtgggaatgctggcgacagactgtgtcctctttcccaccttcatagcaggaatcacccggacccgactggctgggcttcgtgctagcgagggttctgggggtgggtcttggtgatcttgtcctatggggagtctgcagtggtctcagccacatcctatgtattttggctctggaggagcaaagctgtatcctggagttggtctgtgatttgccgacagccttgcaggctgggctcagggacaaagtcccccccaaaacccgcaggtcctcatgtccagacgctgcccagtcctgtcctgaaaacagcacgccccaggcccacagaaccccccaccctacatttgccttgggtggagctgggggtggtcctaggactgcgggtgcccttagctgaagggggtggggagaagcgtggactgggcagcctgtgggtaattggaggttcattgagaattgagtctttggaaacactaagaaaatcaaatttttaaaagttatttatggcctgggaaacaatttgcatttgtccccaaatacgcttagctgtgtgccgcttagaacgatgcgaaaccatccctctgtgtaagcccgtgccgtgtgactcgaagcctagcgccctccctgcgaagcatcagacgccacccagccctggggggaggcccacgcctgctggaccaacgcgggttctggggtgcacagcgccaggttaacgctgaagcctgccccgctgagcccaggagccgggaggcctgcgggctgacccagaatccgatcatgcacctgtcctcatgccagcggctttggctggggttggtctgaagcctgcacgcggcagttctttgttaaagatctgagggactcctcagtcctggggcgtcgccgcctgcagcctcttccaagccctgcgtccagcgagcgtcacagcacaacctgcaaaaacggagctgggctgcagctggggctggcatggactttcatttcagagattcggtttttaagaagatgcatgcctaatgtgttcttttttttttccaatgatttgtaatatacattttatgactggaaacttttttgtacaacactccaataaacattttgatttta

SEQ ID NO: 417843 - DNA, 4041 bp, Homo sapiens
catcttgcagccggcggcgcggattgaatgagcccgccgagcccgggccgccgtcgggagcagcgcaggccgcgagccgccgccaccatggccacgccgctgcccggccgcgcgggcgggcccgccacgccgctgtcgcccacgcgcctgtcgcggctgcaggagaaggaggagctgcgcgagctcaacgaccgcctggcgcactacatcgaccgcgtccgcgcgctggagctggagaacgaccggctcctgctcaagatctcagagaaggaggaggtgaccacgcgcgaggtgagtggcatcaaggcgctgtacgagtcggagctggccgatgcccggagagtcctggatgagacggctcgagagcgtgcccggctgcagatagagattgggaagctgagggcagagttggacgaggtcaacaagagcgccaagaagagggagggcgagcttacggtggcccagggccgtgtgaaggacctggagtccctgttccaccggagcgaggtggagctggcagctgccctcagcgacaagcgcggcctggagagtgacgtggctgagctgcgggcccagctggccaaggccgaggacggtcatgcagtggccaaaaagcagctggagaaggagacgctgatgcgtgtggacctggagaaccgctgccagagcctgcaggaggagctggacttccggaagagtgtgttcgaggaggaggtgcgggagacgcggcggcggcacgagcggcgcctggtggaggtggacagcagccggcagcaggagtacgacttcaagatggcacaggcgctggaggagctgcggagccagcacgacgagcaagtgcggctctacaagctggagctggagcagacctaccaggccaagctggacagcgccaagctgagctctgaccagaacgacaaggcggccagtgcggctcgcgaggagctgaaggaggcccgcatgcgcctggagtccctcagctaccagctctccggcctccagaagcaggccagtgccgctgaagatcgcattcgggagctggaggaggccatggccggggagcgggacaagttccggaagatgctggacgccaaggagcaggagatgacggagatgcgggacgtgatgcagcagcagctggccgagtaccaggagctgctggacgtgaagctggccctggacatggagatcaacgcctaccggaagctcctggagggcgaggaggagaggctgaagctgtcccccagcccatcctcgcgcgtcaccgtctcacgagccacctcgagcagcagcggcagcttgtccgccaccgggcgcctgggccgcagtaagcggaagcggctggaggtggaggagcccttgggcagcggcccaagcgtcctgggcacgggcacgggtggcagcggtggcttccacctggcccagcaggcctcggcctcgggtagcgtcagcatcgaggagatcgacctggagggcaagtttgtgcagctcaagaacaactcggacaaggatcagtctctggggaactggagaatcaagaggcaggtcttggagggggaggagatcgcctacaagttcacgcccaagtacatcctgcgcgccggccagatggtcacggtgtgggcagctggtgcgggggtggcccacagccccccctcgacgctggtgtggaagggccagagcagctggggcacgggcgagagcttccgcaccgtcctggttaacgcggatggcgaggaagtggccatgaggactgtgaagaagtcctcggtgatgcgtgagaatgagaatggggaggaagaggaggaggaagccgagtttggcgaggaggatcttttccaccaacagggggacccgaggaccacctcaagaggctgctacgtgatgtgaacccacactcctcatccacacacctttctttacccagagccactgaaaactatttttatatcattggctttctttagttcttgatacatttctagagaatttctaagcgaactgccagaacgtgtgggtgggtctcccccagccctccctcctggcgggtctcctccagcctcacttcgctgccacttcgccgctgccccggagacttttcaatcccaccccactcctcatctcaccatttggtcaaattggaagcccagggccaggacccggaggtttagaagatgcttgggcttggagggaggagggccggcgaggctagcgaggggacaggagacggccctgctgcggacggagcgcggaaactgcgtaggaattcagtggtggtgggtttttttaaggctttctacaaaaccaaattcagaatccaggcgtcgacctggtggggcccggggccaagcctgcattctggctgcccagcttcggacagcgggaactcctcaggcagccacgcagcgggtgtgggccagcatggggatggcgtggcccccagggcgggttttcactccgctgcctgggcttccagattcccgttctggcagcgcaccggccgggtttctcggaccgttgactttatttgggggagttttcccgcagttcagttcctgactgtgcaaggccaacagggcaggggaggggaagacctggggaaggaagaatgaggacagtcccgtcgtaagacctgtcacaacaataagcagggaggggagatgtggaggggacacatctggttgccttggaggcagaagctgtgagtttcagaacagctgtctgcagggaacgccaccatgttgaccctctggaggagagcgctgtggagcccctcccgtgttccagctccgtctgccctgtgcctatatatacacatgcgtctatccatactgtgcttttatctgtgattttctcgctgaaaccatgtttctcagacaggccaaggccacctgactcctatcacgacgcacccaagcccctcagtccagcttcccaatgcctggcaccccccttcggcaatagctcaccgtttacaccctccctcatagatacacagaagttatttttttaatggatatttatttttttacattggtcagtacacaggtcaggagctcacgccagggccttgaggacaggctgaccctcctccccggggtggcgtggggctggggcaccctccgacggcagagcctccttcagaaagtgcagctcaagtcttaaagacaccaaaactgagccatgggcacgcgccgtctccgggccatggcgttcactgcagggcgggggcggcaccgctcccctgtgactgcatcccgcctccctggggacctgcctgtggcaggaaggaatggggggccccagccccaggccgggaaggagccagcggccgacaaagcagaaacacccgctgctccacgtagcccctgctcgctgtccttgctctcagaagtcccggtcccatgtagatagaggggggcgcatcttaccaaagcatttcctcctggaggctacgccgctgtgctcccagtcaggcggctggtagggagctttgcctgccccggggataccctctgccagccgctggaagtgggaatgctggcgacagactgtgtcctctttcccaccttcatagcaggaatcacccggacccgactggctgggcttcgtgctagcgagggttctgggggtgggtcttggtgatcttgtcctatggggagtctgcagtggtctcagccacatcctatgtattttggctctggaggagcaaagctgtatcctggagttggtctgtgatttgccgacagccttgcaggctgggctcagggacaaagtcccccccaaaacccgcaggtcctcattcctggggcgtcgccgcctgcagcctcttccaagccctgcgtccagcgagcgtcacagcacaacctgcaaaaacggagctgggctgcagctggggctggcatggactttcatttcagagattcggtttttaagaagatgcatgcctaatgtgttcttttttttttccaatgatttgtaatatacattttatgactggaaacttttttgtacaacactccaataaacattttgatttta

SEQ ID NO: 417844 - DNA, 2590 bp, Homo sapiens
catcttgcagccggcggcgcggattgaatgagcccgccgagcccgggccgccgtcgggagcagcgcaggccgcgagccgccgccaccatggccacgccgctgcccggccgcgcgggcgggcccgccacgccgctgtcgcccacgcgcctgtcgcggctgcaggagaaggaggagctgcgcgagctcaacgaccgcctggcgcactacatcgaccgcgtccgcgcgctggagctggagaacgaccggctcctgctcaagatctcagagaaggaggaggtgaccacgcgcgaggtgagtggcatcaaggcgctgtacgagtcggagctggccgatgcccggagagtcctggatgagacggctcgagagcgtgcccggctgcagatagagattgggaagctgagggcagagttggacgaggtcaacaagagcgccaagaagagggagggcgagcttacggtggcccagggccgtgtgaaggacctggagtccctgttccaccggagcgaggtggagctggcagctgccctcagcgacaagcgcggcctggagagtgacgtggctgagctgcgggcccagctggccaaggccgaggacggtcatgcagtggccaaaaagcagctggagaaggagacgctgatgcgtgtggacctggagaaccgctgccagagcctgcaggaggagctggacttccggaagagtgtgttcgaggaggaggtgcgggagacgcggcggcggcacgagcggcgcctggtggaggtggacagcagccggcagcaggagtacgacttcaagatggcacaggcgctggaggagctgcggagccagcacgacgagcaagtgcggctctacaagctggagctggagcagacctaccaggccaagctggacagcgccaagctgagctctgaccagaacgacaaggcggccagtgcggctcgcgaggagctgaaggaggcccgcatgcgcctggagtccctcagctaccagctctccggcctccagaagcaggccagtgccgctgaagatcgcattcgggagctggaggaggccatggccggggagcgggacaagttccggaagatgctggacgccaaggagcaggagatgacggagatgcgggacgtgatgcagcagcagctggccgagtaccaggagctgctggacgtgaagctggccctggacatggagatcaacgcctaccggaagctcctggagggcgaggaggagaggctgaagctgtcccccagcccatcctcgcgcgtcaccgtctcacgagccacctcgagcagcagcggcagcttgtccgccaccgggcgcctgggccgcagtaagcggaagcggctggaggtggaggagcccttgggcagcggcccaagcgtcctgggcacgggcacgggtggcagcggtggcttccacctggcccagcaggcctcggcctcgggtagcgtcagcatcgaggagatcgacctggagggcaagtttgtgcagctcaagaacaactcggacaaggatcagtctctggggaactggagaatcaagaggcaggtcttggagggggaggagatcgcctacaagttcacgcccaagtacatcctgcgcgccggccagatggtcacggtgtgggcagctggtgcgggggtggcccacagccccccctcgacgctggtgtggaagggccagagcagctggggcacgggcgagagcttccgcaccgtcctggttaacgcggatggcgaggaagtggccatgaggactgtgaagaagtcctcggtgatgcgtgagaatgagaatggggaggaagaggaggaggaagccgagtttggcgaggaggatcttttccaccaacagggggacccgaggaccacctcaagaggctgctacgtgatgtgaacccacactcctcatccacacacctttctttacccagagccactgaaaactatttttatatcattggctttctttagttcttgatacatttctagagaatttctaagcgaactgccagaacgtgtgggtgggtctcccccagccctccctcctggcgggtctcctccagcctcacttcgctgccacttcgccgctgccccggagacttttcaatcccaccccactcctcatctcaccatttggtcaaattggaagcccacgcctgctggaccaacgcgggttctggggtgcacagcgccaggttaacgctgaagcctgccccgctgagcccaggagccgggaggcctgcgggctgacccagaatccgatcatgcacctgtcctcatgccagcggctttggctggggttggtctgaagcctgcacgcggcagttctttgttaaagatctgagggactcctcagtcctggggcgtcgccgcctgcagcctcttccaagccctgcgtccagcgagcgtcacagcacaacctgcaaaaacggagctgggctgcagctggggctggcatggactttcatttcagagattcggtttttaagaagatgcatgcctaatgtgttcttttttttttccaatgatttgtaatatacattttatgactggaaacttttttgtacaacactccaataaacattttgatttta

SEQ ID NO: 417845 - DNA, 2436 bp, Homo sapiens
catcttgcagccggcggcgcggattgaatgagcccgccgagcccgggccgccgtcgggagcagcgcaggccgcgagccgccgccaccatggccacgccgctgcccggccgcgcgggcgggcccgccacgccgctgtcgcccacgcgcctgtcgcggctgcaggagaaggaggagctgcgcgagctcaacgaccgcctggcgcactacatcgaccgcgtccgcgcgctggagctggagaacgaccggctcctgctcaagatctcagagaaggaggaggtgaccacgcgcgaggtgagtggcatcaaggcgctgtacgagtcggagctggccgatgcccggagagtcctggatgagacggctcgagagcgtgcccggctgcagatagagattgggaagctgagggcagagttggacgaggtcaacaagagcgccaagaagagggagggcgagcttacggtggcccagggccgtgtgaaggacctggagtccctgttccaccggagcgaggtggagctggcagctgccctcagcgacaagcgcggcctggagagtgacgtggctgagctgcgggcccagctggccaaggccgaggacggtcatgcagtggccaaaaagcagctggagaaggagacgctgatgcgtgtggacctggagaaccgctgccagagcctgcaggaggagctggacttccggaagagtgtgttcgaggaggaggtgcgggagacgcggcggcggcacgagcggcgcctggtggaggtggacagcagccggcagcaggagtacgacttcaagatggcacaggcgctggaggagctgcggagccagcacgacgagcaagtgcggctctacaagctggagctggagcagacctaccaggccaagctggacagcgccaagctgagctctgaccagaacgacaaggcggccagtgcggctcgcgaggagctgaaggaggcccgcatgcgcctggagtccctcagctaccagctctccggcctccagaagcaggccagtgccgctgaagatcgcattcgggagctggaggaggccatggccggggagcgggacaagttccggaagatgctggacgccaaggagcaggagatgacggagatgcgggacgtgatgcagcagcagctggccgagtaccaggagctgctggacgtgaagctggccctggacatggagatcaacgcctaccggaagctcctggagggcgaggaggagaggctgaagctgtcccccagcccatcctcgcgcgtcaccgtctcacgagccacctcgagcagcagcggcagcttgtccgccaccgggcgcctgggccgcagtaagcggaagcggctggaggtggaggagcccttgggcagcggcccaagcgtcctgggcacgggcacgggtggcagcggtggcttccacctggcccagcaggcctcggcctcgggtagcgtcagcatcgaggagatcgacctggagggcaagtttgtgcagctcaagaacaactcggacaaggatcagtctctggggaactggagaatcaagaggcaggtcttggagggggaggagatcgcctacaagttcacgcccaagtacatcctgcgcgccggccagatggtcacggtgtgggcagctggtgcgggggtggcccacagccccccctcgacgctggtgtggaagggccagagcagctggggcacgggcgagagcttccgcaccgtcctggttaacgcggatggcgaggaagtggccatgaggactgtgaagaagtcctcggtgatgcgtgagaatgagaatggggaggaagaggaggaggaagccgagtttggcgaggaggatcttttccaccaacagggggacccgaggaccacctcaagaggctgctacgtgatgtgaacccacactcctcatccacacacctttctttacccagagccactgaaaactatttttatatcattggctttctttagttcttgatacatttctagagaatttctaagcgaactgccagaacgtgtgggtgggtctcccccagccctccctcctggcgggtctcctccagcctcacttcgctgccacttcgccgctgccccggagacttttcaatcccaccccactcctcatctcaccatttggtcaaattggaagcccagggccaggacccggaggtttagaagatgcttgggcttggagggaggaggtcctggggcgtcgccgcctgcagcctcttccaagccctgcgtccagcgagcgtcacagcacaacctgcaaaaacggagctgggctgcagctggggctggcatggactttcatttcagagattcggtttttaagaagatgcatgcctaatgtgttcttttttttttccaatgatttgtaatatacattttatgactggaaacttttttgtacaacactccaataaacattttgatttta

SEQ ID NO: 417846 - DNA, 2235 bp, Homo sapiens
catcttgcagccggcggcgcggattgaatgagcccgccgagcccgggccgccgtcgggagcagcgcaggccgcgagccgccgccaccatggccacgccgctgcccggccgcgcgggcgggcccgccacgccgctgtcgcccacgcgcctgtcgcggctgcaggagaaggaggagctgcgcgagctcaacgaccgcctggcgcactacatcgaccgcgtccgcgcgctggagctggagaacgaccggctcctgctcaagatctcagagaaggaggaggtgaccacgcgcgaggtgagtggcatcaaggcgctgtacgagtcggagctggccgatgcccggagagtcctggatgagacggctcgagagcgtgcccggctgcagatagagattgggaagctgagggcagagttggacgaggtcaacaagagcgccaagaagagggagggcgagcttacggtggcccagggccgtgtgaaggacctggagtccctgttccaccggagcgaggtggagctggcagctgccctcagcgacaagcgcggcctggagagtgacgtggctgagctgcgggcccagctggccaaggccgaggacggtcatgcagtggccaaaaagcagctggagaaggagacgctgatgcgtgtggacctggagaaccgctgccagagcctgcaggaggagctggacttccggaagagtgtgttcgaggaggaggtgcgggagacgcggcggcggcacgagcggcgcctggtggaggtggacagcagccggcagcaggagtacgacttcaagatggcacaggcgctggaggagctgcggagccagcacgacgagcaagtgcggctctacaagctggagctggagcagacctaccaggccaagctggacagcgccaagctgagctctgaccagaacgacaaggcggccagtgcggctcgcgaggagctgaaggaggcccgcatgcgcctggagtccctcagctaccagctctccggcctccagaagcaggccagtgccgctgaagatcgcattcgggagctggaggaggccatggccggggagcgggacaagttccggaagatgctggacgccaaggagcaggagatgacggagatgcgggacgtgatgcagcagcagctggccgagtaccaggagctgctggacgtgaagctggccctggacatggagatcaacgcctaccggaagctcctggagggcgaggaggagaggctgaagctgtcccccagcccatcctcgcgcgtcaccgtctcacgagccacctcgagcagcagcggcagcttgtccgccaccgggcgcctgggccgcagtaagcggaagcggctggaggtggaggagcccttgggcagcggcccaagcgtcctgggcacgggcacgggtggcagcggtggcttccacctggcccagcaggcctcggcctcgggtagcgtcagcatcgaggagatcgacctggagggcaagtttgtgcagctcaagaacaactcggacaaggatcagtctctggggaactggagaatcaagaggcaggtcttggagggggaggagatcgcctacaagttcacgcccaagtacatcctgcgcgccggccagatggtcacggtgtgggcagctggtgcgggggtggcccacagccccccctcgacgctggtgtggaagggccagagcagctggggcacgggcgagagcttccgcaccgtcctggttaacgcggatggcgaggaagtggccatgaggactgtgaagaagtcctcggtgatgcgtgagaatgagaatggggaggaagaggaggaggaagccgagtttggcgaggaggatcttttccaccaacagggggacccgaggaccacctcaagaggctgctacgtgatgtgaacccacactcctcatccacacacctttctttacccagagccactgaaaactatttttatatcattggctttctttattctttgttaaagatctgagggactcctcagtcctggggcgtcgccgcctgcagcctcttccaagccctgcgtccagcgagcgtcacagcacaacctgcaaaaacggagctgggctgcagctggggctggcatggactttcatttcagagattcggtttttaagaagatgcatgcctaatgtgttcttttttttttccaatgatttgtaatatacattttatgactggaaacttttttgtacaacactccaataaacattttgatttta

SEQ ID NO: 417847 - DNA, 1880 bp, Homo sapiens
catcttgcagccggcggcgcggattgaatgagcccgccgagcccgggccgccgtcgggagcagcgcaggccgcgagccgccgccaccatggccacgccgctgcccggccgcgcgggcgggcccgccacgccgctgtcgcccacgcgcctgtcgcggctgcaggagaaggaggagctgcgcgagctcaacgaccgcctggcgcactacatcgaccgcgtccgcgcgctggagctggagaacgaccggctcctgctcaagatctcagagaaggaggaggtgaccacgcgcgaggtgagtggcatcaaggcgctgtacgagtcggagctggccgatgcccggagagtcctggatgagacggctcgagagcgtgcccggctgcagatagagattgggaagctgagggcagagttggacgaggtcaacaagagcgccaagaagagggagggcgagcttacggtggcccagggccgtgtgaaggacctggagtccctgttccaccggagcgaggtggagctggcagctgccctcagcgacaagcgcggcctggagagtgacgtggctgagctgcgggcccagctggccaaggccgaggacggtcatgcagtggccaaaaagcagctggagaaggagacgctgatgcgtgtggacctggagaaccgctgccagagcctgcaggaggagctggacttccggaagagtgtgttcgaggaggaggtgcgggagacgcggcggcggcacgagcggcgcctggtggaggtggacagcagccggcagcaggagtacgacttcaagatggcacaggcgctggaggagctgcggagccagcacgacgagcaagtgcggctctacaagctggagctggagcagacctaccaggccaagctggacagcgccaagctgagctctgaccagaacgacaaggcggccagtgcggctcgcgaggagctgaaggaggcccgcatgcgcctggagtccctcagctaccagctctccggcctccagaagcaggccagtgccgctgaagatcgcattcgggagctggaggaggccatggccggggagcgggacaagttccggaagatgctggacgccaaggagcaggagatgacggagatgcgggacgtgatgcagcagcagctggccgagtaccaggagctgctggacgtgaagctggccctggacatggagatcaacgcctaccggaagctcctggagggcgaggaggagaggctgaagctgtcccccagcccatcctcgcgcgtcaccgtctcacgagccacctcgagcagcagcggcagcttgtccgccaccgggcgcctgggccgcagtaagcggaagcggctggaggtggaggagcccttgggcagcggcccaagcgtcctgggcacgggcacgggtggcagcggtggcttccacctggcccagcaggcctcggcctcgggtagcgtcagcatcgaggagatcgacctggagggcaagtttgtgcagctcaagaacaactcggacaaggatcagtctctggggaactggagaatcaagaggcaggtcttggagggggaggagatcgcctacaagttcacgcccaagtacatcctgcgcgccggccagatggtcacggtgtgggcagctggtgcgggggtggcccacagccccccctcgacgctggtgtggaagggccagagcagctggggcacgggcgagagcttccgcaccgtcctggttaacgcggatggcgaggaagtggccatgaggactgtgaagaagtcctcggtgatgcgtgagaatgagaatggggaggaagaggaggaggaagccgagtttggcgaggaggatcttttccaccaacaggtaggacccctgtgcccacttgcggctggggg

SEQ ID NO: 417848 - DNA, 1896 bp, Homo sapiens
tggctaggtagagcctcggcttgaatcggccgaggcgtgcccagccagctccgtctgccctgtgcctatatatacacatgcgtctatccatactgtgcttttatctgtgattttctcgctgaaaccatgtttctcagacaggccaaggccacctgactcctatcacgacgcacccaagcccctcagtccagcttcccaatgcctggcaccccccttcggcaatagctcaccgtttacaccctccctcatagatacacagaagttatttttttaatggatatttatttttttacattggtcagtacacaggtcaggagctcacgccagggccttgaggacaggctgaccctcctccccggggtggcgtggggctggggcaccctccgacggcagagcctccttcagaaagtgcagctcaagtcttaaagacaccaaaactgagccatgggcacgcgccgtctccgggccatggcgttcactgcagggcgggggcggcaccgctcccctgtgactgcatcccgcctccctggggacctgcctgtggcaggaaggaatggggggccccagccccaggccgggaaggagccagcggccgacaaagcagaaacacccgctgctccacgtagcccctgctcgctgtccttgctctcagaagtcccggtcccatgtagatagaggggggcgcatcttaccaaagcatttcctcctggaggctacgccgctgtgctcccagtcaggcggctggtagggagctttgcctgccccggggataccctctgccagccgctggaagtgggaatgctggcgacagactgtgtcctctttcccaccttcatagcaggaatcacccggacccgactggctgggcttcgtgctagcgagggttctgggggtgggtcttggtgatcttgtcctatggggagtctgcagtggtctcagccacatcctatgtattttggctctggaggagcaaagctgtatcctggagttggtctgtgatttgccgacagccttgcaggctgggctcagggacaaagtcccccccaaaacccgcaggtcctcatgtccagacgctgcccagtcctgtcctgaaaacagcacgccccaggcccacagaaccccccaccctacatttgccttgggtggagctgggggtggtcctaggactgcgggtgcccttagctgaagggggtggggagaagcgtggactgggcagcctgtgggtaattggaggttcattgagaattgagtctttggaaacactaagaaaatcaaatttttaaaagttatttatggcctgggaaacaatttgcatttgtccccaaatacgcttagctgtgtgccgcttagaacgatgcgaaaccatccctctgtgtaagcccgtgccgtgtgactcgaagcctagcgccctccctgcgaagcatcagacgccacccagccctggggggaggcccacgcctgctggaccaacgcgggttctggggtgcacagcgccaggttaacgctgaagcctgccccgctgagcccaggagccgggaggcctgcgggctgacccagaatccgatcatgcacctgtcctcatgccagcggctttggctggggttggtctgaagcctgcacgcggcagttctttgttaaagatctgagggactcctcagtcctggggcgtcgccgcctgcagcctcttccaagccctgcgtccagcgagcgtcacagcacaacctgcaaaaacggagctgggctgcagctggggctggcatggactttcatttcagagattcggtttttaagaagatgcatgcctaatgtgttcttttttttttccaatgatttgtaatatacattttatgactggaaacttttttgtacaacactccaataaacattttgatttta

SEQ ID NO: 417849 - DNA, 577 bp, Homo sapiens
aggggcagcggcggcggcgggaagcggagccgggaccgctgctgccagcggagccgggaccgctgccagtgtagcaacttgccagggaccccacccctccctctctgggcctgtgcagtgagcatggggattcccatcaaggggcctggcacctgtgctagttacgtagccgctgctcacgcgctcactcctgaccacatgcacgttccctagatgcagactgctttgaactttaaagctgtacaatttggttatgtttgtgctgacttaaaatatattttaatgaggaaaaaataatggagaaccctgggaaggacctggttcttttgcttctcggggaactgtaagccctcgcgttctgggaatcgctctctgctgctctttcctggaagctaagcctgtctccaccgcccgaggcctgcgccggtggctcccgccgcagttgcgtttgctttggaccttgcgtgcgggggagggggtgctcggtccgagcccgctcctttctgtacacctagcgctgcccgccccgcttgtgtctgaggtcgtgtatgtcaaaaataaagccgctagaaacgga

SEQ ID NO: 417850 - DNA, 4397 bp, Homo sapiens
gccatcttgttgttgatccgtacccagtgggcagcgccgggagctggaccaagcggccggtgagaggccgctgtagcggtgctcagccacctgtgctgcctgccagggggcgggccgaaacctggaggcccggggggcccagctcccgtagcgccggtgggcgctcggtgcccgggccgggcaggacagaataataagctgaatagaatctgaccattggctttcacctggccaggaccttctatgtagctctccttttgtggcccatgtgctgcatcctctgccctcagtgtgcaactggcccccaacgcaatgtgtgtttgtcaaaccatggaagtggggcagtatggcaagaatgcaagtcgggctggagaccggggagtcctcctggagcccttcatccaccaagtaggcggacacagcagcatgatgcgttacgacgatcacactgtgtgcaagcccctcatctcccgggaacagcgcttttacgagtccctccctcccgaaatgaaggagttcacccctgaatacaaaggcgtggtatctgtctgttttgagggggacagtgatggttacatcaacttagtggcctatccttatgtggaaagtgagactgtggaacaggatgacacaacagaacgggagcaacctcggcgcaaacactcccgccggagcctgcaccggtcaggcagtggcagtgaccacaaggaggagaaagccagcctgtcccttgagacctctgagagctcacaggaggcaaagagtccgaaggtggagctgcacagccactcagaggtccctttccagatgctagatggcaacagtggcttgagttctgagaagatcagccacaacccctggagcctgcgttgtcacaagcagcagctgagccgcatgcgctccgagtccaaggaccgaaagctctacaagttcctcctgcttgagaacgtggtgcaccacttcaagtacccctgcgtgttggacctgaagatgggcacgcggcagcatggcgatgacgcgtcagctgagaaggcagcccggcagatgcggaaatgcgagcagagcacatcagccacgctgggcgtcagggtctgcggcatgcaggtgtaccagctggacacagggcattacctctgcaggaacaagtactatggccgtgggctctccattgaaggcttccgcaatgccctctatcaatatctgcacaatggcctggacctgcgacgtgacctgtttgagcctatcctgagcaaactgcggggcctgaaagctgtgctggagcggcaggcctcttaccgcttctactccagttccctgcttgtcatctatgatggcaaggagtgccgggctgagtcctgcctggaccgccggtctgagatgcgtctcaagcacctggacatggtgctccctgaggtggcgtcatcctgtggccccagcaccagccccagcaacaccagccccgaggcgggtccctcctctcagcccaaggtggatgtccgcatgattgactttgcacacagcacattcaagggcttccgggatgaccccaccgtgcatgatgggccagacagaggctacgtgtttggcctggagaacctcatcagcatcatggaacagatgcgggacgagaaccagtaggccctgttctgggcccccagaaccccttcctctccactgcaggcagggaccattgttctgaacttgccgtgaggacacacagacttgcttttaaagggttatatttctctttggtgtaaactaaaagaaatgtttttagctgtagcctggaatccatatatataaagtgaaggagggcagaccacacgccctctcagccaggctcctcagctttgtggctctgactggtgtgtccaggctgccttaggaaggaagaggtgcccctggtgggcttggcagcagggacagggtgcccttggacattggtttctcttgtctagatctttgagatctgtggctgcagggccctgctgattgtaaggtaaagccctgggctggtgcagggcccctccacgcccactcttcccttgttccccagaagtagagggctctgggtgcccatttcttgggggctttccagtcttatgctgtgggtgtcagctagctctttaataggtgccctcagggcaccacagggctgactgcacaaagctggacccatccttcggtctgaccttagcatggggctagattaatgaagctgggctgaggccaacttatggcagagggcggcgcctgggttccccaggcacctgttggcacgtgacaggttggcacctgtcctattcctgaaacagcctctctcaccaagttcccttgcctaagaaggccactccctcccaccccactgaagtgggggatagtcggtgtcctagcaggcctcagggcctctggtggctctggcccagacagtatttgcagttcttgtgctatgggtgggagtcttcttcctcaagtttcggcagctgtgctgctgctggatgggctgctcctcccagggctcaagggctgtggtccgctcagggtctcatttccccaggccaagttcaaggcagcagccctttgtgaggcgctcttggccctgggcctggagggagaactttaagcttttttgctcacagggacgtggtatgggccctgggtgcaggtgcccacattctgctaatgagagctttgtctgatcagtcctgggtccatcagtttgtccatgtgtccggctgccagcccgtcccttgggatccttcccctggggtgtagccttgttcattagtatatactcattccttcatgctttcctcagcagaacacttccacttctgaggtgagcttttgccccgtgcccttcctccacaggtgttgcctttttataaagacctgatagcagaataaattggtgtttccctgttgacccagcaccatttctgtgggcctagaatatggccctcaacccttagagtggggcagtgagggcttgaggagtgacccttcctttctcatggttttagtcattttggctgccagcccttaatggcacagatctgctgcttctaacagatggccaggaggtgacaccgatttcagccattgccaaggttagcaccctctcctttgagcctagggccacactgttcattgtcactttaggcaagtgcctgtttggctttaaaggtaagcctgccagctgtgagaagccttggtaactgatggactcatttcctggtccttaaagatgcagcctcttaagggctccttgatggatgccatctctcctagcccccagccctggtgccactggtgggcaggttcccattctttggggctgggagggacagcttgcctgtttctggtcacaaattacagtcttctctcctgtaccattctgtggcttcagccatgggggcagtagcccttcattagtgtagatagtcattccctggtagggtggagggtaagacatagggtctggaactgtttgggaccttttggggatgtcctgtgcctcccagattcctagattctgggaggagaggctgccgcattctgctgctcctcacagcgagcaaagctgcacccacttacattcagtattttcctggcactacaaagagtgggaaggcctgggatttgctgctgctcccttagagcagggcccctcttttcagcactttggacacctggagacccagccctgttatttaatggtagtgggcaagtgtgtgtgcatactgtctgccactgctttctccctgccccatgccagagagccctgtccctgccaggcccagccttcttagccccaacttgggaacaaagtgcaacatgggatcatgggttggggtgctcaggtgagccctctctatagtgcttccctgggccaagctgacaccagcccctgagggtggggtgggacgggtggtgagtgagcatggggattcccatcaaggggcctggcacctgtgctagttacgtagccgctgctcacgcgctcactcctgaccacatgcacgttccctagatgcagactgctttgaactttaaagctgtacaatttggttatgtttgtgctgacttaaaatatattttaatgaggaaaaaataatggagaaccctgggaaggacctggttcttttgcttctcggggaactgtaagccctcgcgttctgggaatcgctctctgctgctctttcctggaagctaagcctgtctccaccgcccgaggcctgcgccggtggctcccgccgcagttgcgtttgctttggaccttgcgtgcgggggagggggtgctcggtccgagcccgctcctttctgtacacctagcgctgcccgccccgcttgtgtctgaggtcgtgtatgtcaaaaataaagccgctagaaacgga

SEQ ID NO: 417851 - DNA, 631 bp, Homo sapiens
agtgtagcaaacttgccaggaaccccaccccgcccagccttcttagccccaacttgggaacaaagtgcaacatgggatcatgggttggggtgctcaggtgagccctctctatagtgcttccctgggccaagctgacaccagcccctgagggtggggtgggacgggtggtgagtgagcatggggattcccatcaaggggcctggcacctgtgctagttacgtagccgctgctcacgcgctcactcctgaccacatgcacgttccctagatgcagactgctttgaactttaaagctgtacaatttggttatgtttgtgctgacttaaaatatattttaatgaggaaaaaataatggagaaccctgggaaggacctggttcttttgcttctcggggaactgtaagccctcgcgttctgggaatcgctctctgctgctctttcctggaagctaagcctgtctccaccgcccgaggcctgcgccggtggctcccgccgcagttgcgtttgctttggaccttgcgtgcgggggagggggtgctcggtccgagcccgctcctttctgtacacctagcgctgcccgccccgcttgtgtctgaggtcgtgtatgtcaaaaataaagccgctagaaacgga

SEQ ID NO: 417852 - DNA, 407 bp, Homo sapiens
gagatcagctcggcaccattatgtggactcagacgttccctagatgcagactgctttgaactttaaagctgtacaatttggttatgtttgtgctgacttaaaatatattttaatgaggaaaaaataatggagaaccctgggaaggacctggttcttttgcttctcggggaactgtaagccctcgcgttctgggaatcgctctctgctgctctttcctggaagctaagcctgtctccaccgcccgaggcctgcgccggtggctcccgccgcagttgcgtttgctttggaccttgcgtgcgggggagggggtgctcggtccgagcccgctcctttctgtacacctagcgctgcccgccccgcttgtgtctgaggtcgtgtatgtcaaaaataaagccgctagaaacgga

SEQ ID NO: 417853 - DNA, 384 bp, Homo sapiens
atgtttgtgctgacttaaaatatattttaatgaggaaaaaataatggagaaccctgggaaggacctggttcttttgcttctcggggaactgtaagccctcgcgttctgggaatcgctctctgctgctctttcctggaagctaagcctgtctccaccgcccgaggcctgcgccggtggctcccgccgcagttgcgtttgctttggaccttgcgtgcgggggagggggtgctcggtccgagcccgctcctttctgtacacctagcgctgcccgccccgcttgtgtctgaggtcgtgtatgtcaaaaataaagccgctagaaacggaaggcgagtctgtctttgtgaaaatcccgtggcccgggagccttccctggtcaccctcggg

SEQ ID NO: 417854 - DNA, 4466 bp, Homo sapiens
gccatcttgttgttgatccgtacccagtgggcagcgccgggagctggaccaagcggccggtgagaggccgctgtagcggtgctcagccacctgtgctgcctgccagggggcgggccgaaacctggaggcccggggggcccagctcccgtagcgccggtgggcgctcggtgcccgggccgggcaggacagaataataagctgaatagaatctgaccattggctttcacctggccaggaccttctatgtagctctccttttgtggcccatgtgctgcatcctctgccctcagtgtgcaactggcccccaacgcaatgtgtgtttgtcaaaccatggaagtggggcagtatggcaagaatgcaagtcgggctggagaccggggagtcctcctggagcccttcatccaccaagtaggcggacacagcagcatgatgcgttacgacgatcacactgtgtgcaagcccctcatctcccgggaacagcgcttttacgagtccctccctcccgaaatgaaggagttcacccctgaatacaaaggcgtggtatctgtctgttttgagggggacagtgatggttacatcaacttagtggcctatccttatgtggaaagtgagactgtggaacaggatgacacaacagaacgggagcaacctcggcgcaaacactcccgccggagcctgcaccggtcaggcagtggcagtgaccacaaggaggagaaagccagcctgtcccttgagacctctgagagctcacaggaggcaaagagtccgaaggtggagctgcacagccactcagaggtccctttccagatgctagatggcaacagtggcttgagttctgagaagatcagccacaacccctggagcctgcgttgtcacaagcagcagctgagccgcatgcgctccgagtccaaggaccgaaagctctacaagttcctcctgcttgagaacgtggtgcaccacttcaagtacccctgcgtgttggacctgaagatgggcacgcggcagcatggcgatgacgcgtcagctgagaaggcagcccggcagatgcggaaatgcgagcagagcacatcagccacgctgggcgtcagggtctgcggcatgcaggtgtaccagctggacacagggcattacctctgcaggaacaagtactatggccgtgggctctccattgaaggcttccgcaatgccctctatcaatatctgcacaatggcctggacctgcgacgtgacctgtttgagcctatcctgagcaaactgcggggcctgaaagctgtgctggagcggcaggcctcttaccgcttctactccagttccctgcttgtcatctatgatggcaaggagtgccgggctgagtcctgcctggaccgccggtctgagatgcgtctcaagcacctggacatggtgctccctgaggtggcgtcatcctgtggccccagcaccagccccagcaacaccagccccgaggcgggtccctcctctcagcccaaggtggatgtccgcatgattgactttgcacacagcacattcaagggcttccgggatgaccccaccgtgcatgatgggccagacagaggctacgtgtttggcctggagaacctcatcagcatcatggaacagatgcgggacgagaaccagtaggccctgttctgggcccccagaaccccttcctctccactgcaggcagggaccattgttctgaacttgccgtgaggacacacagacttgcttttaaagggttatatttctctttggtgtaaactaaaagaaatgtttttagctgtagcctggaatccatatatataaagtgaaggagggcagaccacacgccctctcagccaggctcctcagctttgtggctctgactggtgtgtccaggctgccttaggaaggaagaggtgcccctggtgggcttggcagcagggacagggtgcccttggacattggtttctcttgtctagatctttgagatctgtggctgcagggccctgctgattgtaaggtaaagccctgggctggtgcagggcccctccacgcccactcttcccttgttccccagaagtagagggctctgggtgcccatttcttgggggctttccagtcttatgctgtgggtgtcagctagctctttaataggtgccctcagggcaccacagggctgactgcacaaagctggacccatccttcggtctgaccttagcatggggctagattaatgaagctgggctgaggccaacttatggcagagggcggcgcctgggttccccaggcacctgttggcacgtgacaggttggcacctgtcctattcctgaaacagcctctctcaccaagttcccttgcctaagaaggccactccctcccaccccactgaagtgggggatagtcggtgtcctagcaggcctcagggcctctggtggctctggcccagacagtatttgcagttcttgtgctatgggtgggagtcttcttcctcaagtttcggcagctgtgctgctgctggatgggctgctcctcccagggctcaagggctgtggtccgctcagggtctcatttccccaggccaagttcaaggcagcagccctttgtgaggcgctcttggccctgggcctggagggagaactttaagcttttttgctcacagggacgtggtatgggccctgggtgcaggtgcccacattctgctaatgagagctttgtctgatcagtcctgggtccatcagtttgtccatgtgtccggctgccagcccgtcccttgggatccttcccctggggtgtagccttgttcattagtatatactcattccttcatgctttcctcagcagaacacttccacttctgaggtgagcttttgccccgtgcccttcctccacaggtgttgcctttttataaagacctgatagcagaataaattggtgtttccctgttgacccagcaccatttctgtgggcctagaatatggccctcaacccttagagtggggcagtgagggcttgaggagtgacccttcctttctcatggttttagtcattttggctgccagcccttaatggcacagatctgctgcttctaacagatggccaggaggtgacaccgatttcagccattgccaaggttagcaccctctcctttgagcctagggccacactgttcattgtcactttaggcaagtgcctgtttggctttaaaggtaagcctgccagctgtgagaagccttggtaactgatggactcatttcctggtccttaaagatgcagcctcttaagggctccttgatggatgccatctctcctagcccccagccctggtgccactggtgggcaggttcccattctttggggctgggagggacagcttgcctgtttctggtcacaaattacagtcttctctcctgtaccattctgtggcttcagccatgggggcagtagcccttcattagtgtagatagtcattccctggtagggtggagggtaagacatagggtctggaactgtttgggaccttttggggatgtcctgtgcctcccagattcctagattctgggaggagaggctgccgcattctgctgctcctcacagcgagcaaagctgcacccacttacattcagtattttcctggcactacaaagagtgggaaggcctgggatttgctgctgctcccttagagcagggcccctcttttcagcactttggacacctggagacccagccctgttatttaatggtagtgggcaagtgtgtgtgcatactgtctgccactgctttctccctgccccatgccagagagccctgtccctgccaggcccagccttcttagccccaacttgggaacaaagtgcaacatgggatcatgggttggggtgctcaggtgagccctctctatagtgcttccctgggccaagctgacaccagcccctgagggtggggtgggacgggtggtgcttaaaagaggaaggggaccagtgtagcaacttgccagggaccccacccctccctctctgggcctgtgcagtgagcatggggattcccatcaaggggcctggcacctgtgctagttacgtagccgctgctcacgcgctcactcctgaccacatgcacgttccctagatgcagactgctttgaactttaaagctgtacaatttggttatgtttgtgctgacttaaaatatattttaatgaggaaaaaataatggagaaccctgggaaggacctggttcttttgcttctcggggaactgtaagccctcgcgttctgggaatcgctctctgctgctctttcctggaagctaagcctgtctccaccgcccgaggcctgcgccggtggctcccgccgcagttgcgtttgctttggaccttgcgtgcgggggagggggtgctcggtccgagcccgctcctttctgtacacctagcgctgcccgccccgcttgtgtctgaggtcgtgtatgtcaaaaataaagccgctagaaacgga

SEQ ID NO: 417855 - DNA, 4432 bp, Homo sapiens
ggctggtacggtcggaatttaggatgtgagaggccgctgtagcggtgctcagccacctgtgctgcctgccagggggcgggccgaaacctggaggcccggggggcccagctcccgtagcgccggtgggcgctcggtgcccgggccgggcaggacagaataataagctgaatagaatctgaccattggctttcacctggccaggaccttctatgtagctctccttttgtggcccatgtgctgcatcctctgccctcagtgtgcaactggcccccaacgcaatgtgtgtttgtcaaaccatggaagtggggcagtatggcaagaatgcaagtcgggctggagaccggggagtcctcctggagcccttcatccaccaagtaggcggacacagcagcatgatgcgttacgacgatcacactgtgtgcaagcccctcatctcccgggaacagcgcttttacgagtccctccctcccgaaatgaaggagttcacccctgaatacaaaggcgtggtatctgtctgttttgagggggacagtgatggttacatcaacttagtggcctatccttatgtggaaagtgagactgtggaacaggatgacacaacagaacgggagcaacctcggcgcaaacactcccgccggagcctgcaccggtcaggcagtggcagtgaccacaaggaggagaaagccagcctgtcccttgagacctctgagagctcacaggaggcaaagagtccgaaggtggagctgcacagccactcagaggtccctttccagatgctagatggcaacagtggcttgagttctgagaagatcagccacaacccctggagcctgcgttgtcacaagcagcagctgagccgcatgcgctccgagtccaaggaccgaaagctctacaagttcctcctgcttgagaacgtggtgcaccacttcaagtacccctgcgtgttggacctgaagatgggcacgcggcagcatggcgatgacgcgtcagctgagaaggcagcccggcagatgcggaaatgcgagcagagcacatcagccacgctgggcgtcagggtctgcggcatgcaggtgtaccagctggacacagggcattacctctgcaggaacaagtactatggccgtgggctctccattgaaggcttccgcaatgccctctatcaatatctgcacaatggcctggacctgcgacgtgacctgtttgagcctatcctgagcaaactgcggggcctgaaagctgtgctggagcggcaggcctcttaccgcttctactccagttccctgcttgtcatctatgatggcaaggagtgccgggctgagtcctgcctggaccgccggtctgagatgcgtctcaagcacctggacatggtgctccctgaggtggcgtcatcctgtggccccagcaccagccccagcaacaccagccccgaggcgggtccctcctctcagcccaaggtggatgtccgcatgattgactttgcacacagcacattcaagggcttccgggatgaccccaccgtgcatgatgggccagacagaggctacgtgtttggcctggagaacctcatcagcatcatggaacagatgcgggacgagaaccagtaggccctgttctgggcccccagaaccccttcctctccactgcaggcagggaccattgttctgaacttgccgtgaggacacacagacttgcttttaaagggttatatttctctttggtgtaaactaaaagaaatgtttttagctgtagcctggaatccatatatataaagtgaaggagggcagaccacacgccctctcagccaggctcctcagctttgtggctctgactggtgtgtccaggctgccttaggaaggaagaggtgcccctggtgggcttggcagcagggacagggtgcccttggacattggtttctcttgtctagatctttgagatctgtggctgcagggccctgctgattgtaaggtaaagccctgggctggtgcagggcccctccacgcccactcttcccttgttccccagaagtagagggctctgggtgcccatttcttgggggctttccagtcttatgctgtgggtgtcagctagctctttaataggtgccctcagggcaccacagggctgactgcacaaagctggacccatccttcggtctgaccttagcatggggctagattaatgaagctgggctgaggccaacttatggcagagggcggcgcctgggttccccaggcacctgttggcacgtgacaggttggcacctgtcctattcctgaaacagcctctctcaccaagttcccttgcctaagaaggccactccctcccaccccactgaagtgggggatagtcggtgtcctagcaggcctcagggcctctggtggctctggcccagacagtatttgcagttcttgtgctatgggtgggagtcttcttcctcaagtttcggcagctgtgctgctgctggatgggctgctcctcccagggctcaagggctgtggtccgctcagggtctcatttccccaggccaagttcaaggcagcagccctttgtgaggcgctcttggccctgggcctggagggagaactttaagcttttttgctcacagggacgtggtatgggccctgggtgcaggtgcccacattctgctaatgagagctttgtctgatcagtcctgggtccatcagtttgtccatgtgtccggctgccagcccgtcccttgggatccttcccctggggtgtagccttgttcattagtatatactcattccttcatgctttcctcagcagaacacttccacttctgaggtgagcttttgccccgtgcccttcctccacaggtgttgcctttttataaagacctgatagcagaataaattggtgtttccctgttgacccagcaccatttctgtgggcctagaatatggccctcaacccttagagtggggcagtgagggcttgaggagtgacccttcctttctcatggttttagtcattttggctgccagcccttaatggcacagatctgctgcttctaacagatggccaggaggtgacaccgatttcagccattgccaaggttagcaccctctcctttgagcctagggccacactgttcattgtcactttaggcaagtgcctgtttggctttaaaggtaagcctgccagctgtgagaagccttggtaactgatggactcatttcctggtccttaaagatgcagcctcttaagggctccttgatggatgccatctctcctagcccccagccctggtgccactggtgggcaggttcccattctttggggctgggagggacagcttgcctgtttctggtcacaaattacagtcttctctcctgtaccattctgtggcttcagccatgggggcagtagcccttcattagtgtagatagtcattccctggtagggtggagggtaagacatagggtctggaactgtttgggaccttttggggatgtcctgtgcctcccagattcctagattctgggaggagaggctgccgcattctgctgctcctcacagcgagcaaagctgcacccacttacattcagtattttcctggcactacaaagagtgggaaggcctgggatttgctgctgctcccttagagcagggcccctcttttcagcactttggacacctggagacccagccctgttatttaatggtagtgggcaagtgtgtgtgcatactgtctgccactgctttctccctgccccatgccagagagccctgtccctgccaggcccagccttcttagccccaacttgggaacaaagtgcaacatgggatcatgggttggggtgctcaggtgagccctctctatagtgcttccctgggccaagctgacaccagcccctgagggtggggtgggacgggtggtgcttaaaagaggaaggggaccagtgtagcaacttgccagggaccccacccctccctctctgggcctgtgcagtgagcatggggattcccatcaaggggcctggcacctgtgctagttacgtagccgctgctcacgcgctcactcctgaccacatgcacgttccctagatgcagactgctttgaactttaaagctgtacaatttggttatgtttgtgctgacttaaaatatattttaatgaggaaaaaataatggagaaccctgggaaggacctggttcttttgcttctcggggaactgtaagccctcgcgttctgggaatcgctctctgctgctctttcctggaagctaagcctgtctccaccgcccgaggcctgcgccggtggctcccgccgcagttgcgtttgctttggaccttgcgtgcgggggagggggtgctcggtccgagcccgctcctttctgtacacctagcgctgcccgccccgcttgtgtctgaggtcgtgtatgtcaaaaataaagccgctagaaacgga

SEQ ID NO: 417856 - DNA, 4115 bp, Homo sapiens
gccatcttgttgttgatccgtacccagtgggcagcgccgggagctggaccaagcggccggtgagaggccgctgtagcggtgctcagccacctgtgctgcctgccagggggcgggccgaaacctggaggcccggggggcccagctcccgtagcgccggtgggcgctcggtgcccgggccgggcaggcgtggtatctgtctgttttgagggggacagtgatggttacatcaacttagtggcctatccttatgtggaaagtgagactgtggaacaggatgacacaacagaacgggagcaacctcggcgcaaacactcccgccggagcctgcaccggtcaggcagtggcagtgaccacaaggaggagaaagccagcctgtcccttgagacctctgagagctcacaggaggcaaagagtccgaaggtggagctgcacagccactcagaggtccctttccagatgctagatggcaacagtggcttgagttctgagaagatcagccacaacccctggagcctgcgttgtcacaagcagcagctgagccgcatgcgctccgagtccaaggaccgaaagctctacaagttcctcctgcttgagaacgtggtgcaccacttcaagtacccctgcgtgttggacctgaagatgggcacgcggcagcatggcgatgacgcgtcagctgagaaggcagcccggcagatgcggaaatgcgagcagagcacatcagccacgctgggcgtcagggtctgcggcatgcaggtgtaccagctggacacagggcattacctctgcaggaacaagtactatggccgtgggctctccattgaaggcttccgcaatgccctctatcaatatctgcacaatggcctggacctgcgacgtgacctgtttgagcctatcctgagcaaactgcggggcctgaaagctgtgctggagcggcaggcctcttaccgcttctactccagttccctgcttgtcatctatgatggcaaggagtgccgggctgagtcctgcctggaccgccggtctgagatgcgtctcaagcacctggacatggtgctccctgaggtggcgtcatcctgtggccccagcaccagccccagcaacaccagccccgaggcgggtccctcctctcagcccaaggtggatgtccgcatgattgactttgcacacagcacattcaagggcttccgggatgaccccaccgtgcatgatgggccagacagaggctacgtgtttggcctggagaacctcatcagcatcatggaacagatgcgggacgagaaccagtaggccctgttctgggcccccagaaccccttcctctccactgcaggcagggaccattgttctgaacttgccgtgaggacacacagacttgcttttaaagggttatatttctctttggtgtaaactaaaagaaatgtttttagctgtagcctggaatccatatatataaagtgaaggagggcagaccacacgccctctcagccaggctcctcagctttgtggctctgactggtgtgtccaggctgccttaggaaggaagaggtgcccctggtgggcttggcagcagggacagggtgcccttggacattggtttctcttgtctagatctttgagatctgtggctgcagggccctgctgattgtaaggtaaagccctgggctggtgcagggcccctccacgcccactcttcccttgttccccagaagtagagggctctgggtgcccatttcttgggggctttccagtcttatgctgtgggtgtcagctagctctttaataggtgccctcagggcaccacagggctgactgcacaaagctggacccatccttcggtctgaccttagcatggggctagattaatgaagctgggctgaggccaacttatggcagagggcggcgcctgggttccccaggcacctgttggcacgtgacaggttggcacctgtcctattcctgaaacagcctctctcaccaagttcccttgcctaagaaggccactccctcccaccccactgaagtgggggatagtcggtgtcctagcaggcctcagggcctctggtggctctggcccagacagtatttgcagttcttgtgctatgggtgggagtcttcttcctcaagtttcggcagctgtgctgctgctggatgggctgctcctcccagggctcaagggctgtggtccgctcagggtctcatttccccaggccaagttcaaggcagcagccctttgtgaggcgctcttggccctgggcctggagggagaactttaagcttttttgctcacagggacgtggtatgggccctgggtgcaggtgcccacattctgctaatgagagctttgtctgatcagtcctgggtccatcagtttgtccatgtgtccggctgccagcccgtcccttgggatccttcccctggggtgtagccttgttcattagtatatactcattccttcatgctttcctcagcagaacacttccacttctgaggtgagcttttgccccgtgcccttcctccacaggtgttgcctttttataaagacctgatagcagaataaattggtgtttccctgttgacccagcaccatttctgtgggcctagaatatggccctcaacccttagagtggggcagtgagggcttgaggagtgacccttcctttctcatggttttagtcattttggctgccagcccttaatggcacagatctgctgcttctaacagatggccaggaggtgacaccgatttcagccattgccaaggttagcaccctctcctttgagcctagggccacactgttcattgtcactttaggcaagtgcctgtttggctttaaaggtaagcctgccagctgtgagaagccttggtaactgatggactcatttcctggtccttaaagatgcagcctcttaagggctccttgatggatgccatctctcctagcccccagccctggtgccactggtgggcaggttcccattctttggggctgggagggacagcttgcctgtttctggtcacaaattacagtcttctctcctgtaccattctgtggcttcagccatgggggcagtagcccttcattagtgtagatagtcattccctggtagggtggagggtaagacatagggtctggaactgtttgggaccttttggggatgtcctgtgcctcccagattcctagattctgggaggagaggctgccgcattctgctgctcctcacagcgagcaaagctgcacccacttacattcagtattttcctggcactacaaagagtgggaaggcctgggatttgctgctgctcccttagagcagggcccctcttttcagcactttggacacctggagacccagccctgttatttaatggtagtgggcaagtgtgtgtgcatactgtctgccactgctttctccctgccccatgccagagagccctgtccctgccaggcccagccttcttagccccaacttgggaacaaagtgcaacatgggatcatgggttggggtgctcaggtgagccctctctatagtgcttccctgggccaagctgacaccagcccctgagggtggggtgggacgggtggtgcttaaaagaggaaggggaccagtgtagcaacttgccagggaccccacccctccctctctgggcctgtgcagtgagcatggggattcccatcaaggggcctggcacctgtgctagttacgtagccgctgctcacgcgctcactcctgaccacatgcacgttccctagatgcagactgctttgaactttaaagctgtacaatttggttatgtttgtgctgacttaaaatatattttaatgaggaaaaaataatggagaaccctgggaaggacctggttcttttgcttctcggggaactgtaagccctcgcgttctgggaatcgctctctgctgctctttcctggaagctaagcctgtctccaccgcccgaggcctgcgccggtggctcccgccgcagttgcgtttgctttggaccttgcgtgcgggggagggggtgctcggtccgagcccgctcctttctgtacacctagcgctgcccgccccgcttgtgtctgaggtcgtgtatgtcaaaaataaagccgctagaaacgga

SEQ ID NO: 417857 - DNA, 4532 bp, Homo sapiens
gccatcttgttgttgatccgtacccagtgggcagcgccgggagctggaccaagcggccggtgagaggccgctgtagcggtgctcagccacctgtgctgcctgccagggggcgggccgaaacctggaggcccggggggcccagctcccgtagcgccggtgggcgctcggtgcccgggccgggcaggacagaataataagctgaatagaatctgaccattggctttcacctggccaggaccttctatgtagctctccttttgtggcccatgtgctgcatcctctgccctcagtgtgcaactggcccccaacgcaatgtgtgtttgtcaaaccatggaagtggggcagtatggcaagaatgcaagtcgggctggagaccggggagtcctcctggagcccttcatccaccaagtaggcggacacagcagcatgatgcgttacgacgatcacactgtgtgcaagcccctcatctcccgggaacagcgcttttacgagtccctccctcccgaaatgaaggagttcacccctgaatacaaaggcgtggtatctgtctgttttgagggggacagtgatggttacatcaacttagtggcctatccttatgtggaaagtgagactgtggaacaggatgacacaacagaacgggagcaacctcggcgcaaacactcccgccggagcctgcaccggtcaggcagtggcagtgaccacaaggaggagaaagccagcctgtcccttgagacctctgagagctcacaggaggcaaagagtccgaaggtggagctgcacagccactcagaggtccctttccagatgctagatggcaacagtggcttgagttctgagaagatcagccacaacccctggagcctgcgttgtcacaagcagcagctgagccgcatgcgctccgagtccaaggaccgaaagctctacaagttcctcctgcttgagaacgtggtgcaccacttcaagtacccctgcgtgttggacctgaagatgggcacgcggcagcatggcgatgacgcgtcagctgagaaggcagcccggcagatgcggaaatgcgagcagagcacatcagccacgctgggcgtcagggtctgcggcatgcaggtgtaccagctggacacagggcattacctctgcaggaacaagtactatggccgtgggctctccattgaaggcttccgcaatgccctctatcaatatctgcacaatggcctggacctgcgacgtgacctgtttgagcctatcctgagcaaactgcggggcctgaaagctgtgctggagcggcaggcctcttaccgcttctactccagttccctgcttgtcatctatgatggcaaggagtgccgggctgagtcctgcctggaccgccggtctgagatgcgtctcaagcacctggacatggtgctccctgaggtggcgtcatcctgtggccccagcaccagccccagcaacaccagccccgaggcgggtccctcctctcagcccaaggtggatgtccgcatgattgactttgcacacagcacattcaagggcttccgggatgaccccaccgtgcatgatgggccagacagaggctacgtgtttggcctggagaacctcatcagcatcatggaacagatgcgggacgagaaccagtaggccctgttctgggcccccagaaccccttcctctccactgcaggcagggaccattgttctgaacttgccgtgaggacacacagacttgcttttaaagggttatatttctctttggtgtaaactaaaagaaatgtttttagctgtagcctggaatccatatatataaagtgaaggagggcagaccacacgccctctcagccaggctcctcagctttgtggctctgactggtgtgtccaggctgccttaggaaggaagaggtgcccctggtgggcttggcagcagggacagggtgcccttggacattggtttctcttgtctagatctttgagatctgtggctgcagggccctgctgattgtaaggtaaagccctgggctggtgcagggcccctccacgcccactcttcccttgttccccagaagtagagggctctgggtgcccatttcttgggggctttccagtcttatgctgtgggtgtcagctagctctttaataggtgccctcagggcaccacagggctgactgcacaaagctggacccatccttcggtctgaccttagcatggggctagattaatgaagctgggctgaggccaacttatggcagagggcggcgcctgggttccccaggcacctgttggcacgtgacaggttggcacctgtcctattcctgaaacagcctctctcaccaagttcccttgcctaagaaggccactccctcccaccccactgaagtgggggatagtcggtgtcctagcaggcctcagggcctctggtggctctggcccagacagtatttgcagttcttgtgctatgggtgggagtcttcttcctcaagtttcggcagctgtgctgctgctggatgggctgctcctcccagggctcaagggctgtggtccgctcagggtctcatttccccaggccaagttcaaggcagcagccctttgtgaggcgctcttggccctgggcctggagggagaactttaagcttttttgctcacagggacgtggtatgggccctgggtgcaggtgcccacattctgctaatgagagctttgtctgatcagtcctgggtccatcagtttgtccatgtgtccggctgccagcccgtcccttgggatccttcccctggggtgtagccttgttcattagtatatactcattccttcatgctttcctcagcagaacacttccacttctgaggtgagcttttgccccgtgcccttcctccacaggtgttgcctttttataaagacctgatagcagaataaattggtgtttccctgttgacccagcaccatttctgtgggcctagaatatggccctcaacccttagagtggggcagtgagggcttgaggagtgacccttcctttctcatggttttagtcattttggctgccagcccttaatggcacagatctgctgcttctaacagatggccaggaggtgacaccgatttcagccattgccaaggttagcaccctctcctttgagcctagggccacactgttcattgtcactttaggcaagtgcctgtttggctttaaaggtaagcctgccagctgtgagaagccttggtaactgatggactcatttcctggtccttaaagatgcagcctcttaagggctccttgatggatgccatctctcctagcccccagccctggtgccactggtgggcaggttcccattctttggggctgggagggacagcttgcctgtttctggtcacaaattacagtcttctctcctgtaccattctgtggcttcagccatgggggcagtagcccttcattagtgtagatagtcattccctggtagggtggagggtaagacatagggtctggaactgtttgggaccttttggggatgtcctgtgcctcccagattcctagattctgggaggagaggctgccgcattctgctgctcctcacagcgagcaaagctgcacccacttacattcagtattttcctggcactacaaagagtgggaaggcctgggatttgctgctgctcccttagagcagggcccctcttttcagcactttggacacctggagacccagccctgttatttaatggtagtgggcaagtgtgtgtgcatactgtctgccactgctttctccctgccccatgccagagagccctgtccctgccaggcccagccttcttagccccaacttgggaacaaagtgcaacatgggatcatgggttggggtgctcaggtgagccctctctatagtgcttccctgggccaagctgacaccagcccctgagggtggggtgggacgggtggtgcttaaaagaggaaggggaccagtgtagcaacttgccagggaccccacccctccctctctgggcctgtgcagtgagcatggggattcccatcaaggggcctggcacctgtgctagttacgtagccgctgctcacgcgctcactcctgaccacatgcacgttccctagatgcagactgctttgaactttaaagctgtacaatttggttatgtttgtgctgacttaaaatatattttaatgaggaaaaaataatggagaaccctgggaaggacctggttcttttgcttctcggggaactgtaagccctcgcgttctgggaatcgctctctgctgctctttcctggaagctaagcctgtctccaccgcccgaggcctgcgccggtggctcccgccgcagttgcgtttgctttggaccttgcgtgcgggggagggggtgctcggtccgagcccgctcctttctgtacacctagcgctgcccgccccgcttgtgtctgaggtcgtgtatgtcaaaaataaagccgctagaaacggaaaacaacaacacatcacaaaacacaaacacaaaacaacaaacgcatcaactgcacagacacgcggg

SEQ ID NO: 417858 - DNA, 4454 bp, Homo sapiens
gccatcttgttgttgatccgtacccagtgggcagcgccgggagctggaccaagcggccggtgagaggccgctgtagcggtgctcagccacctgtgctgcctgccagggggcgggccgaaacctggaggcccggggggcccagctcccgtagcgccggtgggcgctcggtgcccgggccgggcaggacagaataataagctgaatagaatctgaccattggctttcacctggccaggaccttctatgtagctctccttttgtggcccatgtgctgcatcctctgccctcagtgtgcaactggcccccaacgcaatgtgtgtttgtcaaaccatggaagtggggcagtatggcaagaatgcaagtcgggctggagaccggggagtcctcctggagcccttcatccaccaagtaggcggacacagcagcatgatgcgttacgacgatcacactgtgtgcaagcccctcatctcccgggaacagcgcttttacgagtccctccctcccgaaatgaaggagttcacccctgaatacaaaggcgtggtatctgtctgttttgagggggacagtgatggttacatcaacttagtggcctatccttatgtggaaagtgagactgtggaacaggatgacacaacagaacgggagcaacctcggcgcaaacactcccgccggagcctgcaccggtcaggcagtggcagtgaccacaaggaggagaaagccagcctgtcccttgagacctctgagagctcacaggaggcaaagagtccgaaggtggagctgcacagccactcagaggtccctttccagatgctagatggcaacagtggcttgagttctgagaagatcagccacaacccctggagcctgcgttgtcacaagcagcagctgagccgcatgcgctccgagtccaaggaccgaaagctctacaagttcctcctgcttgagaacgtggtgcaccacttcaagtacccctgcgtgttggacctgaagatgggcacgcggcagcatggcgatgacgcgtcagctgagaaggcagcccggcagatgcggaaatgcgagcagagcacatcagccacgctgggcgtcagggtctgcggcatgcaggtgtaccagctggacacagggcattacctctgcaggaacaagtactatggccgtgggctctccattgaaggcttccgcaatgccctctatcaatatctgcacaatggcctggacctgcgacgtgacctgtttgagcctatcctgagcaaactgcggggcctgaaagctgtgctggagcggcaggcctcttaccgcttctactccagttccctgcttgtcatctatgatggcaaggagtgccgggctgagtcctgcctggaccgccggtctgagatgcgtctcaagcacctggacatggtgctccctgaggtggcgtcatcctgtggccccagcaccagccccagcaacaccagccccgaggcgggtccctcctctcagcccaaggtggatgtccgcatgattgactttgcacacagcacattcaagggcttccgggatgaccccaccgtgcatgatgggccagacagaggctacgtgtttggcctggagaacctcatcagcatcatggaacagatgcgggacgagaaccagtaggccctgttctgggcccccagaaccccttcctctccactgcaggcagggaccattgttctgaacttgccgtgaggacacacagacttgcttttaaagggttatatttctctttggtgtaaactaaaagaaatgtttttagctgtagcctggaatccatatatataaagtgaaggagggcagaccacacgccctctcagccaggctcctcagctttgtggctctgactggtgtgtccaggctgccttaggaaggaagaggtgcccctggtgggcttggcagcagggacagggtgcccttggacattggtttctcttgtctagatctttgagatctgtggctgcagggccctgctgattgtaaggtaaagccctgggctggtgcagggcccctccacgcccactcttcccttgttccccagaagtagagggctctgggtgcccatttcttgggggctttccagtcttatgctgtgggtgtcagctagctctttaataggtgccctcagggcaccacagggctgactgcacaaagctggacccatccttcggtctgaccttagcatggggctagattaatgaagctgggctgaggccaacttatggcagagggcggcgcctgggttccccaggcacctgttggcacgtgacaggttggcacctgtcctattcctgaaacagcctctctcaccaagttcccttgcctaagaaggccactccctcccaccccactgaagtgggggatagtcggtgtcctagcaggcctcagggcctctggtggctctggcccagacagtatttgcagttcttgtgctatgggtgggagtcttcttcctcaagtttcggcagctgtgctgctgctggatgggctgctcctcccagggctcaagggctgtggtccgctcagggtctcatttccccaggccaagttcaaggcagcagccctttgtgaggcgctcttggccctgggcctggagggagaactttaagcttttttgctcacagggacgtggtatgggccctgggtgcaggtgcccacattctgctaatgagagctttgtctgatcagtcctgggtccatcagtttgtccatgtgtccggctgccagcccgtcccttgggatccttcccctggggtgtagccttgttcattagtatatactcattccttcatgctttcctcagcagaacacttccacttctgaggtgagcttttgccccgtgcccttcctccacaggtgttgcctttttataaagacctgatagcagaataaattggtgtttccctgttgacccagcaccatttctgtgggcctagaatatggccctcaacccttagagtggggcagtgagggcttgaggagtgacccttcctttctcatggttttagtcattttggctgccagcccttaatggcacagatctgctgcttctaacagatggccaggaggtgacaccgatttcagccattgccaaggttagcaccctctcctttgagcctagggccacactgttcattgtcactttaggcaagtgcctgtttggctttaaaggtaagcctgccagctgtgagaagccttggtaactgatggactcatttcctggtccttaaagatgcagcctcttaagggctccttgatggatgccatctctcctagcccccagccctggtgccactggtgggcaggttcccattctttggggctgggagggacagcttgcctgtttctggtcacaaattacagtcttctctcctgtaccattctgtggcttcagccatgggggcagtagcccttcattagtgtagatagtcattccctggtagggtggagggtaagacatagggtctggaactgtttgggaccttttggggatgtcctgtgcctcccagattcctagattctgggaggagaggctgccgcattctgctgctcctcacagcgagcaaagctgcacccacttacattcagtattttcctggcactacaaagagtgggaaggcctgggatttgctgctgctcccttagagcagggcccctcttttcagcactttggacacctggagacccagccctgttatttaatggtagtgggcaagtgtgtgtgcatactgtctgccactgctttctccctgccccatgccagagagccctgtccctgccaggcccagccttcttagccccaacttgggaacaaagtgcaacatgggatcatgggttggggtgctcaggtgagccctctctatagtgcttccctgggccaagctgacaccagcccctgagggtggggtgggacgggtggtgcttaaaagaggaaggggaccagtgtagcaacttgccagggaccccacccctccctctctgggcctgtgcagtgagcatggggattcccatcaaggggcctggcacctgtgctagttacgtagccgctgctcacgcgctcactcctgaccacatgcacgttccctagatgcagactgctttgaactttaaagctgtacaatttggttatgtttgtgctgacttaaaatatattttaatgaggaaaaaataatggagaaccctgggaaggacctggttcttttgcttctcggggaactgtaagccctcgcgttctgggaatcgctctctgctgctctttcctggaagctaagcctgtctccaccgcccgaggcctgcgccggtggctcccgccgcagttgcgtttgctttggaccttgcgtgcgggggagggggtgctcggtccgagcccgctcctttctgtacacctagcgctgcccgccccgctgcagatgaggtggtaagtcaggcgagctcgatgt

SEQ ID NO: 417859 - DNA, 1613 bp, Homo sapiens
ttaataatgactagagaatctgagaggcgtcatccctcaagtgtatcacttagttcaagagtcctggaatcttttcacatccactatgaacacctctcacctcctggccttgctgctcccaaaatctccacaaggtgaaaacagaagcaaacccctgggcaccccatacaacttctctgaacattgccaggattccgtggacgtgatggtcttcatcgtcacttcctacagcattgagactgtcgtgggggtcctgggtaacctctgcctgatgtgtgtgactgtgaggcagaaggagaaagccaacgtgaccaacctgcttatcgccaacctggccttctctgacttcctcatgtgcctcctctgccagccgctgaccgccgtctacaccatcatggactactggatctttggagagaccctctgcaagatgtcggccttcatccagtgcatgtcggtgacggtctccatcctctcgctcgtcctcgtggccctggagaggcatcagctcatcatcaacccaacaggctggaagcccagcatctcacaggcctacctggggattgtgctcatctgggtcattgcctgtgtcctctccctgcccttcctggccaacagcatcctggagaatgtcttccacaagaaccactccaaggctctggagttcctggcggataaggtggtctgtaccgagtcctggccactggctcaccaccgcaccatctacaccaccttcctgctcctcttccagtactgcctcccactgggcttcatcctggtctgttatgcacgcatctaccggcgcctgcagaggcaggggcgcgtgtttcacaagggcacctacagcttgcgagctgggcacatgaagcaggtcaatgtggtgctggtggtgatggtggtggcctttgccgtgctctggctgcctctgcatgtgttcaacagcctggaagactggcaccatgaggccatccccatctgccacgggaacctcatcttcttagtgtgccacttgcttgccatggcctccacctgcgtcaacccattcatctatggctttctcaacaccaacttcaagaaggagatcaaggccctggtgctgacttgccagcagagcgcccccctggaggagtcggagcatctgcccctgtccacagtacatacggaagtctccaaagggtccctgaggctaagtggcaggtccaatcccatttaaccaggtctaggtcttctccctgccatgtcccttgccaggctcttccacttagctaagtgggcacactgcaagctggggtggcaccccagcattcctggctttctggggtccagataggctggcaagagctgtttttgcatccatttgcatcgtgaagactggcattttgatacttcagctgtttgttcctgggagaattctgagcacagattccagaggtcacagtaagccttgcagcttgagctgaaagatgccagagccggagatgtctgctggcagcaggcagggttcattctggtgacacagcaacagatgcctggcctgggaacccagggatttcacctccaccagtgagaccacggggccactgtggggtgagggaaggagcgcttggagtcag

SEQ ID NO: 417860 - DNA, 1199 bp, Homo sapiens
gcagcagcggcggcgggcatggcagaggcgcgatcccagccctcggcggggccgcagctcaacgcgctaccggaccactctccgttgctgcagccgggcctggcggcgctgcggcgccgggcccgggaagctggcgtcccgctcgcgccgctgccgctcaccgactccttcctgctgcggttcctgcgcgcccgggatttcgatctggacctggcctggcggttactaaaaaactattataagtggagagcagaatgtccagaaataagtgcagatctacaccctagaagtattattggcctcctaaaggctggctaccatggagtcctgagatccagggatcccactggcagcaaagttcttatttacagaatcgcacactgggaccccaaagtttttacagcttatgacgtatttcgagtaagtctaatcacatccgagcttattgtacaggaggtagaaactcagcggaatggaatcaaggctatctttgatctggaaggttggcagttttctcatgcttttcaaatcactccatccgtagccaagaagattgctgctgtacttacggattcatttccattgaaagttcgtggcatccatttgataaatgaaccagtaattttccatgctgtcttttccatgatcaaaccattcctgactgaaaaaattaaggaacggattcacatgcatgggaacaactacaaacaaagcttgcttcagcatttcccagacattcttcctctggaatatggtggtgaagaattctccatggaggacatttgtcaggaatggacaaattttataatgaagtctgaagattatctcagcagcatttctgagagcattcaatgagaagttatgtcatgtgaatggcttcctaactaaaaatacatgagtgatatccaacctggttaaatgaatgaaagaaaaggagcaaatcttttaaactaatgcttgcctgaactttaaaaatgtagaaatcttctgacatgagcaacacaggtgtttggaaagattttttactttttaaatgcttttttctctacttttgaagtaattaaatgtcagtacattttaagagcataaaaatcggcgattttgtacttgaagagaacatgaaagttattgctaaagtagctgctcatgtgcatctttgtatgtttctagaaagttatattttaaacaagttctctgat

SEQ ID NO: 417861 - DNA, 468 bp, Homo sapiens
ttacttatttattgtgtttattatttattgcctgcccttcactgctagaatgtaagcctcatgagagcagggaactttctgtgtcttgtttgctgctttagcccctgtgcctaaaatagtgcctgccctgtagtagccagtcaatacttgttaagtgattgaaaggtttgcttatgtactccccttttttaaaactgtctatttgaagggctctctcgagaggtgatttcacacccaatctatttacagattgataaaacaagttttatataggtactaggtcttttgagctgagggagtgtgaagatttgcgggtatgtactagatagattgttgagtcagtgattcagggataaactgaaaatatcagggttcttggcaagatatcagttaacgaaatctaagaataggtttgtctttagagggaattttattgataaaatgactttccatgttaccaacatacat

SEQ ID NO: 417862 - DNA, 477 bp, Homo sapiens
cctcttcacttttgttttcaaacactagcaaatagttttgttttagtagctctgttttttccacttatcatttcaatgcacattgatatatctggaaccacgatagagttttacagagctccactgagctatagattcatgattcacattcattattgaagaaaattatagatgggtatgtcatgggcttcatgagtaatcaaaatggagaatgttaaatctgtgaaagtcaagggcgcaaagtatatattttctgttatatgtgtttgccttggtgaaatacacaaaaaaaattttagtagggcccctactatgctcattctgttttgtcatttatggaattttcacagagaaagcatgtgtctaaaaaacaaaaacaaaacaaaaaataccaccaccatcaccacacacacacacacacacacacacacacacacacacacatttatggaattttcacagagaaagcatgtgtct

SEQ ID NO: 417863 - DNA, 413 bp, Homo sapiens
cacatttctggactggtgcacaggtatgtctcattttcctgattcatgaactgtgccatctaccctgtatgggtacctaggaatattaaatgagttctaaatctcccaggcaagcatttattttgattattttgtctgttctaccatgtttagtcttgctcttcatttgttttactaacctttccttagaattttctctcctaaagtactgaattaagccctggattttcctaaatggagtctgtagccattgagatacctgaggctgtgatgggtggaaaggccttacaggacaatgagactagaaagaagagagaaggatacagaactcacaggccccaatctccaggggtttgcagtcctggttggataatggagcaatctcagcaagtgttttgaataaaaatatgaat

SEQ ID NO: 417864 - DNA, 618 bp, Homo sapiens
cagtcacgggccagcctttcccttaaggatgtctgagagctggtctcctcactcttttcttccgcctattaaactttccgcttcttaactcacccatgtgtgtccatgtcgttaatcatcttgacgagagatgatgaaccccggatatttaccccagacagtgatgccgcttcaccagcattgcactctacttccccgcttcctgatcctgcctcagcttctcctctccacagagaagaaaaaattctgcctaaagtctgcaacatcgtttcctgcctgagtttcagcctgccagcttctcctacggattctggacttgccagccccacaatcatactgcaattgagccatccaaggatacaatcatagcaatcaaaaagagtgactggaggaagaaggaaatgaacatagaagaggaaaaaaaagaaatcttgattttccctcatgctatagaagggaatggtgctgttatatttttggcctatccagaaaaccaattatgaaaataaacataaatggttttctgcctcatggtttagaagcacctctgtgtgtttgctcactgaattgttgtgatgttttgctctccatgatttggaagccaaaccaataaagcaa

SEQ ID NO: 417865 - DNA, 670 bp, Homo sapiens
actcaactccgcgactctccgggtcttttactcatcgttaatatacgtctaataaagacctttataagcgctccacagaaggcgacataggttcttgatcccccccgcgaagatacgtgatataataacgcgcccatgcgtgtgtttccttttatcaattaaaatgaaaaacaagtcaagggggggaaaacactcaggtttttgaacttaagctgcgagtgccttttttaattttcccccgcttcgagttccttcttaggtatggggatctcagcagtttcatttcagtggccacagcttgggaaacagacttctcccaatatcaaagggaatcaagtccccctttttttctccaggcctcggtctgcagcatctgtgatgcatcagactgcaattgagccatccaaggatacaatcatagcaatcaaaaagagtgactggaggaagaaggaaatgaacatagaagaggaaaaaaaagaaatcttgattttccctcatgctatagaagggaatggtgctgttatatttttggcctatccagaaaaccaattatgaaaataaacataaatggttttctgcctcatggtttagaagcacctctgtgtgtttgctcactgaattgttgtgatgttttgctctccatgatttggaagccaaaccaataaagcaa

SEQ ID NO: 417866 - DNA, 337 bp, Homo sapiens
ttcatagcagcagtgtatgaggattccagtttctccatccgtattcttgccaacacctgtttttatccatcttttttgttataggcatcgtcacaggtgtgaagtggtatctcattgtggatttgatttcgattttgcagatggctgatgatgtcaagcaatccttgatgtgcttattggccatttgtatatctccttaaaagaactgtctattcaaatcctttgctaatttttaaaagtgagttatttacccttctattattgagttgtaataattctttacatattctaggtacgagtcccttgtaacagtggtcgccaacatttttgacaccag

SEQ ID NO: 417867 - DNA, 1102 bp, Homo sapiens
cagtcacgggccagcctttcccttaaggatgtctgagagctggtctcctcactcttttcttccgcctattaaactttccgcttcttaactcacccatgtgtgtccatgtcgttaatcatcttgacgagagatgatgaaccccggatatttaccccagacagtgatgccgcttcaccagcattgcactctacttccccgcttcctgatcctgcctcagcttctcctctccacagagaagaaaaaattctgcctaaagtctgcaacatcgtttcctgcctgagtttcagcctgccagcttctcctacggattctggacttgccagccccacaatcataaccagagaggggcagcaattttgggcaaaatgtctgatttggaaataccaactttacctccatgggctccacaagaaatcagatgggagaagggacaagcagataagcgcaagcccatcaacctgaaggcataaaccacatccagccacctccttctgatcagcagcaaagctgacgttttgatctccatctgtctgattcttgtgtctacttctcagtttacaactccagtgggaaagaaagagctttatttacagacccataaaaatcccatcagtgtcgtcccctgctgagaggccatgtgagaccatatggaaaaacaacagccataatggcagcatggcagtggaagggtttgtcttgtgcccaggccttgcggtcatgcaagtttcttgtggatcctgttgggaccagccactcaccaaggctgagtaggtccacaaataatggggactttctaccagactcacagagaactgctgggtttttgggaagggtgtgcgtgtctttggggcatggaagttggggttatagtggagacccagaggatgagaaaacttctctgcctcagcagaagagtggcagctgagagagaggcaagaaactcgcacccactgtggactggggcagagagattttgaggagaatgaaatccagaaactctgtgtggtattagtttgtatccagagggtgaccctcttctcaaggaaatgggtgtcatcaattttctacactattaaagatataaagttcttggcattactac

SEQ ID NO: 417868 - DNA, 758 bp, Homo sapiens
ttttgagatggagtcttgccctgtcacccagacacgatctcagctcactgcaacctctgccttctgggttcaagctgttctcctgcctcagcctactgagtagctgggactacagttttcaccatttcatgcttctgtgctggcctcttgctcgtatgattttactgtaagattctggaacttttcaaagcctgactctcttcttgaaacagtggagcatcatacagagtttacttgtggtttagacttcagtcttcagagccccactcaggtggctgactgttcttgggatgaaacaataaagatctatgaccctgcttgtcttactattcctgcttgagatacactactttggtcagaaacagaggatgttggctgaagaactgcctaacagcaaataaattaactatggaaaacatagacattatgcttttatatgctattcagatttcaaatctttccaatttaccctggaatcagttttgagggagctgataaagactttagctgactcgttaagcctgatacataagccatatttaaaattctaagaaataattaatgttatgatatatcttgtagtatctattaaaatgtctctgggtcataaaatggattaaaatatgggagatcagtaggttatacttatatagatagtgatatatttcatttttaatttgtcatttttgatgtaaaatataatcactgctgtgataaataaactatctattgatcatttatcattttaaaaaaaaaaa

SEQ ID NO: 417869 - DNA, 1144 bp, Homo sapiens
cggtctgcctggtctctctaaccgcgccagtgtgcctccgactcggaacggcttccgcggccggggcagcgagggccgggggcggcgggcgggatgagtgcggtgtgcggtggagcggcgcggatgctgcggacgccgggacgccacggctacgccgccgagttctccccgtacctgccgggccgcctggcctgcgccaccgcgcagcactacggcatcgcgggctgtggaaccctactaatattggatccagatgaagctgggctaaggctttttagaagctttgactggaatgatggtttgtttgatgtgacttggagtgagaacaacgaacatgtcctcatcacctgtagtggcgatggctcgctgcagctctgggacactgccaaagctgcagggccactgcaagtctataaagaacacgctcaggaggtgtatagtgttgattggagccaaaccagaggtgaacagcttgtggtgtctggctcatgggatcaaactgtcaaattgtgggatccaactgttggaaagtctctgtgcacctttagaggccatgaaagtattatttatagcacaatctggtctccccacatccctggttgttttgcttcagcctcaggtgatcagactctgagaatatgggatgtgaaggcagcaggagtaagaatcgtgattcctgcacatcaggcagaaatcttgagttgtgactggtgtaaatacaatgagaatttgctggtgaccggggcggttgactgtagtttgagaggctgggacttaaggaatgtacgacaaccagtgtttgaacttcttggtcatacctatgctattaggagggtgaaattttcaccatttcatgcttctgtgctggcctcttgctcgtatgattttactgtaagattctggaacttttcaaagcctgactctcttcttgaaacagtggagcatcatacagagtttacttgtggtttagacttcagtcttcagagccccactcaggtggctgactgttcttgggatgaaacaataaagatctatgaccctgcttgtcttactattcctgcttgagatacactactttggtcagaaacagaggatgttggctgaagaactgcctaacagcaaataaattaactatggaaaacat

SEQ ID NO: 417870 - DNA, 1316 bp, Homo sapiens
cggtctgcctggtctctctaaccgcgccagtgtgcctccgactcggaacggcttccgcggccggggcagcgagggccgggggcggcgggcgggatgagtgcggtgtgcggtggagcggcgcggatgctgcggacgccgggacgccacggctacgccgccgagttctccccgtacctgccgggccgcctggcctgcgccaccgcgcagcactacggcatcgcgggctgtggaaccctactaatattggatccagatgaagctgggctaaggctttttagaagctttgactggaatgatggtttgtttgatgtgacttggagtgagaacaacgaacatgtcctcatcacctgtagtggcgatggctcgctgcagctctgggacactgccaaagctgcagggccactgcaagtctataaagaacacgctcaggagtatgttcagggaagctgtgttgtgaaatagaagagcaactaatgggtcattttcttctgtggaagagagtatataataaagacgtatagcatggttttagtcaatcttggatttgaatcccagctttaatttgctggtgaccggggcggttgactgtagtttgagaggctgggacttaaggaatgtacgacaaccagtgtttgaacttcttggtcatacctatgctattaggagggtgaaattttcaccatttcatgcttctgtgctggcctcttgctcgtatgattttactgtaagattctggaacttttcaaagcctgactctcttcttgaaacagtggagcatcatacagagtttacttgtggtttagacttcagtcttcagagccccactcaggtggctgactgttcttgggatgaaacaataaagatctatgaccctgcttgtcttactattcctgcttgagatacactactttggtcagaaacagaggatgttggctgaagaactgcctaacagcaaataaattaactatggaaaacatagacattatgcttttatatgctattcagatttcaaatctttccaatttaccctggaatcagttttgagggagctgataaagactttagctgactcgttaagcctgatacataagccatatttaaaattctaagaaataattaatgttatgatatatcttgtagtatctattaaaatgtctctgggtcataaaatggattaaaatatgggagatcagtaggttatacttatatagatagtgatatatttcatttttaatttgtcatttttgatgtaaaatataatcactgctgtgataaataaactatctattgatcatttatcattttaaaaaaaaaaa

SEQ ID NO: 417871 - DNA, 1206 bp, Homo sapiens
cggtctgcctggtctctctaaccgcgccagtgtgcctccgactcggaacggcttccgcggccggggcagcgagggccgggggcggcgggcgggatgagtgcggtgtgcggtggagcggcgcggatgctgcggacgccgggacgccacggctacgccgccgagttctccccgtacctgccgggccgcctggcctgcgccaccgcgcagcactacggcatcgcgggctgtggaaccctactaatattggatccagatgaagctgggctaaggctttttagaagctttgactggaatgatggtttgtttgatgtgacttggagtgagaacaacgaacatgtcctcatcacctgtagtggcgatggctcgctgcagctctgggacactgccaaagctgcagggccactgcaagtctataaagaacacgctcaggaggtgtatagtgttgattggagccaaaccagaggtgaacagcttgtggtgtctggctcatgggatcaaactgtcaaattgtgggatccaactgttggaaagtctctgtgcacctttagaggccatgaaagtattatttatagcacaatctggtctccccacatccctggttgttttgcttcagcctcagattctggaacttttcaaagcctgactctcttcttgaaacagtggagcatcatacagagtttacttgtggtttagacttcagtcttcagagccccactcaggtggctgactgttcttgggatgaaacaataaagatctatgaccctgcttgtcttactattcctgcttgagatacactactttggtcagaaacagaggatgttggctgaagaactgcctaacagcaaataaattaactatggaaaacatagacattatgcttttatatgctattcagatttcaaatctttccaatttaccctggaatcagttttgagggagctgataaagactttagctgactcgttaagcctgatacataagccatatttaaaattctaagaaataattaatgttatgatatatcttgtagtatctattaaaatgtctctgggtcataaaatggattaaaatatgggagatcagtaggttatacttatatagatagtgatatatttcatttttaatttgtcatttttgatgtaaaatataatcactgctgtgataaataaactatctattgatcatttatcattttaaaaaaaaaaa

SEQ ID NO: 417872 - DNA, 620 bp, Homo sapiens
gtcactgtgtcacacaggctggaatgcagtggtacgtcatggctcattgtagcttcaacttcctgggtgcaaacgatcctcccatctcaagcctccactcccaccctaccctactgaatagctgggactacaggtggctgactgttcttgggatgaaacaataaagatctatgaccctgcttgtcttactattcctgcttgagatacactactttggtcagaaacagaggatgttggctgaagaactgcctaacagcaaataaattaactatggaaaacatagacattatgcttttatatgctattcagatttcaaatctttccaatttaccctggaatcagttttgagggagctgataaagactttagctgactcgttaagcctgatacataagccatatttaaaattctaagaaataattaatgttatgatatatcttgtagtatctattaaaatgtctctgggtcataaaatggattaaaatatgggagatcagtaggttatacttatatagatagtgatatatttcatttttaatttgtcatttttgatgtaaaatataatcactgctgtgataaataaactatctattgatcatttatcattttaaaaaaaaaaa

SEQ ID NO: 417873 - DNA, 503 bp, Homo sapiens
atacgtttcttcttacttcatttttgttttctaggtggctgactgttcttgggatgaaacaataaagatctatgaccctgcttgtcttactattcctgcttgagatacactactttggtcagaaacagaggatgttggctgaagaactgcctaacagcaaataaattaactatggaaaacatagacattatgcttttatatgctattcagatttcaaatctttccaatttaccctggaatcagttttgagggagctgataaagactttagctgactcgttaagcctgatacataagccatatttaaaattctaagaaataattaatgttatgatatatcttgtagtatctattaaaatgtctctgggtcataaaatggattaaaatatgggagatcagtaggttatacttatatagatagtgatatatttcatttttaatttgtcatttttgatgtaaaatataatcactgctgtgataaataaactatctattgatcattta

SEQ ID NO: 417874 - DNA, 1483 bp, Homo sapiens
cggtctgcctggtctctctaaccgcgccagtgtgcctccgactcggaacggcttccgcggccggggcagcgagggccgggggcggcgggcgggatgagtgcggtgtgcggtggagcggcgcggatgctgcggacgccgggacgccacggctacgccgccgagttctccccgtacctgccgggccgcctggcctgcgccaccgcgcagcactacggcatcgcgggctgtggaaccctactaatattggatccagatgaagctgggctaaggctttttagaagctttgactggaatgatggtttgtttgatgtgacttggagtgagaacaacgaacatgtcctcatcacctgtagtggcgatggctcgctgcagctctgggacactgccaaagctgcagggccactgcaagtctataaagaacacgctcaggaggtgtatagtgttgattggagccaaaccagaggtgaacagcttgtggtgtctggctcatgggatcaaactgtcaaattgtgggatccaactgttggaaagtctctgtgcacctttagaggccatgaaagtattatttatagcacaatctggtctccccacatccctggttgttttgcttcagcctcaggtgatcagactctgagaatatgggatgtgaaggcagcaggagtaagaatcgtgattcctgcacatcaggcagaaatcttgagttgtgactggtgtaaatacaatgagaatttgctggtgaccggggcggttgactgtagtttgagaggctgggacttaaggaatgtacgacaaccagtgtttgaacttcttggtcatacctatgctattaggagggtgaaattttcaccatttcatgcttctgtgctggcctcttgctcgtatgattttactgtaagattctggaacttttcaaagcctgactctcttcttgaaacagtggagcatcatacagagtttacttgtggtttagacttcagtcttcagagccccactcaggtggctgactgttcttgggatgaaacaataaagatctatgaccctgcttgtcttactattcctgcttgagatacactactttggtcagaaacagaggatgttggctgaagaactgcctaacagcaaataaattaactatggaaaacatagacattatgcttttatatgctattcagatttcaaatctttccaatttaccctggaatcagttttgagggagctgataaagactttagctgactcgttaagcctgatacataagccatatttaaaattctaagaaataattaatgttatgatatatcttgtagtatctattaaaatgtctctgggtcataaaatggattaaaatatgggagatcagtaggttatacttatatagatagtgatatatttcatttttaatttgtcatttttgatgtaaaatataatcactgctgtgataaataaactatctattgatcatttatcattttaaaaaaaaaaa

SEQ ID NO: 417875 - DNA, 689 bp, Homo sapiens
cggtctgcctggtctctctaaccgcgccagtgtgcctccgactcggaacggcttccgcggccggggcagcgagggccgggggcggcgggcgggatgagtgcggtgtgcggtggagcggcgcggatgctgcggacgccgggacgccacggctacgccgccgagttctccccgtacctgccgggccgcctggcctgcgccaccgcgcagcactacggcatcgcgggctgtggaaccctactaatattggatccagatgaagctgggctaaggctttttagaagctttgactggaatgatggtttgtttgatgtgacttggagtgagaacaacgaacatgtcctcatcacctgtagtggcgatggctcgctgcagctctgggacactgccaaagctgcagggccactgcaagtctataaagaacacgctcaggagtatgttcagggaagctgtgttgtgaaatagaagagcaactaatgggtcattttcttctgtggaagagagtatataataaagacgtatagcatggttttagtcaatcttggatttgaatcccagctttgtaagttacctgttgtgagaccttgcgtatgtcacatatttttcctaaacttgagtgtttttatttgcaaactaagtttattagtagtctgtatcacagaccagcattgaataaatatgagctagtatta

SEQ ID NO: 417876 - DNA, 1075 bp, Homo sapiens
cggtctgcctggtctctctaaccgcgccagtgtgcctccgactcggaacggcttccgcggccggggcagcgagggccgggggcggcgggcgggatgagtgcggtgtgcggtggagcggcgcggatgctgcggacgccgggacgccacggctacgccgccgagttctccccgtacctgccgggccgcctggcctgcgccaccgcgcagcactacggcatcgcgggctgtggaaccctactaatattggatccagatgaagctgggctaaggctttttagaagctttgactggaatgatggtttgtttgatgtgacttggagtgagaacaacgaacatgtcctcatcacctgtagtggcgatggctcgctgcagctctgggacactgccaaagctgcagggccactgcaagtctataaagaacacgctcaggagttttcaccatttcatgcttctgtgctggcctcttgctcgtatgattttactgtaagattctggaacttttcaaagcctgactctcttcttgaaacagtggagcatcatacagagtttacttgtggtttagacttcagtcttcagagccccactcaggtggctgactgttcttgggatgaaacaataaagatctatgaccctgcttgtcttactattcctgcttgagatacactactttggtcagaaacagaggatgttggctgaagaactgcctaacagcaaataaattaactatggaaaacatagacattatgcttttatatgctattcagatttcaaatctttccaatttaccctggaatcagttttgagggagctgataaagactttagctgactcgttaagcctgatacataagccatatttaaaattctaagaaataattaatgttatgatatatcttgtagtatctattaaaatgtctctgggtcataaaatggattaaaatatgggagatcagtaggttatacttatatagatagtgatatatttcatttttaatttgtcatttttgatgtaaaatataatcactgctgtgataaataaactatctattgatcatttatcattttaaaaaaaaaaa

SEQ ID NO: 417877 - DNA, 1429 bp, Homo sapiens
  misc_feature (1)..(1): n is a, c, g, or t
  misc_feature (3)..(3): n is a, c, g, or t
ngnggaacttgcctcatgtgtgtgtatgtgtgtgtgtgtgattgtgggtgtgggtagtttaacctttttatatcttagctgcctgtaaactcagtgattgctacgttcagatcaaaccttgaactttttttttctggtgccaggagccttcctgtgctccccattgcctgccagaaccaccaccgtttcccatggttactctacagcagcttcactgcctgaaaatgaaaactgaacaaagggattaaattgtgagaacaactgtcaatctattatatatttgtacaatctggtattaaaatgctttccccaaaagatattctgcgaaaagatctgaagttggtccatggttatcccatgacctgtgcttttgcaagcaactgggaaaaaattgaacagttccatagcagaccagatgacattgtgatagccacttatcctaaatcaggtactacttgggttagtgaaattatagacatgattctaaatgatggagatattgaaaaatgtaagcgaggttttattactgaaaaagttccaatgttggaaatgactctccctggattaagaacatcaggtatagaacaattggagaagaatccatcaccccggattgtgaaaacacatctaccgactgatcttcttcctaaatctttctgggaaaacaattgcaagatgatttatctggctcgtaatgccaaggatgtttcagtctcatattaccattttgacttaatgaataatttacagccttttcctggtacctgggaagaatatctggagaaattcttaactggaaaagtggcctatggttcctggtttactcatgttaaaaactggtggaagaaaaaggaagaacacccaatactttttttgtactatgaagatatgaaagagaatccaaaggaggaaatcaagaagatcattagatttctagagaagaacctgaatgatgagatcttggataggatcatccatcacacctcatttgaagtgatgaaggacaatcctttggtaaattatacacatctaccaactacagtgatggatcatagcaaatccccttttatgcgtaaagggacggctggtgactggaagaattacttcaccgtggcccaaaatgagaaatttgatgctatttatgagacagaaatgtccaaaactgcacttcaattccgcacagagatttaaagtgtctaaatcacaaatctgaagaaataagagattgtctgtagttgattgaaacgagggcagttatgaattgatttgggcaatcaaatgaatttataaaggagaataatatgcttttaatatgttgattcttttcaatgttattaatcagatcccagttttgttcctttgattctgagtttccaaattctctaaggctaaagttcattgttaactttttgtaacaaaggaacaatgt

SEQ ID NO: 417878 - DNA, 1298 bp, Homo sapiens
  misc_feature (1)..(1): n is a, c, g, or t
  misc_feature (3)..(3): n is a, c, g, or t
ngnggaacttgcctcatgtgtgtgtatgtgtgtgtgtgtgattgtgggtgtgggtagtttaacctttttatatcttagctgcctgtaaactcagtgattgctacgttcagatcaaaccttgaactttttttttctggtgccaggagccttcctgtgctccccattgcctgccagaaccaccaccgtttcccatggttactctacagcagcttcactgcctgaaaatgaaaactgaacaaagggattaaattgtgagaacaactgtcaatctattatatatttgtacaatctggtattaaaatgctttccccaaaagatattctgcgaaaagatctgaagttggtccatggttatcccatgacctgtgcttttgcaagcaactgggaaaaaattgaacagttccatagcagaccagatgacattgtgatagccacttatcctaaatcaggtactacttgggttagtgaaattatagacatgattctaaatgatggagatattgaaaaatgtaagcgaggttttattactgaaaaagttccaatgttggaaatgactctccctggattaagaacatcaggtatagaacaattggagaagaatccatcaccccggattgtgaaaacacatctaccgactgatcttcttcctaaatctttctgggaaaacaattgcaagatgatttatctggctcgtaatgccaaggatgtttcagtctcatattaccattttgacttaatgaataatttacagccttttcctggtacctgggaagaatatctggagaaattcttaactggaaaagtggcctatggttcctggtttactcatgttaaaaactggtggaagaaaaaggaagaacacccaatactttttttgtactatgaagatatgaaagagaatccaaaggaggaaatcaagaagatcattagatttctagagaagaacctgaatgatgagatcttggataggatcatccatcacacctcatttgaagtgatgaaggacaatcctttggtaaattatacacatctaccaactacagtgatggatcatagcaaatccccttttatgcgtaaagggacggctggtgactggaagaattacttcaccgtggcccaaaatgagaaatttgatgctatttatgagacagaaatgtccaaaactgcacttcaattccgcacagagatttaaagtgtctaaatcacaaatctgaagaaataagagattgtctgtagttgattgaaacgagggcagttatgaattgatttgggcaatcaaatgaatttataaaggagaat

SEQ ID NO: 417879 - DNA, 390 bp, Homo sapiens
cttttttgttagtctgtaaaatcatttccaggtaaaatctagagcttaatccatatgttgtgccatcttttgcttttccacacctctgatcctaggtaagttagagctaacgagtatttgctgagcttctattatgggcccagcatatgttataatttcttttacacataggaatctgaggcttagagaagtttactgatttacctaatggcacaccataagtgctggggctaagatttaaactcaggtctcctgacttaattcagatggtcagctcgatggtaatcataataatattgttgttgttgttgttgttgttatttatcaacaatagtagtagctaagtcatttcatgaaacagctcattgatagtccatttgataattctga

SEQ ID NO: 417880 - DNA, 742 bp, Homo sapiens
ccacaggggaagtattttgacaacattaagatgccgtggctgtgcactgtactgaacttctgaccattaggtgtattgataccactgaaactgtgtaacattgtctcccttttctgtcttccctatgcttctgttggatgtgatatttcatttgagagtcatcgtcagtaacctgtgtaccttctcaaaacctatgtctgttgcactgaggatgaaaatccaacactaacaaatgttctttgggctaaaaataaagatcatttaaatacatggttttccaagaagggttgaacctgccacagggttgtgctactgtaatgtctccatgcgtcacttggactaaatctctctaattccattgattagagtcacaaatgggttataatatgttaagttccaatatttttctgacttgattggaacctgcttctctgtgaggctatttttgtaatgagttttttgtacttaatttaactgccgcggtctttggtgggggtgggaagggattttgttcttttgttgtttattgttaatgctctcctatgccagcctgtcattgttccagttgtttgaaaaaacaaaacaaaacaaaacaaaaaaggatgcattcgttgtctgggttctcgagtcaccttatggctgtctaaaaatgtcactgttccgattgcggtctctgcagccttatttgagtgttgccttagactgtctgactggacaaataaactctctttgccctatgtta

SEQ ID NO: 417881 - DNA, 1041 bp, Homo sapiens
aacacatttcatctgggcttcttaaatctaaatctttaaaatgactaagttttcttccttttctctgtttttcctaatagttggggcttatatgactcatgtgtgtttcaatatggaaattattggagggaaagaagtgtcacctcattccaggccatttatggcctccatccagtatggcggacatcacgtttgtggaggtgttctgattgatccacagtgggtgctgacagcagcccactgccaatatcggtttaccaaaggccagtctcccactgtggttttaggcgcacactctctctcaaagaatgaggcctccaaacaaacactggagatcaaaaaatttataccattctcaagagttacatcagatcctcaatcaaatgatatcatgctggttaagcttcaaacagccgcaaaactcaataaacatgtcaagatgctccacataagatccaaaacctctcttagatctggaaccaaatgcaaggttactggctggggagccaccgatccagattcattaagaccttctgacaccctgcgagaagtcactgttactgtcctaagtcgaaaactttgcaacagccaaagttactacaacggcgacccttttatcaccaaagacatggtctgtgcaggagatgccaaaggccagaaggattcctgtaagggtgactcagggggccccttgatctgtaaaggtgtcttccacgctatagtctctggaggtcatgaatgtggtgttgccacaaagcctggaatctacaccctgttaaccaagaaataccagacttggatcaaaagcaaccttgtcccgcctcatacaaattaagttacaaataattttattggatgcacttgcttcttttttcctaatatgctcgcaggttagagttgggtgtaagtaaagcagagcacatatggggtccatttttgcacttgtaagtcattttattaaggaatcaagttctttttcacttgtatcactgatgtatttctaccatgctggttttattctaaataaaatttagaagactc

SEQ ID NO: 417882 - DNA, 1477 bp, Homo sapiens
aacacatttcatctgggcttcttaaatctaaatctttaaaatgactaagttttcttccttttctctgtttttcctaatagttggggcttatatgactcatgtgtgtttcaatatggaaattattggagggaaagaagtgtcacctcattccaggccatttatggcctccatccagtatggcggacatcacgtttgtggaggtgttctgattgatccacagtgggtgctgacagcagcccactgccaatatcggtttaccaaaggccagtctcccactgtggttttaggcgcacactctctctcaaagaatgaggcctccaaacaaacactggagatcaaaaaatttataccattctcaagagttacatcagatcctcaatcaaatgatatcatgctggttaagcttcaaacagccgcaaaactcaataaacatgtcaagatgctccacataagatccaaaacctctcttagatctggaaccaaatgcaaggttactggctggggagccaccgatccagattcattaagaccttctgacaccctgcgagaagtcactgttactgtcctaagtcgaaaactttgcaacagccaaagttactacaacggcgacccttttatcaccaaagacatggtctgtgcaggagatgccaaaggccagaaggattcctgtaagggtgactcagggggccccttgatctgtaaaggtgtcttccacgctatagtctctggaggtcatgaatgtggtgttgccacaaagcctggaatctacaccctgttaaccaagaaataccagacttggatcaaaagcaaccttgtcccgcctcatacaaattaagttacaaataattttattggatgcacttgcttcttttttcctaatatgctcgcaggttagagttgggtgtaagtaaagcagagcacatatggggtccatttttgcacttgtaagtcattttattaaggaatcaagttctttttcacttgtatcactgatgtatttctaccatgctggttttattctaaataaaatttagaagactctctgtttgtcttttatcacatgaagtaatatctgcccccattgcacccacactcgccaaagggcaataaggtcactgaataaaacagtaatggtaccaccttcaactaggtgtaacttctgctggatcatcctaagttgttgggttgttttcttttcattgttgtgataacattgaacatgagataggcccttgcaacaaatgtttaagggtatgatacattattgttaactataggcatgatcttgcagtgcagatctctagaactgcttcatctcatataaatgaaactttatgccagttgaatagcagctctctatttccccaccacccccatcctctggcaaccccattctactctaagcttctatgagtttgtattttttaaatataaatcataaatataaatatcctaattcaagcaagcagcttataca

SEQ ID NO: 417883 - DNA, 868 bp, Homo sapiens
aaccctctcgaccatcaccactccccactgggggatttggaaatcattctgctgctttcattgtctttgctttttttaggtttaccaaaggccagtctcccactgtggttttaggcgcacactctctctcaaagaatgaggcctccaaacaaacactggagatcaaaaaatttataccattctcaagagttacatcagatcctcaatcaaatgatatcatgctggttaagcttcaaacagccgcaaaactcaataaacatgtcaagatgctccacataagatccaaaacctctcttagatctggaaccaaatgcaaggttactggctggggagccaccgatccagattcattaagaccttctgacaccctgcgagaagtcactgttactgtcctaagtcgaaaactttgcaacagccaaagttactacaacggcgacccttttatcaccaaagacatggtctgtgcaggagatgccaaaggccagaaggattcctgtaagggtgactcagggggccccttgatctgtaaaggtgtcttccacgctatagtctctggaggtcatgaatgtggtgttgccacaaagcctggaatctacaccctgttaaccaagaaataccagacttggatcaaaagcaaccttgtcccgcctcatacaaattaagttacaaataattttattggatgcacttgcttcttttttcctaatatgctcgcaggttagagttgggtgtaagtaaagcagagcacatatggggtccatttttgcacttgtaagtcattttattaaggaatcaagttctttttcacttgtatcactgatgtatttctaccatgctggttttattctaaataaaatttagaagactc

SEQ ID NO: 417884 - DNA, 828 bp, Homo sapiens
gtcagttaatggacatttgaattgttaccactttttggctattacgaagcatgttgctgcgaacattcttgtacagtttttttgtggagatgtagttaaatttaattccacagccacttctgggataggtcctaatctttactcatttcatcctcgaggaaaagccttgcagacctgaagtaacttatgtcaggacacatagttcctgccaggtggaatggggtcctaaaccctggtcaggacacatagttcctgccaggtggaatggggtcctaaaccctggtcaggacacatagttcctgccaggtggaatggggtcctaaaccctggtcctaccagtcttctttaatggtcacaagtctgtaagttacacagaagctccctatcattcactaccccatctactgcatctaacccagtgccagttggcccacaacaaatacttgttacaggggtgaatgagtggtggtctgtcttcttaggacctagaacaagagcgtcactctagtcttggatgcgccctgtgcctgtggctgcttgtctgggggcttctagggcaagtgtcttgtctaaatgttgatcactgaataaaatgggcccagcctggcttgccttctcttacccttgaacctgggttaggaccgcagagagcagcatttggcctttcccatgctcctcaaggccttcacagtgtctggtaactgccagctctcagacattgggcagacctggtcatctttactagagctgccctcaaaggaaccccaggaggaggtggccccgttacccactgccccttcctgcatgaggtgtctacatccctgacct

SEQ ID NO: 417885 - DNA, 385 bp, Homo sapiens
ctggaatacgagaactaagcgattgactttgctttccctaaaagataaacagggtagttgtagttgcaacagagtagatagaggtaggtctaccctgggtttaaagtggagatcacagccggggaaaaccggactggatcccgaggcctcctccagggaggggcggcaggggtgtctcaaaatctcccacctgtcagcccaacttttggattccttgtcaccttccacactgcccgagctccggacatacagccctggtgcacaagggtcccattctttgcacaccaggggtataatggactccggactgttggcgagagtgacagcaaaaagagccagcctcttctcccaggcttcttagcaacctgcctgtctcggctccagg

SEQ ID NO: 417886 - DNA, 561 bp, Homo sapiens
atatttgttgaagcaatgaagaatggatctgtaaaatggggacagagaaccagatctctcaagacctttctagacctcatcttctatgtagacagatgaatctgggaactagtgttgaatttgaagacacacacagacctgcttcacagcccttttctagtctttagtcattttattatactttttgccatctgtcttgtattgccatttgaaaccattctagtgaatgaaatataaattatgttcttatttgtttctaggaagcaagatttccagatgtagcaaatgggtttattgaggaaataattcattttaagaattattatgatctgaatgtctctctttggataatctgggttttccagaagaaaattacaaagtacattcagatcataatggtgtttccctttgtcttgaacgtagtttctgttgtgagattatggtacatggatgctaatcagtagatccatatattaacctgaaggaaaacttccttggcatttctgcacgtggagagtgtataaatggtagtttggtggtaaattcataactttttttttg

SEQ ID NO: 417887 - DNA, 178 bp, Homo sapiens
acagccttgcttagtccgggctccgaggcagcagcagccataagaaaaaacaggagaggaaggcgatgtggcgcttctgccgggccctcagactggggagtgtgaggtcaggacaggctggcgtgtcgttttcgtctctgtggctgctggacgtgtgaatgtgtggttcaaaccttgg

SEQ ID NO: 417888 - DNA, 5605 bp, Homo sapiens
cgcggagggccggaaggagtgcagcggctgccacggagctcgcagctgcggcttctgaggagtaagcggcgcggtagcgaaggccgccgaacctgcctggctagccggcgacttgagtgacgactcttttgaaacagatggtcaccatgtttagatattagcagtcccatatatgcatgtctgcatttgaaaatggaagagggaaacaacaatgaagaggtaattcacttgaacaactttcactgccatcggggacaagagtggatcaatctccgagatgggcccatcaccatatctgactcctcagatgaggaaaggattccaatgctggtcaccccagctcctcagcagcatgaagaagaggacctggatgatgatgtcatcctgacagaagatgattctgaggatgactacggtgaatttctggatcttgggcctcctggaatctctgaattcactaagccaagtggccaaacagaaagagaacccaagcctggaccgagtcataaccaagcagcaaatgacattgtcaaccccagatcagagcagaaagtcatcatcttggaagaaggtagccttctttacacagaaagcgatcctttggaaactcagaaccagtcatccgaagactcagagacagagctgttatcaaatctaggagagtcagctgctctagcagatgatcaggccatcgaagaagactgctggttagatcatccttacttccagtctctgaaccaacagccccgtgaaataacaaaccaggtcgttcctcaggaacggcagcctgaagcagaactgggccgcttgttgtttcagcatgaattcccagggcccgcttttccaaggccggaaccccagcaaggtgggatttcaggcccctcttctcctcagcctgcccatcctctaggagagtttgaagaccagcagttagcaagtgatgatgaagagccaggtccagcctttccaatgcaagaatctcaagagcccaatttggaaaacatttgggggcaagaagctgcagaggtagatcaagagctcgttgaactactagtgaaagaaacggaagcaagatttccagatgtagcaaatgggtttattgaggaaataattcattttaagaattattatgatctgaatgtactttgtaattttcttctggaaaacccagattatccaaagagagaagacagaatcattataaatcccagtagcagtctgctggccagccaagatgagacaaagttgcctaaaatagacttttttgactattctaaattgacccctcttgaccagcgctgcttcatccaagctgctgacctcctcatggccgacttcaaagtgctcagtagtcaggacatcaagtgggccctgcacgagctcaaaggacactatgcaatcacccgaaaggccttgtctgatgccattaaaaaatggcaggagctgtcaccagaaaccagtggaaaaaggaagaagagaaaacaaatgaaccagtattcttacattgatttcaagtttgaacaaggtgacataaaaatagaaaagaggatgttctttcttgaaaataagcgacgacattgtaggtcctatgaccgacgtgctctccttccagctgtgcaacaagagcaggagttctatgagcagaaaatcaaagagatggcagagcatgaagactttttgcttgccctacagatgaatgaagaacagtatcaaaaggatggccagctgattgagtgtcgctgctgctatggggaatttccattcgaggagctgacgcagtgcgcagatgctcacttgttctgcaaagagtgtctcatcagatatgcccaagaggcagtctttggatctggaaagttggagctcagctgcatggaaggcagctgcacgtgttcgttcccaaccagtgagctggagaaggtgctcccccagaccatcctgtataagtactatgagcgaaaagccgaggaggaggttgcggcagcctacgccgacgagcttgtcaggtgcccgtcctgtagctttccggctctgttggacagtgatgtgaagaggttcagctgtcctaatcctcactgccgaaaggaaacctgtaggaagtgtcagggactctggaaagaacataatggcctcacctgtgaagagctggctgaaaaagacgacatcaagtaccgtacctctattgaagaaaaaatgactgctgcccgcattagaaaatgccacaagtgtgggactggcctcatcaaatctgaaggctgcaaccgcatgtcttgccgctgtggtgcccagatgtgctacctctgtcgagtttctattaatggatatgaccatttctgccaacatccccgctcaccaggagccccttgccaggagtgttcaagatgctctctctggaccgatcccactgaagatgatgagaagcttattgaggaaatccagaaggaggctgaagaggaacagaaaagaaagaatggagagaacaccttcaaacgcattggacccccgctggagaagcctgtggagaaggtgcagagggtggaggccctcccgaggcccgttccgcagaacctgccacagccacagatgccaccctatgccttcgcgcacccacccttccccctgcctcccgtgcggcctgtgttcaacaacttcccactcaacatggggcctatcccagccccgtacgtgccccctctgcccaacgtgcgggtcaactatgacttcggtcccatccacatgcccctggagcacaacctgcccatgcactttggcccccagccgcggcatcgcttctgatggccccgaatccccattgagcagcacaaagcccgtttggggtaggagtgtggatggagaaccctcccccaaggctggtgtctgtaccattgcatcctaagtcagcttgaagggtaggctggttttcttcccacccctttcctagaagggctactgctcctggaagagtggacggatccataataaagacgtcccaaatggtggagttcggagagagctgcgatgtgaactgcccctcccctcgcatcccccaggccaccaacggcagtccttctgccttgtccatggcataggccatagaccaggtccctgctgctcacacctgggcctctcctcggagccgacccctgggtagcaaggcagccgagagcatctccctggaggggcccacggttgggccaagggcagagggggctgcacctgcgggcctgggaagcattgctcagggtggggggctgggaccatggcccgcagaggcactgccacagctgtgagggccaagatgctgtccccccatccaaaacccgtgcgccactgcagtgagtgttgagggcacctctcctcccctcttacacctactcagatgaggcagcagcagacccatctcgcggcgggggttttgttctgttgccgcctaactttctcatcctcggtctctggaaagtcaggctgagaaatcctttcccaggccaggccgctgcggtacactggatggttctgaagctggcccattgaaagagcctcttaaggcagctgggacagaggcctggtggccctgctgggcagcccaactgctgggggagacgtttctgccaccctgggtgatgagcagcttttcccccctggctttctgggggaggagtgggcctccttagggagacaggtgaccctgggtgccacccctgccccgtgtgtgccccgggtgttctcagtggttgctgaaggcaggtagagggtgctgtccagtatcccccatgtgaaggtcacttcccttctcatggagtcagctgagcatcagctcagccctgccatgtccccactcaccctcctcgcctcctgtccggccctgggtttctagcggtgcctgaggcatcactctggcccattgacagatgagaggtctgaagccttcctggccacaggcatcactttctcctcctcctcatgccctgccttgtccttgtcgtgttgccatggggttctgagaggctgggagttcacagacctcagacacagctgagtccgacaaccattggggtggggctgcatcagtctccggagtggcccgccacctcctgaagcagggcctggcccacccaaggtgcctggggcaggcgggcaccgtcattcgctgccattggcttctcagatgtatttcaaggactaaagtgggctctaagatctaagatggcccggcgcggtggctcccgcctgtaatcccagcactttgggaggccgaggcgggcggatgagttgaggtcgggagtttgagtccccgtctctactaaaaatacaaaattagccggacaaggtggcgcatgcctataatcccaggtactcaggaggctgaggcaggagaatcacttgaacctgggaggcagaggttgcagtgagccaagattgtgccactgcactccagcctgagcaacaaaagcaaaactctatctttaaaaaaaaaaaaaaaaaaactaagatacccattctttctgcctttgcccaggatggaggctttgaagacaggtggtcacctggacctggggtaagggtgcgcagggaggccgggcttgggggcagcctgctgctatgtccttgctggcgcccatacctgttggactgcctgaactttgctactagcctgaacgacagtgccttggaaaggcaggctccatgcggcacaacaggattgtcttcggtaccttaaatatgctccctgtgcttccccagggaggatctctgggagcagagggcggctgtagacatcacagctgaagaggtgacctcaggccctgggagcctcagctccctctgccctgtaccctaggcacgtggctccagcaagagccccaggcaggacaaagggagcaggcagcagctgcagaaacagccctagacaggtgctggcctcaaccctggcaggggagggggagcccagagtgatgtttctcctaaggccaaaccccaggggtgggtcatttgagaggagttccagctgttctggccacactgggctggtggggaaggagcggcggcctctttccttggagggtccctgattcctgaggatcctccccgagccaggcacgggggaccacagggctgccgtgagcacccaccctggttctccaggcccctctgtccagaggcagggcctgaacctcgggctcctgcctggaccagtgacagcattggggagagaagcactgggggtcttcagaccagccagcaaggggccgtgccagtgcccagagagcaggtcagacaacaggcaaccctgaggcagctggctccctctctctgccctgcagggcttgccgcagggcgtgaggctccccagccacagccccctcttacttgccttaaaactggagagaggaatctagtatttgcacttagcaaaatatttaaaaactgaaaaaaatgtgcatgatctgtcactttgtataaaaacaagaaacgattagttcattaaactttttctttaccttctggtagtaaaaatagataaaataattccgtttcaactactgtgtgtaaaaagcctgtatcatatgtaactgggacttttgtaaataaatgtttgtgcgctctgctc

SEQ ID NO: 417889 - DNA, 5776 bp, Homo sapiens
cgcggagggccggaaggagtgcagcggctgccacggagctcgcagctgcggcttctgaggagtaagcggcgcggtagcgaaggccgccgaacctgcctggctagccggcgacttgagtgacgactcttttgaaacagatggtcaccatgtttagatattagcagtcccatatatgcatgtctgcatttgaaaatggaagagggaaacaacaatgaagaggtaattcacttgaacaactttcactgccatcggggacaagagtggatcaatctccgagatgggcccatcaccatatctgactcctcagatgaggaaaggattccaatgctggtcaccccagctcctcagcagcatgaagaagaggacctggatgatgatgtcatcctgacagaaacaaataaacctcagagatcacgacccaatctcatcaaaccagctgcccagtggcaagatctgaaaaggttgggagaagaaaggcctaaaaagtctagagcagcatttgaatcagataagagcagctatttttcagtgtgtaacaacccattgtttgattctggggcacaggatgattctgaggatgactacggtgaatttctggatcttgggcctcctggaatctctgaattcactaagccaagtggccaaacagaaagagaacccaagcctggaccgagtcataaccaagcagcaaatgacattgtcaaccccagatcagagcagaaagtcatcatcttggaagaaggtagccttctttacacagaaagcgatcctttggaaactcagaaccagtcatccgaagactcagagacagagctgttatcaaatctaggagagtcagctgctctagcagatgatcaggccatcgaagaagactgctggttagatcatccttacttccagtctctgaaccaacagccccgtgaaataacaaaccaggtcgttcctcaggaacggcagcctgaagcagaactgggccgcttgttgtttcagcatgaattcccagggcccgcttttccaaggccggaaccccagcaaggtgggatttcaggcccctcttctcctcagcctgcccatcctctaggagagtttgaagaccagcagttagcaagtgatgatgaagagccaggtccagcctttccaatgcaagaatctcaagagcccaatttggaaaacatttgggggcaagaagctgcagaggtagatcaagagctcgttgaactactagtgaaagaaacggaagcaagatttccagatgtagcaaatgggtttattgaggaaataattcattttaagaattattatgatctgaatgtactttgtaattttcttctggaaaacccagattatccaaagagagaagacagaatcattataaatcccagtagcagtctgctggccagccaagatgagacaaagttgcctaaaatagacttttttgactattctaaattgacccctcttgaccagcgctgcttcatccaagctgctgacctcctcatggccgacttcaaagtgctcagtagtcaggacatcaagtgggccctgcacgagctcaaaggacactatgcaatcacccgaaaggccttgtctgatgccattaaaaaatggcaggagctgtcaccagaaaccagtggaaaaaggaagaagagaaaacaaatgaaccagtattcttacattgatttcaagtttgaacaaggtgacataaaaatagaaaagaggatgttctttcttgaaaataagcgacgacattgtaggtcctatgaccgacgtgctctccttccagctgtgcaacaagagcaggagttctatgagcagaaaatcaaagagatggcagagcatgaagactttttgcttgccctacagatgaatgaagaacagtatcaaaaggatggccagctgattgagtgtcgctgctgctatggggaatttccattcgaggagctgacgcagtgcgcagatgctcacttgttctgcaaagagtgtctcatcagatatgcccaagaggcagtctttggatctggaaagttggagctcagctgcatggaaggcagctgcacgtgttcgttcccaaccagtgagctggagaaggtgctcccccagaccatcctgtataagtactatgagcgaaaagccgaggaggaggttgcggcagcctacgccgacgagcttgtcaggtgcccgtcctgtagctttccggctctgttggacagtgatgtgaagaggttcagctgtcctaatcctcactgccgaaaggaaacctgtaggaagtgtcagggactctggaaagaacataatggcctcacctgtgaagagctggctgaaaaagacgacatcaagtaccgtacctctattgaagaaaaaatgactgctgcccgcattagaaaatgccacaagtgtgggactggcctcatcaaatctgaaggctgcaaccgcatgtcttgccgctgtggtgcccagatgtgctacctctgtcgagtttctattaatggatatgaccatttctgccaacatccccgctcaccaggagccccttgccaggagtgttcaagatgctctctctggaccgatcccactgaagatgatgagaagcttattgaggaaatccagaaggaggctgaagaggaacagaaaagaaagaatggagagaacaccttcaaacgcattggacccccgctggagaagcctgtggagaaggtgcagagggtggaggccctcccgaggcccgttccgcagaacctgccacagccacagatgccaccctatgccttcgcgcacccacccttccccctgcctcccgtgcggcctgtgttcaacaacttcccactcaacatggggcctatcccagccccgtacgtgccccctctgcccaacgtgcgggtcaactatgacttcggtcccatccacatgcccctggagcacaacctgcccatgcactttggcccccagccgcggcatcgcttctgatggccccgaatccccattgagcagcacaaagcccgtttggggtaggagtgtggatggagaaccctcccccaaggctggtgtctgtaccattgcatcctaagtcagcttgaagggtaggctggttttcttcccacccctttcctagaagggctactgctcctggaagagtggacggatccataataaagacgtcccaaatggtggagttcggagagagctgcgatgtgaactgcccctcccctcgcatcccccaggccaccaacggcagtccttctgccttgtccatggcataggccatagaccaggtccctgctgctcacacctgggcctctcctcggagccgacccctgggtagcaaggcagccgagagcatctccctggaggggcccacggttgggccaagggcagagggggctgcacctgcgggcctgggaagcattgctcagggtggggggctgggaccatggcccgcagaggcactgccacagctgtgagggccaagatgctgtccccccatccaaaacccgtgcgccactgcagtgagtgttgagggcacctctcctcccctcttacacctactcagatgaggcagcagcagacccatctcgcggcgggggttttgttctgttgccgcctaactttctcatcctcggtctctggaaagtcaggctgagaaatcctttcccaggccaggccgctgcggtacactggatggttctgaagctggcccattgaaagagcctcttaaggcagctgggacagaggcctggtggccctgctgggcagcccaactgctgggggagacgtttctgccaccctgggtgatgagcagcttttcccccctggctttctgggggaggagtgggcctccttagggagacaggtgaccctgggtgccacccctgccccgtgtgtgccccgggtgttctcagtggttgctgaaggcaggtagagggtgctgtccagtatcccccatgtgaaggtcacttcccttctcatggagtcagctgagcatcagctcagccctgccatgtccccactcaccctcctcgcctcctgtccggccctgggtttctagcggtgcctgaggcatcactctggcccattgacagatgagaggtctgaagccttcctggccacaggcatcactttctcctcctcctcatgccctgccttgtccttgtcgtgttgccatggggttctgagaggctgggagttcacagacctcagacacagctgagtccgacaaccattggggtggggctgcatcagtctccggagtggcccgccacctcctgaagcagggcctggcccacccaaggtgcctggggcaggcgggcaccgtcattcgctgccattggcttctcagatgtatttcaaggactaaagtgggctctaagatctaagatggcccggcgcggtggctcccgcctgtaatcccagcactttgggaggccgaggcgggcggatgagttgaggtcgggagtttgagtccccgtctctactaaaaatacaaaattagccggacaaggtggcgcatgcctataatcccaggtactcaggaggctgaggcaggagaatcacttgaacctgggaggcagaggttgcagtgagccaagattgtgccactgcactccagcctgagcaacaaaagcaaaactctatctttaaaaaaaaaaaaaaaaaaactaagatacccattctttctgcctttgcccaggatggaggctttgaagacaggtggtcacctggacctggggtaagggtgcgcagggaggccgggcttgggggcagcctgctgctatgtccttgctggcgcccatacctgttggactgcctgaactttgctactagcctgaacgacagtgccttggaaaggcaggctccatgcggcacaacaggattgtcttcggtaccttaaatatgctccctgtgcttccccagggaggatctctgggagcagagggcggctgtagacatcacagctgaagaggtgacctcaggccctgggagcctcagctccctctgccctgtaccctaggcacgtggctccagcaagagccccaggcaggacaaagggagcaggcagcagctgcagaaacagccctagacaggtgctggcctcaaccctggcaggggagggggagcccagagtgatgtttctcctaaggccaaaccccaggggtgggtcatttgagaggagttccagctgttctggccacactgggctggtggggaaggagcggcggcctctttccttggagggtccctgattcctgaggatcctccccgagccaggcacgggggaccacagggctgccgtgagcacccaccctggttctccaggcccctctgtccagaggcagggcctgaacctcgggctcctgcctggaccagtgacagcattggggagagaagcactgggggtcttcagaccagccagcaaggggccgtgccagtgcccagagagcaggtcagacaacaggcaaccctgaggcagctggctccctctctctgccctgcagggcttgccgcagggcgtgaggctccccagccacagccccctcttacttgccttaaaactggagagaggaatctagtatttgcacttagcaaaatatttaaaaactgaaaaaaatgtgcatgatctgtcactttgtataaaaacaagaaacgattagttcattaaactttttctttaccttctggtagtaaaaatagataaaataattccgtttcaactactgtgtgtaaaaagcctgtatcatatgtaactgggacttttgtaaataaatgtttgtgcgctctgctc

SEQ ID NO: 417890 - DNA, 3629 bp, Homo sapiens
acagccttgcttagtccgggctccgaggcagcagcagccataagaaaaaacaggagaggaaggcgatgtggcgcttctgccgggccctcagactggggagtgtgaggaaacctgtaggaagtgtcagggactctggaaagaacataatggcctcacctgtgaagagctggctgaaaaagacgacatcaagtaccgtacctctattgaagaaaaaatgactgctgcccgcattagaaaatgccacaagtgtgggactggcctcatcaaatctgaaggctgcaaccgcatgtcttgccgctgtggtgcccagatgtgctacctctgtcgagtttctattaatggatatgaccatttctgccaacatccccgctcaccaggagccccttgccaggagtgttcaagatgctctctctggaccgatcccactgaagatgatgagaagcttattgaggaaatccagaaggaggctgaagaggaacagaaaagaaagaatggagagaacaccttcaaacgcattggacccccgctggagaagcctgtggagaaggtgcagagggtggaggccctcccgaggcccgttccgcagaacctgccacagccacagatgccaccctatgccttcgcgcacccacccttccccctgcctcccgtgcggcctgtgttcaacaacttcccactcaacatggggcctatcccagccccgtacgtgccccctctgcccaacgtgcgggtcaactatgacttcggtcccatccacatgcccctggagcacaacctgcccatgcactttggcccccagccgcggcatcgcttctgatggccccgaatccccattgagcagcacaaagcccgtttggggtaggagtgtggatggagaaccctcccccaaggctggtgtctgtaccattgcatcctaagtcagcttgaagggtaggctggttttcttcccacccctttcctagaagggctactgctcctggaagagtggacggatccataataaagacgtcccaaatggtggagttcggagagagctgcgatgtgaactgcccctcccctcgcatcccccaggccaccaacggcagtccttctgccttgtccatggcataggccatagaccaggtccctgctgctcacacctgggcctctcctcggagccgacccctgggtagcaaggcagccgagagcatctccctggaggggcccacggttgggccaagggcagagggggctgcacctgcgggcctgggaagcattgctcagggtggggggctgggaccatggcccgcagaggcactgccacagctgtgagggccaagatgctgtccccccatccaaaacccgtgcgccactgcagtgagtgttgagggcacctctcctcccctcttacacctactcagatgaggcagcagcagacccatctcgcggcgggggttttgttctgttgccgcctaactttctcatcctcggtctctggaaagtcaggctgagaaatcctttcccaggccaggccgctgcggtacactggatggttctgaagctggcccattgaaagagcctcttaaggcagctgggacagaggcctggtggccctgctgggcagcccaactgctgggggagacgtttctgccaccctgggtgatgagcagcttttcccccctggctttctgggggaggagtgggcctccttagggagacaggtgaccctgggtgccacccctgccccgtgtgtgccccgggtgttctcagtggttgctgaaggcaggtagagggtgctgtccagtatcccccatgtgaaggtcacttcccttctcatggagtcagctgagcatcagctcagccctgccatgtccccactcaccctcctcgcctcctgtccggccctgggtttctagcggtgcctgaggcatcactctggcccattgacagatgagaggtctgaagccttcctggccacaggcatcactttctcctcctcctcatgccctgccttgtccttgtcgtgttgccatggggttctgagaggctgggagttcacagacctcagacacagctgagtccgacaaccattggggtggggctgcatcagtctccggagtggcccgccacctcctgaagcagggcctggcccacccaaggtgcctggggcaggcgggcaccgtcattcgctgccattggcttctcagatgtatttcaaggactaaagtgggctctaagatctaagatggcccggcgcggtggctcccgcctgtaatcccagcactttgggaggccgaggcgggcggatgagttgaggtcgggagtttgagtccccgtctctactaaaaatacaaaattagccggacaaggtggcgcatgcctataatcccaggtactcaggaggctgaggcaggagaatcacttgaacctgggaggcagaggttgcagtgagccaagattgtgccactgcactccagcctgagcaacaaaagcaaaactctatctttaaaaaaaaaaaaaaaaaaactaagatacccattctttctgcctttgcccaggatggaggctttgaagacaggtggtcacctggacctggggtaagggtgcgcagggaggccgggcttgggggcagcctgctgctatgtccttgctggcgcccatacctgttggactgcctgaactttgctactagcctgaacgacagtgccttggaaaggcaggctccatgcggcacaacaggattgtcttcggtaccttaaatatgctccctgtgcttccccagggaggatctctgggagcagagggcggctgtagacatcacagctgaagaggtgacctcaggccctgggagcctcagctccctctgccctgtaccctaggcacgtggctccagcaagagccccaggcaggacaaagggagcaggcagcagctgcagaaacagccctagacaggtgctggcctcaaccctggcaggggagggggagcccagagtgatgtttctcctaaggccaaaccccaggggtgggtcatttgagaggagttccagctgttctggccacactgggctggtggggaaggagcggcggcctctttccttggagggtccctgattcctgaggatcctccccgagccaggcacgggggaccacagggctgccgtgagcacccaccctggttctccaggcccctctgtccagaggcagggcctgaacctcgggctcctgcctggaccagtgacagcattggggagagaagcactgggggtcttcagaccagccagcaaggggccgtgccagtgcccagagagcaggtcagacaacaggcaaccctgaggcagctggctccctctctctgccctgcagggcttgccgcagggcgtgaggctccccagccacagccccctcttacttgccttaaaactggagagaggaatctagtatttgcacttagcaaaatatttaaaaactgaaaaaaatgtgcatgatctgtcactttgtataaaaacaagaaacgattagttcattaaactttttctttaccttctggtagtaaaaatagataaaataattccgtttcaactactgtgtgtaaaaagcctgtatcatatgtaactgggacttttgtaaataaatgtttgtgcgctctgctc

SEQ ID NO: 417891 - DNA, 3938 bp, Homo sapiens
ggcaaatttttgtatttttagtagagacagtttcaccatgttggtcaggctggtctcaaactcctgagctcaaatgatcttcctgctttggcctctcaaagttctgggattacaggcgtgcaccaccatgctcagcctgttctctccattttaagcctacagggattcctataacaaatagagcagtccttttctaaatgctgagtactgggcactatgccagggtactttatattttgtctgtaattctcaaaacaccatgagaaagttgtgttttcacagtttaaaaatgaggaaactgagtctccaggcaggtgagtaatttactgaaggtcatacaattaaaactttgaagcagttctcagactccaaaacctaggctcttttcactgtttaatgtcacaaaaaagccataagtgatcattttatgtgaaaataaataaatgcttaatggccatatttttttcctcctcatcttccctcccagctccaaattatgttttcttatttcagtgaagaaaaaatgactgctgcccgcattagaaaatgccacaagtgtgggactggcctcatcaaatctgaaggctgcaaccgcatgtcttgccgctgtggtgcccagatgtgctacctctgtcgagtttctattaatggatatgaccatttctgccaacatccccgctcaccaggagccccttgccaggagtgttcaagatgctctctctggaccgatcccactgaagatgatgagaagcttattgaggaaatccagaaggaggctgaagaggaacagaaaagaaagaatggagagaacaccttcaaacgcattggacccccgctggagaagcctgtggagaaggtgcagagggtggaggccctcccgaggcccgttccgcagaacctgccacagccacagatgccaccctatgccttcgcgcacccacccttccccctgcctcccgtgcggcctgtgttcaacaacttcccactcaacatggggcctatcccagccccgtacgtgccccctctgcccaacgtgcgggtcaactatgacttcggtcccatccacatgcccctggagcacaacctgcccatgcactttggcccccagccgcggcatcgcttctgatggccccgaatccccattgagcagcacaaagcccgtttggggtaggagtgtggatggagaaccctcccccaaggctggtgtctgtaccattgcatcctaagtcagcttgaagggtaggctggttttcttcccacccctttcctagaagggctactgctcctggaagagtggacggatccataataaagacgtcccaaatggtggagttcggagagagctgcgatgtgaactgcccctcccctcgcatcccccaggccaccaacggcagtccttctgccttgtccatggcataggccatagaccaggtccctgctgctcacacctgggcctctcctcggagccgacccctgggtagcaaggcagccgagagcatctccctggaggggcccacggttgggccaagggcagagggggctgcacctgcgggcctgggaagcattgctcagggtggggggctgggaccatggcccgcagaggcactgccacagctgtgagggccaagatgctgtccccccatccaaaacccgtgcgccactgcagtgagtgttgagggcacctctcctcccctcttacacctactcagatgaggcagcagcagacccatctcgcggcgggggttttgttctgttgccgcctaactttctcatcctcggtctctggaaagtcaggctgagaaatcctttcccaggccaggccgctgcggtacactggatggttctgaagctggcccattgaaagagcctcttaaggcagctgggacagaggcctggtggccctgctgggcagcccaactgctgggggagacgtttctgccaccctgggtgatgagcagcttttcccccctggctttctgggggaggagtgggcctccttagggagacaggtgaccctgggtgccacccctgccccgtgtgtgccccgggtgttctcagtggttgctgaaggcaggtagagggtgctgtccagtatcccccatgtgaaggtcacttcccttctcatggagtcagctgagcatcagctcagccctgccatgtccccactcaccctcctcgcctcctgtccggccctgggtttctagcggtgcctgaggcatcactctggcccattgacagatgagaggtctgaagccttcctggccacaggcatcactttctcctcctcctcatgccctgccttgtccttgtcgtgttgccatggggttctgagaggctgggagttcacagacctcagacacagctgagtccgacaaccattggggtggggctgcatcagtctccggagtggcccgccacctcctgaagcagggcctggcccacccaaggtgcctggggcaggcgggcaccgtcattcgctgccattggcttctcagatgtatttcaaggactaaagtgggctctaagatctaagatggcccggcgcggtggctcccgcctgtaatcccagcactttgggaggccgaggcgggcggatgagttgaggtcgggagtttgagtccccgtctctactaaaaatacaaaattagccggacaaggtggcgcatgcctataatcccaggtactcaggaggctgaggcaggagaatcacttgaacctgggaggcagaggttgcagtgagccaagattgtgccactgcactccagcctgagcaacaaaagcaaaactctatctttaaaaaaaaaaaaaaaaaaactaagatacccattctttctgcctttgcccaggatggaggctttgaagacaggtggtcacctggacctggggtaagggtgcgcagggaggccgggcttgggggcagcctgctgctatgtccttgctggcgcccatacctgttggactgcctgaactttgctactagcctgaacgacagtgccttggaaaggcaggctccatgcggcacaacaggattgtcttcggtaccttaaatatgctccctgtgcttccccagggaggatctctgggagcagagggcggctgtagacatcacagctgaagaggtgacctcaggccctgggagcctcagctccctctgccctgtaccctaggcacgtggctccagcaagagccccaggcaggacaaagggagcaggcagcagctgcagaaacagccctagacaggtgctggcctcaaccctggcaggggagggggagcccagagtgatgtttctcctaaggccaaaccccaggggtgggtcatttgagaggagttccagctgttctggccacactgggctggtggggaaggagcggcggcctctttccttggagggtccctgattcctgaggatcctccccgagccaggcacgggggaccacagggctgccgtgagcacccaccctggttctccaggcccctctgtccagaggcagggcctgaacctcgggctcctgcctggaccagtgacagcattggggagagaagcactgggggtcttcagaccagccagcaaggggccgtgccagtgcccagagagcaggtcagacaacaggcaaccctgaggcagctggctccctctctctgccctgcagggcttgccgcagggcgtgaggctccccagccacagccccctcttacttgccttaaaactggagagaggaatctagtatttgcacttagcaaaatatttaaaaactgaaaaaaatgtgcatgatctgtcactttgtataaaaacaagaaacgattagttcattaaactttttctttaccttctggtagtaaaaatagataaaataattccgtttcaactactgtgtgtaaaaagcctgtatcatatgtaactgggacttttgtaaataaatgtttgtgcgctctgctc

SEQ ID NO: 417892 - DNA, 417 bp, Homo sapiens
ggtctcactctgttgcccaggctggtctcaaactcctggcctgccacagccttccaaagtgctggtactacaggcgtcagccacctagccctaccacctcttaacctcttctattaaaagatgtctttagaaatatcccccctgaaaaggagaggcatcctctgaaagaattcaagccaagtaaagctcatttcatatcccttttgttgaacaggaacttctgtggtgtccactcaccaggagttgtctttgtgtctgtcctttatccccaggaaacctgtaggaagtgtcagggactctggaaagaacataatggcctcacctgtgaagagctggctgaaaaagacgacatcaagtaccgtacctctatgtgagtaacagaattcagaggggctatgggctgattctcaacttccc

SEQ ID NO: 417893 - DNA, 294 bp, Homo sapiens
tggtttcttgcagtggcatttgggaggtgtccacgttttgtgctttgatcagcatgtggagccactcccgtgtccagaggtcgctgccctggtcccaggctagattccattgaggttggtttaatgtttttctccactaatccccacatccctttcagagaacaccttcaaacgcattggacccccgctggagaagcctgtggagaaggtgcagagggtggaggccctcccgaggcccgttccgcagaacctgccacagccacagatgccaccctatgccttcgcgcacccacc

SEQ ID NO: 417894 - DNA, 164 bp, Homo sapiens
gtgacataaaaatagaaaagaggatgttctttcttgaaaataagcgacgacattgtaggtcctatgaccgacgtgctctccttccagctgtgcaacaagagcaggagttctatgagcagaaaatcaaagagatggcagaggtaggaagatgtgctctggtcttg

SEQ ID NO: 417895 - DNA, 6025 bp, Homo sapiens
cgcggagggccggaaggagtgcagcggctgccacggagctcgcagctgcggcttctgaggagtaagcggcgcggtagcgaaggccgccgaacctgcctggctagccggcgacttgagtgacgactcttttgaaacagatggtcaccatgtttagatattagcagtcccatatatgcatgtctgcatttgaaaatggaagagggaaacaacaatgaagaggtaattcacttgaacaactttcactgccatcggggacaagagtggatcaatctccgagatgggcccatcaccatatctgactcctcagatgaggaaaggattccaatgctggtcaccccagctcctcagcagcatgaagaagaggacctggatgatgatgtcatcctgacagaagatgattctgaggatgactacggtgaatttctggatcttgggcctcctggaatctctgaattcactaagccaagtggccaaacagaaagagaacccaagcctggaccgagtcataaccaagcagcaaatgacattgtcaaccccagatcagagcagaaagtcatcatcttggaagaaggtagccttctttacacagaaagcgatcctttggaaactcagaaccagtcatccgaagactcagagacagagctgttatcaaatctaggagagtcagctgctctagcagatgatcaggccatcgaagaagactgctggttagatcatccttacttccagtctctgaaccaacagccccgtgaaataacaaaccaggtcgttcctcaggaacggcagcctgaagcagaactgggccgcttgttgtttcagcatgaattcccagggcccgcttttccaaggccggaaccccagcaaggtgggatttcaggcccctcttctcctcagcctgcccatcctctaggagagtttgaagaccagcagttagcaagtgatgatgaagagccaggtccagcctttccaatgcaagaatctcaagagcccaatttggaaaacatttgggggcaagaagctgcagaggtagatcaagagctcgttgaactactagtgaaagaaacggaagcaagatttccagatgtagcaaatgggtttattgaggaaataattcattttaagaattattatgatctgaatgtactttgtaattttcttctggaaaacccagattatccaaagagagaagacagaatcattataaatcccagtagcagtctgctggccagccaagatgagacaaagttgcctaaaatagacttttttgactattctaaattgacccctcttgaccagcgctgcttcatccaagctgctgacctcctcatggccgacttcaaagtgctcagtagtcaggacatcaagtgggccctgcacgagctcaaaggacactatgcaatcacccgaaaggccttgtctgatgccattaaaaaatggcaggagctgtcaccagaaaccagtggaaaaaggaagaagagaaaacaaatgaaccagtattcttacattgatttcaagtttgaacaaggtgacataaaaatagaaaagaggatgttctttcttgaaaataagcgacgacattgtaggtcctatgaccgacgtgctctccttccagctgtgcaacaagagcaggagttctatgagcagaaaatcaaagagatggcagagcatgaagactttttgcttgccctacagatgaatgaagaacagtatcaaaaggatggccagctgattgagtgtcgctgctgctatggggaatttccattcgaggagctgacgcagtgcgcagatgctcacttgttctgcaaagagtgtctcatcagatatgcccaagaggcagtctttggatctggaaagttggagctcagctgcatggaaggcagctgcacgtgttcgttcccaaccagtgagctggagaaggtgctcccccagaccatcctgtataagtactatgagcgaaaagccgaggaggaggttgcggcagcctacgccgacgagcttgtcaggtgcccgtcctgtagctttccggctctgttggacagtgatgtgaagaggttcagctgtcctaatcctcactgccgaaaggaaacctgtaggaagtgtcagggactctggaaagaacataatggcctcacctgtgaagagctggctgaaaaagacgacatcaagtaccgtacctctattgaagaaaaaatgactgctgcccgcattagaaaatgccacaagtgtgggactggcctcatcaaatctgaaggctgcaaccgcatgtcttgccgctgtggtgcccagatgtgctacctctgtcgagtttctattaatggatatgaccatttctgccaacatccccgctcaccaggagccccttgccaggagtgttcaagatgctctctctggaccgatcccactgaagatgatgagaagcttattgaggaaatccagaaggaggctgaagaggaacagaaaagaaagaatggagagaacaccttcaaacgcattggacccccgctggagaagcctgtggagaaggtgcagagggtggaggccctcccgaggcccgttccgcagaacctgccacagccacagatgccaccctatgccttcgcgcacccacccttccccctgcctcccgtgcggcctgtgttcaacaacttcccactcaacatggggcctatcccagccccgtacgtgccccctctgcccaacgtgcgggtcaactatgacttcggtcccatccacatgcccctggagcacaacctgcccatgcactttggcccccagccgcggcatcgcttctgatggccccgaatccccattgagcagcacaaagcccgtttggggtaggagtgtggatggagaaccctcccccaaggctggtgtctgtaccattgcatcctaagtcagcttgaagggtaggctggttttcttcccacccctttcctagaagggctactgctcctggaagagtggacggatccataataaagacgtcccaaatggtggagttcggagagagctgcgatgtgaactgcccctcccctcgcatcccccaggccaccaacggcagtccttctgccttgtccatggcataggccatagaccaggtccctgctgctcacacctgggcctctcctcggagccgacccctgggtagcaaggcagccgagagcatctccctggaggggcccacggttgggccaagggcagagggggctgcacctgcgggcctgggaagcattgctcagggtggggggctgggaccatggcccgcagaggcactgccacagctgtgagggccaagatgctgtccccccatccaaaacccgtgcgccactgcagtgagtgttgagggcacctctcctcccctcttacacctactcagatgaggcagcagcagacccatctcgcggcgggggttttgttctgttgccgcctaactttctcatcctcggtctctggaaagtcaggctgagaaatcctttcccaggccaggccgctgcggtacactggatggttctgaagctggcccattgaaagagcctcttaaggcagctgggacagaggcctggtggccctgctgggcagcccaactgctgggggagacgtttctgccaccctgggtgatgagcagcttttcccccctggctttctgggggaggagtgggcctccttagggagacaggtgaccctgggtgccacccctgccccgtgtgtgccccgggtgttctcagtggttgctgaaggcaggtagagggtgctgtccagtatcccccatgtgaaggtcacttcccttctcatggagtcagctgagcatcagctcagccctgccatgtccccactcaccctcctcgcctcctgtccggccctgggtttctagcggtgcctgaggcatcactctggcccattgacagatgagaggtctgaagccttcctggccacaggcatcactttctcctcctcctcatgccctgccttgtccttgtcgtgttgccatggggttctgagaggctgggagttcacagacctcagacacagctgagtccgacaaccattggggtggggctgcatcagtctccggagtggcccgccacctcctgaagcagggcctggcccacccaaggtgcctggggcaggcgggcaccgtcattcgctgccattggcttctcagatgtatttcaaggactaaagtgggctctaagatctaagatggcccggcgcggtggctcccgcctgtaatcccagcactttgggaggccgaggcgggcggatgagttgaggtcgggagtttgagtccccgtctctactaaaaatacaaaattagccggacaaggtggcgcatgcctataatcccaggtactcaggaggctgaggcaggagaatcacttgaacctgggaggcagaggttgcagtgagccaagattgtgccactgcactccagcctgagcaacaaaagcaaaactctatctttaaaaaaaaaaaaaaaaaaactaagatacccattctttctgcctttgcccaggatggaggctttgaagacaggtggtcacctggacctggggtaagggtgcgcagggaggccgggcttgggggcagcctgctgctatgtccttgctggcgcccatacctgttggactgcctgaactttgctactagcctgaacgacagtgccttggaaaggcaggctccatgcggcacaacaggattgtcttcggtaccttaaatatgctccctgtgcttccccagggaggatctctgggagcagagggcggctgtagacatcacagctgaagaggtgacctcaggccctgggagcctcagctccctctgccctgtaccctaggcacgtggctccagcaagagccccaggcaggacaaagggagcaggcagcagctgcagaaacagccctagacaggtgctggcctcaaccctggcaggggagggggagcccagagtgatgtttctcctaaggccaaaccccaggggtgggtcatttgagaggagttccagctgttctggccacactgggctggtggggaaggagcggcggcctctttccttggagggtccctgattcctgaggatcctccccgagccaggcacgggggaccacagggctgccgtgagcacccaccctggttctccaggcccctctgtccagaggcagggcctgaacctcgggctcctgcctggaccagtgacagcattggggagagaagcactgggggtcttcagaccagccagcaaggggccgtgccagtgcccagagagcaggtcagacaacaggcaaccctgaggcagctggctccctctctctgccctgcagggcttgccgcagggcgtgaggctccccagccacagccccctcttacttgccttaaaactggagagaggaatctagtatttgcacttagcaaaatatttaaaaactgaaaaaaatgtgcatgatctgtcactttgtataaaaacaagaaacgattagttcattaaactttttctttaccttctggtagtaaaaatagataaaataattccgtttcaactactgtgtgtaaaaagcctgtatcatatgtaactgggacttttgtaaataaatgtttgtgcgctctgctccctccagcttcgtctctccaccccgccatccggcaagttacaggggccgccgacagattcgtccaagtgattgggtctaaaccagcatcctcacctccccgactgggtcctggcaggagcaggcccggaaggcccagtagtaagatccccaccactcccctgccagggaggaagatcaggtgatctgctaggcaaatcccgctagggcggctaccaaggcccacattgggcacaaagggtctatctgtttttggcacagaatcccctgcaagaaaggtgcagtcggtttcttttgcaggccccttccccagtctgcccacctaaaggtcaagtaaaccaggagaagcctcgcccagctgaggaggggacaaggttccaaggacaggaagtgcctgggctgagaggccatggcatttgagt

SEQ ID NO: 417896 - DNA, 2998 bp, Homo sapiens
cgcggagggccggaaggagtgcagcggctgccacggagctcgcagctgcggcttctgaggagtaagcggcgcggtagcgaaggccgccgaacctgcctggctagccggcgacttgagtgacgactcttttgaaacagatggtcaccatgtttagatattagcagtcccatatatgcatgtctgcatttgaaaatggaagagggaaacaacaatgaagaggtaattcacttgaacaactttcactgccatcggggacaagagtggatcaatctccgagatgggcccatcaccatatctgactcctcagatgaggaaaggattccaatgctggtcaccccagctcctcagcagcatgaagaagaggacctggatgatgatgtcatcctgacagaagatgattctgaggatgactacggtgaatttctggatcttgggcctcctggaatctctgaattcactaagccaagtggccaaacagaaagagaacccaagcctggaccgagtcataaccaagcagcaaatgacattgtcaaccccagatcagagcagaaagtcatcatcttggaagaaggtagccttctttacacagaaagcgatcctttggaaactcagaaccagtcatccgaagactcagagacagagctgttatcaaatctaggagagtcagctgctctagcagatgatcaggccatcgaagaagactgctggttagatcatccttacttccagtctctgaaccaacagccccgtgaaataacaaaccaggtcgttcctcaggaacggcagcctgaagcagaactgggccgcttgttgtttcagcatgaattcccagggcccgcttttccaaggccggaaccccagcaaggtgggatttcaggcccctcttctcctcagcctgcccatcctctaggagagtttgaagaccagcagttagcaagtgatgatgaagagccaggtccagcctttccaatgcaagaatctcaagagcccaatttggaaaacatttgggggcaagaagctgcagaggtagatcaagagctcgttgaactactagtgaaagaaacggaagcaagatttccagatgtagcaaatgggtttattgaggaaataattcattttaagaattattatgatctgaatgtactttgtaattttcttctggaaaacccagattatccaaagagagaagacagaatcattataaatcccagtagcagtctgctggccagccaagatgagacaaagttgcctaaaatagacttttttgactattctaaattgacccctcttgaccagcgctgcttcatccaagctgctgacctcctcatggccgacttcaaagtgctcagtagtcaggacatcaagtgggccctgcacgagctcaaaggacactatgcaatcacccgaaaggccttgtctgatgccattaaaaaatggcaggagctgtcaccagaaaccagtggaaaaaggaagaagagaaaacaaatgaaccagtattcttacattgatttcaagtttgaacaaggtgacataaaaatagaaaagaggatgttctttcttgaaaataagcgacgacattgtaggtcctatgaccgacgtgctctccttccagctgtgcaacaagagcaggagttctatgagcagaaaatcaaagagatggcagagcatgaagactttttgcttgccctacagatgaatgaagaacagtatcaaaaggatggccagctgattgagtgtcgctgctgctatggggaatttccattcgaggagctgacgcagtgcgcagatgctcacttgttctgcaaagagtgtctcatcagatatgcccaagaggcagtctttggatctggaaagttggagctcagctgcatggaaggcagctgcacgtgttcgttcccaaccagtgagctggagaaggtgctcccccagaccatcctgtataagtactatgagcgaaaagccgaggaggaggttgcggcagcctacgccgacgagcttgtcaggtgcccgtcctgtagctttccggctctgttggacagtgatgtgaagaggttcagctgtcctaatcctcactgccgaaaggaaacctgtaggaagtgtcagggactctggaaagaacataatggcctcacctgtgaagagctggctgaaaaagacgacatcaagtaccgtacctctattgaagaaaaaatgactgctgcccgcattagaaaatgccacaagtgtgggactggcctcatcaaatctgaaggctgcaaccgcatgtcttgccgctgtggtgcccagatgtgctacctctgtcgagtttctattaatggatatgaccatttctgccaacatccccgctcaccaggagccccttgccaggagtgttcaagatgctctctctggaccgatcccactgaagatgatgagaagcttattgaggaaatccagaaggaggctgaagaggaacagaaaagaaagaatggagagaacaccttcaaacgcattggacccccgctggagaagcctgtggagaaggtgcagagggtggaggccctcccgaggcccgttccgcagaacctgccacagccacagatgccaccctatgccttcgcgcacccacccttccccctgcctcccgtgcggcctgtgttcaacaacttcccactcaacatggggcctatcccagccccgtacgtgccccctctgcccaacgtgcgggtcaactatgacttcggtcccatccacatgcccctggagcacaacctgcccatgcactttggcccccagccgcggcatcgcttctgatggccccgaatccccattgagcagcacaaagcccgtttggggtaggagtgtggatggagaaccctcccccaaggctggtgtctgtaccattgcatcctaagtcagcttgaagggtaggctggttttcttcccacccctttcctagaagggctactgctcctggaagagtggacggatccataataaagacgtcccaaatggtgga

SEQ ID NO: 417897 - DNA, 3968 bp, Homo sapiens
cgcggagggccggaaggagtgcagcggctgccacggagctcgcagctgcggcttctgaggagtaagcggcgcggtagcgaaggccgccgaacctgcctggctagccggcgacttgagtgacgactcttttgaaacagatggtcaccatgtttagatattagcagtcccatatatgcatgtctgcatttgaaaatggaagagggaaacaacaatgaagaggtaattcacttgaacaactttcactgccatcggggacaagagtggatcaatctccgagatgggcccatcaccatatctgactcctcagatgaggaaaggattccaatgctggtcaccccagctcctcagcagcatgaagaagaggacctggatgatgatgtcatcctgacagaagatgattctgaggatgactacggtgaatttctggatcttgggcctcctggaatctctgaattcactaagccaagtggccaaacagaaagagaacccaagcctggaccgagtcataaccaagcagcaaatgacattgtcaaccccagatcagagcagaaagtcatcatcttggaagaaggtagccttctttacacagaaagcgatcctttggaaactcagaaccagtcatccgaagactcagagacagagctgttatcaaatctaggagagtcagctgctctagcagatgatcaggccatcgaagaagactgctggttagatcatccttacttccagtctctgaaccaacagccccgtgaaataacaaaccaggtcgttcctcaggaacggcagcctgaagcagaactgggccgcttgttgtttcagcatgaattcccagggcccgcttttccaaggccggaaccccagcaaggtgggatttcaggcccctcttctcctcagcctgcccatcctctaggagagtttgaagaccagcagttagcaagtgatgatgaagagccaggtccagcctttccaatgcaagaatctcaagagcccaatttggaaaacatttgggggcaagaagctgcagaggtagatcaagagctcgttgaactactagtgaaagaaacggaagcaagatttccagatgtagcaaatgggtttattgaggaaataattcattttaagaattattatgatctgaatgtactttgtaattttcttctggaaaacccagattatccaaagagagaagacagaatcattataaatcccagtagcagtctgctggccagccaagatgagacaaagttgcctaaaatagacttttttgactattctaaattgacccctcttgaccagcgctgcttcatccaagctgctgacctcctcatggccgacttcaaagtgctcagtagtcaggacatcaagtgggccctgcacgagctcaaaggacactatgcaatcacccgaaaggccttgtctgatgccattaaaaaatggcaggagctgtcaccagaaaccagtggaaaaaggaagaagagaaaacaaatgaaccagtattcttacattgatttcaagtttgaacaaggtgacataaaaatagaaaagaggatgttctttcttgaaaataagcgacgacattgtaggtcctatgaccgacgtgctctccttccagctgtgcaacaagagcaggagttctatgagcagaaaatcaaagagatggcagagcatgaagactttttgcttgccctacagatgaatgaagaacagtatcaaaaggatggccagctgattgagtgtcgctgctgctatggggaatttccattcgaggagctgacgcagtgcgcagatgctcacttgttctgcaaagagtgtctcatcagatatgcccaagaggcagtctttggatctggaaagttggagctcagctgcatggaaggcagctgcacgtgttcgttcccaaccagtgagctggagaaggtgctcccccagaccatcctgtataagtactatgagcgaaaagccgaggaggaggttgcggcagcctacgccgacgagcttgtcaggtgcccgtcctgtagctttccggctctgttggacagtgatgtgaagaggttcagctgtcctaatcctcactgccgaaaggaaacctgtaggaagtgtcagggactctggaaagaacataatggcctcacctgtgaagagctggctgaaaaagacgacatcaagtaccgtacctctattgaagaaaaaatgactgctgcccgcattagaaaatgccacaagtgtgggactggcctcatcaaatctgaaggctgcaaccgcatgtcttgccgctgtggtgcccagatgtgctacctctgtcgagtttctattaatggatatgaccatttctgccaacatccccgctcaccaggagccccttgccaggagtgttcaagatgctctctctggaccgatcccactgaagatgatgagaagcttattgaggaaatccagaaggaggctgaagaggaacagaaaagaaagaatggagagaacaccttcaaacgcattggacccccgctggagaagcctgtggagaaggtgcagagggtggaggccctcccgaggcccgttccgcagaacctgccacagccacagatgccaccctatgccttcgcgcacccacccttccccctgcctcccgtgcggcctgtgttcaacaacttcccactcaacatggggcctatcccagccccgtacgtgccccctctgcccaacgtgcgggtcaactatgacttcggtcccatccacatgcccctggagcacaacctgcccatgcactttggcccccagccgcggcatcgcttctgatggccccgaatccccattgagcagcacaaagcccgtttggggtaggagtgtggatggagaaccctcccccaaggctggtgtctgtaccattgcatcctaagtcagcttgaagggtaggctggttttcttcccacccctttcctagaagggctactgctcctggaagagtggacggatccataataaagacgtcccaaatggtggagttcggagagagctgcgatgtgaactgcccctcccctcgcatcccccaggccaccaacggcagtccttctgccttgtccatggcataggccatagaccaggtccctgctgctcacacctgggcctctcctcggagccgacccctgggtagcaaggcagccgagagcatctccctggaggggcccacggttgggccaagggcagagggggctgcacctgcgggcctgggaagcattgctcagggtggggggctgggaccatggcccgcagaggcactgccacagctgtgagggccaagatgctgtccccccatccaaaacccgtgcgccactgcagtgagtgttgagggcacctctcctcccctcttacacctactcagatgaggcagcagcagacccatctcgcggcgggggttttgttctgttgccgcctaactttctcatcctcggtctctggaaagtcaggctgagaaatcctttcccaggccaggccgctgcggtacactggatggttctgaagctggcccattgaaagagcctcttaaggcagctgggacagaggcctggtggccctgctgggcagcccaactgctgggggagacgtttctgccaccctgggtgatgagcagcttttcccccctggctttctgggggaggagtgggcctccttagggagacaggtgaccctgggtgccacccctgccccgtgtgtgccccgggtgttctcttacttgccttaaaactggagagaggaatctagtatttgcacttagcaaaatatttaaaaactgaaaaaaatgtgcatgatctgtcactttgtataaaaacaagaaacgattagttcattaaactttttctttaccttctggtagtaaaaatagataaaataattccgtttcaactactgtgtgtaaaaagcctgtatcatatgtaactgggacttttgtaaataaatgtttgtgcgctctgctc

SEQ ID NO: 417898 - DNA, 968 bp, Homo sapiens
ttagatttttctatctacatattggagataagtttaaattttgtgttagtgtttgggtattacttcctgccaacgtgaaaagttaacctttctaagacaatctctactaatttggactttttcaagatttttgcctacttctttcaaagagattgcaaaacgattttaactcactaaagaacatttttcacctcttgattgtccagtacaagtgtagtacagttctttttttatgtatcctccctttgtttttatagactggaaggtatccagaaataaggcattcagaaatggaggcacacatagatgaaggcaaaggccattcctatgaaggcaggtctgtaggcagctggttatttgtttttctcagcctctcttggcattctaccttcatctggaaaaaaatttaaaaagggaggatactttataggtcctgtctcaagtatctgacttccctgggaagcttgattctcacattcaaaatacatggggagtttggttcagttaaattttatcacaccagaattgttgaaaagcaataaattattactgtataattggtgcctgtttgttatcttaggtattgttatttctgtttttaacttgtttggaaaaccatagaccataaactttttctgaacgttcgatgcagagctccaaccgaactagcaaagaacatttcctcaaagaaacggagtatttttttctgtaacaatgtaactttctgtctttcattcttcaaaatgtatcactataaatttcctacaaaaagagctatttcttctctcagtatcatacagattgatttgtatagatgtatatgtatggctgttaaattgtttgttggtataaaatggtgagtgtcagtataataatgatgataataaatagcggctaacatttaaagcgcatactctgttccaggcaccgttgtaagcattttacatcgagttgctcaatctaaaacc

SEQ ID NO: 417899 - DNA, 535 bp, Homo sapiens
gcttaccctgcttctctgttggctctgattctccatcacagagcctagtatacagtattggcttaatgaacagccagtggattagaatgtacaacatatatataacgccctgacagttgccaaagtctcatgcaatgcaatgacctggagaggtagtactgacactattaccatttaacagaagaggttaagtctttcgcccaagttaaaaaaaatagttagctaagggtagagccaagaagtgaaccaggttcttttacagcaaattctttgttctttgtcgtaataccactctacacaaaaggctacagaacagacatccaggtgggggcgagagacgtcatcatcttgtctccttcagactgagctccaagaaacccatcacattacccagctgcacagccccattcctccccatttttccttcctatacctcaatcatatagtgcagaaaccccaaagccagcaaaagagcctactcttactgtcagaaacagctgcactctgccagcctgtaacatgatggctccagtgt

SEQ ID NO: 417900 - DNA, 587 bp, Homo sapiens
cagtaggacactcatatgaaaagccaactttgttcctcagttatcaagataagaaacctgtcatttctctcattcactctgtcagccttgagatactccaagcagacttacctctgtgttgtacaccccatatatcaggaagatgaagagaccctgtaaaataaaatggaggggaaaagctgttaacgctaatcatttcagcagtagaaatacctgaaataaactttcctgggaacagacaaaagaagacacacttcatcaaggtcaatttattttcctatttttcaacattagaaggtgtaccttgagcatttatatgataacatagcaagcacatcacttataatggttgtgctattcaattctttagaagtacaaaataaaaataccatcccaagtacaaagaatattaattagaaaaatcaatataccagttctgaaagatagctgggtaatgaaaaaattaaactcaggaaatgttattaaagtaatcatagaaataacactaagcatcagtatttccaagcactgttttagactgtagcaactagaatatatttgttacaatcttcaacagggttaaaatt

SEQ ID NO: 417901 - DNA, 439 bp, Homo sapiens
accctcccgctggttctgccatgcaaatgcaacgtgaccccatggctgcctgtgagctggaggctgcacgggagctgcttctgccatcagacaaacacacggctgagcccagggcagagtccctccccgttccctcttgcggctggagccctggctgatgaagctgccttaacgggcaggtgctggggggcagatcctgcagggaacatggtgaggcaccttgaagactccgccccctgatcgggatctggcagcctctgcttccaagagagacaggcagtgcctgggcagtactcagggaggggcgcttcccccagctcagcaactgccctgggaggggacagccccaaaggactaattgttcacacttgggtgagctgtttctaaacacctcatcttttatttctctttctttaacaatatagacaaattcagtaag

SEQ ID NO: 417902 - DNA, 815 bp, Homo sapiens
gattaatttctgtaatcctgccaaaaatatatggcctgaatctaatcatgagaaaacatcagacaatcccaaactgaagcaagttttccaaaataactcatctgtacatcttcaaaagcataaagatcatgaaagtccaggaaagatggaggggctgttctagattgagggaggctgaagagacaatattataactaaatgcaacatgcaatcctggactgggtccttttgctataaaggaccaaataatgaaacctgaatggagcctgaggattagataatccattgatgtggaataaggcatcaacgtaaatttcctgattctgatggtttatgattatcatgtaggagaatgtccttgtagaaattactgaagtattcaggggtcatagaacatcatgccaacaacttactctcaagtaaaataggaaaaaataaattatttgtactatgcttgccacttttctgcaagtttgaaattacttcaaagtaaaaaaaaaaaaaaaatactggcatggtagctcacacctgtaatcccactattttgggaggcaaaggcaggcggatcacttgaggtcaggagtttgagaccagcctagccaactggtgaaactccatctctactaaaaatacaaaaattagccaggcattgtggcatatgcctgtaatcccagatactcaggaggctgaggcaggagaatcacttgaacccgggaggtggaggatgcagtgggccgagatcacgccactgcattccagcctggacaacagagggagactccgtctcaaaacgaaccaacgaaccaacaaaccaa

SEQ ID NO: 417903 - DNA, 1557 bp, Homo sapiens
  misc_feature (780)..(780): n is a, c, g, or t
  misc_feature (1000)..(1000): n is a, c, g, or t
gtaagtctaagtgataaaggtatcttctggaaataactgagtaacacattgagaacatttcgacaaaattgaaagtggaaatgctctggggcaacatatttttttgcacctatcactgtttgaaagagaagctatagcaaatggatgactgggtgagtcactggaatgatggatcttaggggcccaggggtagcagagtgggaaaggctgcacccatgctctggagggtaggaggattgttatatgggactcacagcacaaacacgtgtggatgcagtgattgtcaaatgatccaagggcatgtcttgttgctcctattttttttttcctgtctgaatggaaaacagcaatttcctccattcctggttattgcagatgatctgataatttaacctgagagccgttatttcattttattttattttaaaactcaaaagaagtatactgttctcatcttaaacagtgagatgtctggtctttaatattactctttcttaacatacaataagctagcagtgtggtgatgacatgtagatacctcctaatgtgccataaaatcaaggcatgcattttaaaatgtttcgtgcccagaaatccaaacttttatagttgttgagcagccatcttcatatggtctgttctgaattcttaaaacctgcaggagctcatcagcctaacctggccccttccagctcatccccatgtcctattttgctatatttgagcataacaagattttatctcttcctttttaaaaattaattacctaataaatatgancaaaaattgttaaataattttttaattacctaataaatgtgaccacaaatattaaataaaattatatagattaaaatgctgacgttctcttctcccccatcctattcccttgcctagaaggaacttctgtataaaaaacttgctgggtatccttttagaaattttatggtatattaatcttgtatacatatacaactgtgggtacctatacaactatgtntctctttcttttaatacacttcaaattcttgctatataccataatatacttaaccatatctccatgatggacatttaaattgtttggagtttttggctattacaagcaatattgcagtaaacctgtttgtataatttttctgcacatactcctgtagaattactagaagtgccatttctgaataaaaaattgactagtattaccaagttaccctataaaatgcctaatcagtttatattctaacagggtatgaaagtgcccatttctagccaacattagataccctcagtctcatacttaagtattttttttcccctaatcagttagatgaaaggtgatttttttaactaacaattttctgattgaattttctgattgttccgtagcatttttttttcctaaggtattttagccatccttatttcttcttttcagaatggtatattcctgttgtatatccattttgatatcttaatgatttataaccctttataaaaatagaatgagtgctaatcctttgttatgtgtactacaaatacatatttttttccagtctg

SEQ ID NO: 417904 - DNA, 472 bp, Homo sapiens
gtgcatgccaccatgccctggctagttttgtattttttattgatgtggggtctcaccatgtagcctaggctggtctcaaactcctgtgctcaagcagtccgcctgccttggcctcccaaagtgttgggattacgggtgtgcaccaccatgcctggcctacatgcataatttaataaaactgagtactgtgtaatagtagtcttaaaatgaaaaagtaaaaggccattttggtagtgattatggtaaaaacataatacagttaacttttagaagtcttttattttgtatcacttcagttttctaatattagtgggaaaattttaggtggaattattaaacaacatgttattagtaaggtttaattattttacctccttttttaatacctaaaatgttacagaatcactcaaaacaatgttatagaaaaatagagtagaaatgaaaacttctatttggacaggactgcaccctc

SEQ ID NO: 417905 - DNA, 187 bp, Homo sapiens
aaactctgtctcaaaaataaataaataaataaataaataaactaataaataaataaatgaaagaatgaggctacaggaagagacagagtattttcctagacatctccgttaaagagaaacgatcacatgtttggcccctcttccacagtactaggaagccactccttctccccacagtgcaacaacc

SEQ ID NO: 417906 - DNA, 323 bp, Homo sapiens
aggggcaaattccacacatggagatcaacgggtgctcagaacttcctcttgttgtcagcgccgattaaacatcatctttgtgagctgtaggctgtgtagtgtgccaagaatggtacaggagggaatataggtcactagggctcaaaacacatctgtacacagacgcacataccttgttacagtataacatgctacacacatatacatgcttaaacgctaggttttcagaacactctcccatcctatttcagctctgccattttaaccctccagataattaagttaaaccccaagacttaaccagccccgcccccaccaccacc

SEQ ID NO: 417907 - DNA, 958 bp, Homo sapiens
agcggatgaggcacaaacctagcgccaaggttggctgtcaaggtagattccagggtgtggaagtggctttgtggtgccacctctaaccgctcggaggtcaacccccattctacaccgaaaactaggccttggctgctatggaaggacagcggcaagaaagccacgcaaccctaacactcgcccaggctcatttcaacaatggagagtacgcggaggccgaggcactgtactccgcttacattcgccggtgcgcttgcgcggcctccagcgacgagagtcccgggagcaaatgcagccctgaggatttggctactgcatataacaacagggggcaaatcaagtacttcagggttgatttttatgaagccatggatgactacacatctgccatagaagtccaacccaattttgaagttccatattacaacagagggttgatactgtataggctgggatattttgatgatgctttggaagatttcaagaaggtcttagacttaaatcctggatttcaagatgctactttgagcttaaaacagactattctagacaaagaagaaaaacaaagaagaaatgttgcaaaaaattattgatatttttaacttaatggaagtattgattcatgatccttacatctgcatctagttatcagtaatttagatattgagctattttgatttatatttaagaaattaatacattagcactgaaagttaaatagtgtgtttaaggtagttaatttcaggttgaatgggttttttttaatgaagtgtaaataataccaatgtataagtgtatattattatattaaatattatagtaaaaaggaatgtgtggtattttcttcagcaaaactatttttgtgatttttttattctcaactttttatttaaaaaatgttacatctgcagaaaagttgaaagtataataaactcttcagttaaattcatgagttgtt

SEQ ID NO: 417908 - DNA, 537 bp, Homo sapiens
ttctcttttccattttttgggttctggtacaggatattttgatgatgctttggaagatttcaagaaggtcttagacttaaatcctggatttcaagatgctactttgagcttaaaacagactattctagacaaagaagaaaaacaaagaagaaatgttgcaaaaaattattgatatttttaacttaatggaagtattgattcatgatccttacatctgcatctagttatcagtaatttagatattgagctattttgatttatatttaagaaattaatacattagcactgaaagttaaatagtgtgtttaaggtagttaatttcaggttgaatgggttttttttaatgaagtgtaaataataccaatgtataagtgtatattattatattaaatattatagtaaaaaggaatgtgtggtattttcttcagcaaaactatttttgtgatttttttattctcaactttttatttaaaaaatgttacatctgcagaaaagttgaaagtataataaactcttcagttaaattcatgagttgtt

SEQ ID NO: 417909 - DNA, 787 bp, Homo sapiens
  misc_feature (746)..(746): n is a, c, g, or t
tggggccgcggcgaccccgggtggaggcgacgttggggttgtttgggctcctatctttgcctctggagctcacggtcggcgcttgtcataacccagcactaggactgagcgggcggacgttcgtctttctagaaaggcctaggcgaggcctaggacgagggcggcggagaacgcggggagaagcccacccgtgaggagccagctgccgcgacgcaaatgcagccctgaggatttggctactgcatataacaacagggggcaaatcaagtacttcagggttgatttttatgaagccatggatgactacacatctgccatagaagtccaacccaattttgaagttccatattacaacagagggttgatactgtataggctgggatattttgatgatgctttggaagatttcaagaaggtcttagacttaaatcctggatttcaagatgctactttgagcttaaaacagactattctagacaaagaagaaaaacaaagaagaaatgttgcaaaaaattattgatatttttaacttaatggaagtattgattcatgatccttacatctgcatctagttatcagtaatttagatattgagctattttgatttatatttaagaaattaatacattagcactgaaagttaaatagtgtgtttaaggtagttaatttcaggttgaatgggttttttttaatgaagtgtaaataataccaatgtataagtgtatattattatatttattataggnggggggcccgggcccattcgcccatatagaggcgattacat

SEQ ID NO: 417910 - DNA, 1089 bp, Homo sapiens
gttttaagatcacttaaaaatttgagaatgaaattgattcacattgtgacatatccatagcaaactcgggctttgggctggctttccctctttgcttagtatttatctgttctgtcttctttgccctgctggtgtgtgcttagaaaaatgaacaatcattttaatgttatattcagcagaacaaattggcagtgaacacactgtaaagttagtatgcttttcaggttgacattgcagtggtataaccctacaaaagtagataacagggttaaacaaaaattgattttagctctttatttgtacgttttttcttcagcttggattttcagtgttgatgctgcatgttataggctgtgaagtttgacaatacccaaaagagaatgaaagtggaaatgagaggaatttggtaacacggtgtttttaatgtgaactttttgtttaaagcaaatgcagccctgaggatttggctactgcatataacaacagggggcaaatcaagtacttcagggttgatttttatgaagccatggatgactacacatctgccatagaagtccaacccaattttgaagttccatattacaacagagggttgatactgtataggctgggtaagaattttttttctttttgagttttgtcattgactgtattctgttatttcagagctttcaaatgttgtaaaactaacgtggtaatcaaattttaaagttctgtgaaatttaggtttagagcttggaacaaaggaagtgtccctgagtttattttaggcttttgataggcgttatagatcacagcagagcactggggtgggaattggacctgggcgcaggagcaggggtgaccccattactttgtgcttgtgcattcccagctgtgaaatgagggcaattcagatgttcacctgtgaaacttttctgagttaaaatctttgaagacacacaagacaatagaaagtgaagtttagattcttggattaaagggaccataggtagtgtttcttcatttaaagtgtcaaaaagaaaattagttcccgtttcttaattttactgcaattatgtaaaacaggtgatacagttttattaaaat

SEQ ID NO: 417911 - DNA, 847 bp, Homo sapiens
tggggccgcggcgaccccgggtggaggcgacgttggggttgtttgggctcctatctttgcctctggagctcacggtcggcgcttgtcataacccagcactaggactgagcgggcggacgttcgtctttctagaaaggcctaggcgaggcctaggacgagggcggcggagaacgcggggagaagcccacccgtgaggagccagctgccgcgacggtgcggagagatttccgggaaccaagccctctgcgcgatcctcgggcgcgggccgccgcctctcaccccgccgtctctccttccacgttcctcattcgcacccagagacttaggacagataggaattttccactcgtgattttagctggcgggaaatccgcgacctgggaagggaaggggtcacggctgcgtagggccacagtaccgcgactcccatctcagtgtcacggcgcaggctcttggtggtgtttttcacttgtgaaaaacgtttaaatatgtggaagagagcataacgaacgtctaggtgtttatcacttggcttaagcattatcagtttacctattgtattcatccatggatgtttcagaaggaaccaccatgtcatcatcacatagttacttaatatcaagtcgtcagtgttggaaccattctgatcgactaataaggtgttttgttctttggttcccttttcgcagttagttcaagtcaggatacacatcaagtctttttaagtctcttctccaccttcccctctttatttgttgaggaaaccgattcttgtgtcctttgaatttccgtgttttggacttgctgactgaatctcttctgtcgtttaatgtggtcatctgtctca

SEQ ID NO: 417912 - DNA, 885 bp, Homo sapiens
tggggccgcggcgaccccgggtggaggcgacgttggggttgtttgggctcctatctttgcctctggagctcacggtcggcgcttgtcataacccagcactaggactgagcgggcggacgttcgtctttctagaaaggcctaggcgaggcctaggacgagggcggcggagaacgcggggagaagcccacccgtgaggagccagctgccgcgacgcaaatgcagccctgaggatttggctactgcatataacaacagggggcaaatcaagtacttcagggttgatttttatgaagccatggatgactacacatctgccatagaagtccaacccaattttgaagttccatattacaacagagggttgatactgtataggctgggatattttgatgatgctttggaagatttcaagaaggtcttagacttaaatcctggatttcaagatgctactttgagcttaaaacagactattctagacaaagaagaaaaacaaagaagaaatgttgcaaaaaattattgatatttttaacttaatggaagtattgattcatgatccttacatctgcatctagttatcagtaatttagatattgagctattttgatttatatttaagaaattaatacattagcactgaaagttaaatagtgtgtttaaggtagttaatttcaggttgaatgggttttttttaatgaagtgtaaataataccaatgtataagtgtatattattatattaaatattatagtaaaaaggaatgtgtggtattttcttcagcaaaactatttttgtgatttttttattctcaactttttatttaaaaaatgttacatctgcagaaaagttgaaagtataataaactcttcagttaaattcatgagttgtt

SEQ ID NO: 417913 - DNA, 1331 bp, Homo sapiens
tggggccgcggcgaccccgggtggaggcgacgttggggttgtttgggctcctatctttgcctctggagctcacggtcggcgcttgtcataacccagcactaggactgagcgggcggacgttcgtctttctagaaaggcctaggcgaggcctaggacgagggcggcggagaacgcggggagaagcccacccgtgaggagccagctgccgcgacggtgcggagagatttccgggaaccaagccctctgcgcgatcctcgggcgcgggccgccgcctctcaccccgccgtctctccttccacgttcctcattcgcacccagagacttaggacagataggaattttccactcgtgattttagctggcgggaaatccgcgacctgggaagggaaggggtcacggctgcgtagggccacagtaccgcgactcccatctcagtgtcacggcgcaggctcttggtggtgtttttcacttgtgaaaaacgtttaaatatgtggaagagagcataacgaacgtctaggtgtttatcacttggcttaagcattatcagtttacctattgtattcatccatggatgtttcagaaggaaccaccatgtcatcatcacatagttacttaatatcaagtcgtcagtgttggaaccattctgatcgactaataagcaaatgcagccctgaggatttggctactgcatataacaacagggggcaaatcaagtacttcagggttgatttttatgaagccatggatgactacacatctgccatagaagtccaacccaattttgaagttccatattacaacagagggttgatactgtataggctgggatattttgatgatgctttggaagatttcaagaaggtcttagacttaaatcctggatttcaagatgctactttgagcttaaaacagactattctagacaaagaagaaaaacaaagaagaaatgttgcaaaaaattattgatatttttaacttaatggaagtattgattcatgatccttacatctgcatctagttatcagtaatttagatattgagctattttgatttatatttaagaaattaatacattagcactgaaagttaaatagtgtgtttaaggtagttaatttcaggttgaatgggttttttttaatgaagtgtaaataataccaatgtataagtgtatattattatattaaatattatagtaaaaaggaatgtgtggtattttcttcagcaaaactatttttgtgatttttttattctcaactttttatttaaaaaatgttacatctgcagaaaagttgaaagtataataaactcttcagttaaattcatgagttgtt

SEQ ID NO: 417914 - DNA, 1116 bp, Homo sapiens
gttttaagatcacttaaaaatttgagaatgaaattgattcacattgtgacatatccatagcaaactcgggctttgggctggctttccctctttgcttagtatttatctgttctgtcttctttgccctgctggtgtgtgcttagaaaaatgaacaatcattttaatgttatattcagcagaacaaattggcagtgaacacactgtaaagttagtatgcttttcaggttgacattgcagtggtataaccctacaaaagtagataacagggttaaacaaaaattgattttagctctttatttgtacgttttttcttcagcttggattttcagtgttgatgctgcatgttataggctgtgaagtttgacaatacccaaaagagaatgaaagtggaaatgagaggaatttggtaacacggtgtttttaatgtgaactttttgtttaaagcaaatgcagccctgaggatttggctactgcatataacaacagggggcaaatcaagtacttcagggttgatttttatgaagccatggatgactacacatctgccatagaagtccaacccaattttgaagttccatattacaacagagggttgatactgtataggctgggatattttgatgatgctttggaagatttcaagaaggtcttagacttaaatcctggatttcaagatgctactttgagcttaaaacagactattctagacaaagaagaaaaacaaagaagaaatgttgcaaaaaattattgatatttttaacttaatggaagtattgattcatgatccttacatctgcatctagttatcagtaatttagatattgagctattttgatttatatttaagaaattaatacattagcactgaaagttaaatagtgtgtttaaggtagttaatttcaggttgaatgggttttttttaatgaagtgtaaataataccaatgtataagtgtatattattatattaaatattatagtaaaaaggaatgtgtggtattttcttcagcaaaactatttttgtgatttttttattctcaactttttatttaaaaaatgttacatctgcagaaaagttgaaagtataataaactcttcagttaaattcatgagttgtt

SEQ ID NO: 417915 - DNA, 1304 bp, Homo sapiens
tggggccgcggcgaccccgggtggaggcgacgttggggttgtttgggctcctatctttgcctctggagctcacggtcggcgcttgtcataacccagcactaggactgagcgggcggacgttcgtctttctagaaaggcctaggcgaggcctaggacgagggcggcggagaacgcggggagaagcccacccgtgaggagccagctgccgcgacggtgcggagagatttccgggaaccaagccctctgcgcgatcctcgggcgcgggccgccgcctctcaccccgccgtctctccttccacgttcctcattcgcacccagagacttaggacagataggaattttccactcgtgattttagctggcgggaaatccgcgacctgggaagggaaggggtcacggctgcgtagggccacagtaccgcgactcccatctcagtgtcacggcgcaggctcttggtggtgtttttcacttgtgaaaaacgtttaaatatgtggaagagagcataacgaacgtctaggtgtttatcacttggcttaagcattatcagtttacctattgtattcatccatggatgtttcagaaggaaccaccatgtcatcatcacatagttacttaatatcaagtcgtcagtgttggaaccattctgatcgactaataagcaaatgcagccctgaggatttggctactgcatataacaacagggggcaaatcaagtacttcagggttgatttttatgaagccatggatgactacacatctgccatagaagtccaacccaattttgaagttccatattacaacagagggttgatactgtataggctgggtaagaattttttttctttttgagttttgtcattgactgtattctgttatttcagagctttcaaatgttgtaaaactaacgtggtaatcaaattttaaagttctgtgaaatttaggtttagagcttggaacaaaggaagtgtccctgagtttattttaggcttttgataggcgttatagatcacagcagagcactggggtgggaattggacctgggcgcaggagcaggggtgaccccattactttgtgcttgtgcattcccagctgtgaaatgagggcaattcagatgttcacctgtgaaacttttctgagttaaaatctttgaagacacacaagacaatagaaagtgaagtttagattcttggattaaagggaccataggtagtgtttcttcatttaaagtgtcaaaaagaaaattagttcccgtttcttaattttactgcaattatgtaaaacaggtgatacagttttattaaaat

SEQ ID NO: 417916 - DNA, 554 bp, Homo sapiens
acacacggcagaggacagaatactactgcaggaccgactgtacagacttccacgcagaaaaactcattaatgcagtcccttctcgatccgagccgggtacagcataatcatccccttcaagaatgtcttctatcacatggtgaccttctccatcatcgtggataacccagccttcaccattcgcgctggagagtctgtgcggcccaagaagatcaacaacatcacagtctcctttgaaggaaacccatctggcagcaaaacccccatcaccaccaagctgactgtgagctgccctcctggtgaagggagtgagactggagttaaatgggtttattatctgaaggggatcaccctttagtggtaaccagggttacctgtatcaaccaaaagctatgcattgtcttagcctgaaaaagaatagagaaaacaataagaattctaaaggaactgtttttattcttctcatacaattatagggcagttatttccctattatgtgttttccaaatatagatatgaaatatctattccatattaaacattataactaccca

SEQ ID NO: 417917 - DNA, 597 bp, Homo sapiens
tcttattcgagcccagccacctgggtgagaccaagggcatcctgatcctatcatcgctcgcaggtggagagtatatcatccccctctttggaatggctctgcctcccaagccccaaggtcccttctcgatccgagccgggtacagcataatcatccccttcaagaatgtcttctatcacatggtgaccttctccatcatcgtggataacccagccttcaccattcgcgctggagagtctgtgcggcccaagaagatcaacaacatcacagtctcctttgaaggaaacccatctggcagcaaaacccccatcaccaccaagctgactgtgagctgccctcctggtgaagggagtgagactggagttaaatgggtttattatctgaaggggatcaccctttagtggtaaccagggttacctgtatcaaccaaaagctatgcattgtcttagcctgaaaaagaatagagaaaacaataagaattctaaaggaactgtttttattcttctcatacaattatagggcagttatttccctattatgtgttttccaaatatagatatgaaatatctattccatattaaacattataactaccca

SEQ ID NO: 417918 - DNA, 348 bp, Homo sapiens
  misc_feature (280)..(280): n is a, c, g, or t
agaaaacaaatacaattaaagaaaaatctggtccttttccttcctatccatttctcccctaactgttctcccaccactctggagctgttcattcattgattcatactgcgattcaatagcatttactggcacttactgtatatgatactgttgttctttgtgttaaagatgctacaaaataatgtatgtcatggttcctgaactttaagagcttgtcttcagactatgtagaggaaactgtcataaatgaagcagctgaggaacagtgtggcgatagccntgccaggcaacctgcagggcctctctcctctggtctgacaagagcacttcagacctttttctttctcc

SEQ ID NO: 417919 - DNA, 612 bp, Homo sapiens
aacaggagacctcgcctcagacaagtggggcctgggtcccccatggatgaaagtgccttcccattatgctgtaccctgggcagagtggacagtgacgaccctggttcgagcccagggtgcgcttcgggaccgcttgcggttaccagaaagcgaacaaatggtccatgagcggaaggtgaggcacctgaggcagagaaagtaaagaaacgcgccgccgagaagcagtgcctgggtccctcacggaggaaattgtcttctccttagcccgttcgcttggcactgaggtccctggcgtccctggtttgatcccagggtacgcctcgggccactagtgttaccccaaggtgggcagaaagcccataaggggaaggcgaggcacctggggcagagaaaaaaaaaacttcgctgcagagaagcgcggcctgattccccacggacgaaagtgtcttcccatcagtccctgcactgggacccggggaccctggtgtccctggttcgagctcagggtgtgcctcagccgctacgtgcaccccaaggggagctttgggagcacaaagcccatgagggaaggtgagttttgagggaggagtggtgaggcacctgtcacagaaa

SEQ ID NO: 417920 - DNA, 723 bp, Homo sapiens
caagcaggtgttacagatctcctcctcctagggagcttgcagtattttacccagtttgtggagttccatttgaggattgctgggggttgtggaccatccagagatctttccatggtaaagatcaagcatcgtgggttgccatgatctattgtcagattgagtctcactctgttgcccaggctggagcacagtggcgtgatcttggctcactgcaacctccagggttcaagggaacctgtaaaggaaaccagtagcttatctgtaccagtggcatatctgtataatctcttagaaaatcaagggttcaaaatcaaacaccttgctagtttgcgattcagtgattcaagaatgaattctgcagttggaggactctctaggcccttcagtgttccacttactttttctgctcttattccctctcttcttctacacgccagcgtcctcttctgcactggatggtatcatgattttcaggaaggagagtcaaaaagggaaacaagtcagctcaagcaaaaacatcctggcacacgggaggacgaagtaaataatgatagtatgtgggacaccattagtcattgtcattctgcatgcttcagcaccaataaaaccatcttaaccaaacacccttggataattggttcccatgactaatacatagccactgatccagagcctaaggagtgtgaatgacaaacaataaacctgcttgggataacgtgattg

SEQ ID NO: 417921 - DNA, 377 bp, Homo sapiens
ggcatccagattggcatggaagaagtaaaacaagctctatcttaaattactgatcttgtatgtaggaaatcctaaagaatccacaaataaagctattagaacaaataggcaagcacatttgcaggatacaagataaatactcaaaaatcctgtgttattctgtacattagcaatgaacaatccaaaaatgaaatcagaccaggcacagtggctcctgcctgtaatcccagcactttgggaggcgaggtaggtggatcacttgaggccaggagttcaataccagcctggccaacatggtgaaactccatctctactaaaaaatacaaaaaactagctgggcatggtgatgcgcacctgtaatcccagctactagggag

SEQ ID NO: 417922 - DNA, 543 bp, Homo sapiens
tgtgaggctgtgtgtgtgtgcgtgtgtgcgcgcgtgcaggctttaaatgggtgtatttagcaatctgtgattttttaacaaaggtttaattatattttcacatggcctcagtcatgcccctgtgtaactggctcagtaagagataagggtgcacgtagctcaggccgtagcaggtgctaatgaagagtccccgttgagagagggcttcttaaaccactgagggaagggctctcccactggagaagaaacactgaagtatattcttctccatcctcctcccaaagtgttgacagagaaaaaaaacagagtgaccttgtttcctgccctgcctgacagtgagttaaacagaattccaaactagaggactggacatttattcacctgcaaaaacatttttttttgcagcatttcaaatgtacttgtgtctagatatggtttcaattacatggaattggcctttgtctttaagctcttattttctctcctgagtgtcccttgaacctctttatgttcacaaaaatcctactgtgtggtttttaaagc

SEQ ID NO: 417923 - DNA, 313 bp, Homo sapiens
tagctcatcccactggcacatgtcccagagtaagctgggctggaagcttttagtgtagttaaaagatgccagtctgtcatttgcatgcactgtaattgggcaagtggtttcaggctgagctttacattatccttccactgagagcagctggtggtgggctgtagattccatatgagctggggacttatcatctggtgtgtttagtgcaatcctgcctcatcttgggagcaattttttattgaatgataataataatgcacaatcttggtgaaagataatgcttgtggttattagaatgtgtagactgagtagg

SEQ ID NO: 417924 - DNA, 900 bp, Homo sapiens
agctggcaaggctgggtctagctgggggcagggactgggcagagtggatctgctgtgtctgtggggcctgtgtagaggccctgaggctgtgtgccccgaatgtaggtggtcctggcagctcccctcctgtggcccgacagggagagccgagcatgggcgctgccccttcctgctgggcatttcttggcaccgcgatgtgtggttagatctggagcacgtggaggtcgttccagcagaatctaccggccacgggagctgggaatgctcaggatgcggggtggtggccctggcaggaggggacctcgtagccgccctcggagctgaggctcccacagcagcgtggggggcggcaggggtggggcgaggaggcttctgggaacatttcctccccctgtactgatacctaacccaggatgtttggggaggggcggggcgaggggtggggcgaggcctgcaggagggtgggcttccctggacctcaagtggagggggctgagcgcagggccaggatgctggtcactgggtggccctgtgagctcccctcccttcaggagtcctccgctctgccacaggaagggcctgaccttcgtctctgtgcacgactgttactggactcacgcagctgatgtctccgtcatgaaccaggtgtgccgggagcagtttgtccgcttgcacagcgagcccatcctgcaggacctgtccagattcctggtcaagcggttctgctctgagccccagaagatcttggaggccagccagctgaaggagacactgcaggcggtgcccaagccaggggccttcgacctggagcaggtgaagcgttccacctacttcttcagctgacaccccgtgagccttgtcagtgtgtaaataaagctcttttgccacccccaaaaaaaa

SEQ ID NO: 417925 - DNA, 3795 bp, Homo sapiens
ctttgcacctgggcgtgcgcagcccaccgacccggccccgctttccactcgcccttgcccgcttttcgactgaggctcctccgtgcagtctgacctttgactcgtggtttcttatgcagcctcctgaccccagggaccgccggtggcgtctgcggccccaggaggagctcgtccgccagcccccaggagcaagaccaagaccgcaggaaggactggggccacgtggagctgctggaggtgctccaggcgcgggtgcggcagctgcaggctgagagcgtgtcggaggtggtggtgaacagggtggatgtggcgcggctcccagaatgtggcagtggagatggtagcctccagccacccaggaaggtccagatgggggccaaggatgccaccccggtgccctgtggccgctgggcaaagatactggagaaggataagcggacccagcagatgcgtatgcagcggttgaaggcgaagctgcagatgccattccagagcggggagttcaaggcgctgaccaggcgcctgcaggtggagccccggctcctgagcaagcagatggccgggtgcctggaggactgcacgcgccaggcccccgagagcccctgggaggagcagctggcccggctgctgcaggaggcccctgggaagctgagcctcgatgtggagcaggccccgtcggggcagcactcgcaggcccagctctcaggtcagcagcagaggctcctggccttcttcaagtgctgcctgctcactgaccagctgcccctcgcccaccacctgctggtcgtccaccacggccagcggcagaagcggaagctgctcacgctggacatgtacaacgccgtgatgcttggctgggcgcggcagggtgccttcaaggagctggtatatgtgttattcatggtgaaggatgccggcttgaccccggacctgctgtcctatgcggctgccctccagtgcatggggaggcaggaccaggacgccgggaccatcgaaaggtgtctggaacagatgagccaggaggggctgaagctgcaggcactcttcaccgccgttctgctgtctgaggaggatcgggccactgttctgaaggccgtgcacaaggtgaagcccaccttcagcctcccgccgcagctgccgcccccggtcaacacctccaagctgctcagggacgtgtatgccaaggatgggcgtgtgtcctacccgaagctgcacctgcccttgaagaccctgcagtgcctctttgagaagcagctccacatggagctggccagcagggtgtgcgtggtgtccgtggagaagcccacgttgccaagcaaggaggtcaagcacgcgcggaagaccctgaagaccctgcgggaccaatgggagaaagcactgtgccgggcgctgcgggagaccaagaaccgcctagagcgcgaggtgtacgagggccggttctcactttaccccttcctgtgcctgctggacgagcgcgaggtggtgcggatgctcctgcaggtcctgcaggcgctgcccgcccaaggtgagtccttcaccaccctggcccgggagctgagtgcgcgcactttcagccggcacgtggtgcagaggcagcgggtcagtggccaggtgcaggcgctgcagaaccactacaggaagtacctctgcttgctggcctccgacgccgaggtgcccgagccctgcctgccgcggcagtactgggaggcgctgggggcgcccgaggccctgcgggagcagccctggcccctgccagtgcagatggagctgggcaagctgctggcggagatgctggtgcaggctacgcagatgccatgcagcctggacaagccgcatcgttcctctcggcttgtccccgtgctctaccacgtgtattccttccgcaacgtccagcagatcggcatcctgaagccgcacccggcctacgtgcagctgctggagaaggccgcggagcccacgctgaccttcgaggcggtggatgtacccatgctttgccccccgctgccctggacatcgccgcactctggtgctttcctgctcagccccaccaagctgatgcgcacggtggaaggcgccacgcagcaccaggagctgctggaaacctgcccgcccaccgcgctgcatggcgcactggacgccctcacccaactgggcaactgcgcctggcgcgtcaacgggcgcgtgctggacctggtgctgcagctcttccaggccaagggctgcccccagctaggcgtgccggccccgccctccgaggcgccccagccgcccgaggcccacctgccgcacagcgccgcgcccgcccgcaaggccgagctgcgccgtgagctggcgcactgccagaaggtggcccgggagatgcacagcctgcgggcggaggcgctgtaccgcctctcgctggcgcagcacctgcgggaccgcgtcttctggctgccgcacaacatggacttccgcggccgcacctacccctgcccgccgcacttcaaccacctgggcagcgacgtggcgcgggccctgctggagttcgcccagggccgcccgctcggcccgcacggcctggattggctcaagatccacctggtcaatctcacggggttgaagaagcgggagccgctgcggaagcgcctggcctttgcggaggaggtgatggatgacatcctggactccgcggaccaacccttgacgggccgaaagtggtggatgggcgcggaggaaccctggcagacgctggcctgctgtatggaggtggcgaacgctgtgcgcgcctccgaccctgccgcctatgtctcccacctccccgtccatcaggacggctcttgcaacggcctgcagcattatgctgctctgggccgcgacagcgtgggcgccgcctccgtcaacctggagccctcggatgtgccgcaggacgtgtacagcggcgtggccgcgcaggtggaggtgttccgtaggcaggacgcccagcggggcatgcgggtggcacaggtgctggaaggtttcatcacccgcaaggtggtgaagcagacggtgatgacggtggtgtacggggtcacgcgctatggcgggcgcctgcagattgagaagcgcctccgggagctgagcgactttccccaggagttcgtgtgggaggcctctcactatctcgtacgccaggtcttcaagagtctacaggagatgttctcggggacccgggccatccagcactggctgaccgagagtgcccgcctcatctcccacatgggctctgtggtggagtgggtcacacccctgggcgtccccgtcatccagccgtatcgcctggactccaaggtcaagcaaataggaggtggaattcagagcatcacctacacccacaacggagacatcagccgaaagcccaacacacgtaagcagaagaacggcttcccgcccaacttcatccactcgctggactcctcccacatgatgctcaccgccctgcactgctacaggaagggcctgaccttcgtctctgtgcacgactgttactggactcacgcagctgatgtctccgtcatgaaccaggtgtgccgggagcagtttgtccgcttgcacagcgagcccatcctgcaggacctgtccagattcctggtcaagcggttctgctctgagccccagaagatcttggaggccagccagctgaaggagacactgcaggcggtgcccaagccaggggccttcgacctggagcaggtgaagcgttccacctacttcttcagctgacaccccgtgagccttgtcagtgtgtaaataaagctcttttgccacccccaaaaaaaa

SEQ ID NO: 417926 - DNA, 3937 bp, Homo sapiens
cccggcaggcggcgcgggcgcatgcgcaggcgcgggccggtggggtggcctggagcggcgtgcgtaatgtcggcactttgctggggccgcggagcggcggggctcaaacgagccctacggccttgcggccgcccgggactccccggcaaagaagggaccgccggtggcgtctgcggccccaggaggagctcgtccgccagcccccaggagcaagaccaagaccgcaggaaggactggggccacgtggagctgctggaggtgctccaggcgcgggtgcggcagctgcaggctgagagcgtgtcggaggtggtggtgaacagggtggatgtggcgcggctcccagaatgtggcagtggagatggtagcctccagccacccaggaaggtccagatgggggccaaggatgccaccccggtgccctgtggccgctgggcaaagatactggagaaggataagcggacccagcagatgcgtatgcagcggttgaaggcgaagctgcagatgccattccagagcggggagttcaaggcgctgaccaggcgcctgcaggtggagccccggctcctgagcaagcagatggccgggtgcctggaggactgcacgcgccaggcccccgagagcccctgggaggagcagctggcccggctgctgcaggaggcccctgggaagctgagcctcgatgtggagcaggccccgtcggggcagcactcgcaggcccagctctcaggtcagcagcagaggctcctggccttcttcaagtgctgcctgctcactgaccagctgcccctcgcccaccacctgctggtcgtccaccacggccagcggcagaagcggaagctgctcacgctggacatgtacaacgccgtgatgcttggctgggcgcggcagggtgccttcaaggagctggtatatgtgttattcatggtgaaggatgccggcttgaccccggacctgctgtcctatgcggctgccctccagtgcatggggaggcaggaccaggacgccgggaccatcgaaaggtgtctggaacagatgagccaggaggggctgaagctgcaggcactcttcaccgccgttctgctgtctgaggaggatcgggccactgttctgaaggccgtgcacaaggtgaagcccaccttcagcctcccgccgcagctgccgcccccggtcaacacctccaagctgctcagggacgtgtatgccaaggatgggcgtgtgtcctacccgaagctgcacctgcccttgaagaccctgcagtgcctctttgagaagcagctccacatggagctggccagcagggtgtgcgtggtgtccgtggagaagcccacgttgccaagcaaggaggtcaagcacgcgcggaagaccctgaagaccctgcgggaccaatgggagaaagcactgtgccgggcgctgcgggagaccaagaaccgcctagagcgcgaggtgtacgagggccggttctcactttaccccttcctgtgcctgctggacgagcgcgaggtggtgcggatgctcctgcaggtcctgcaggcgctgcccgcccaaggtgagtccttcaccaccctggcccgggagctgagtgcgcgcactttcagccggcacgtggtgcagaggcagcgggtcagtggccaggtgcaggcgctgcagaaccactacaggaagtacctctgcttgctggcctccgacgccgaggtgcccgagccctgcctgccgcggcagtactgggaggcgctgggggcgcccgaggccctgcgggagcagccctggcccctgccagtgcagatggagctgggcaagctgctggcggagatgctggtgcaggctacgcagatgccatgcagcctggacaagccgcatcgttcctctcggcttgtccccgtgctctaccacgtgtattccttccgcaacgtccagcagatcggcatcctgaagccgcacccggcctacgtgcagctgctggagaaggccgcggagcccacgctgaccttcgaggcggtggatgtacccatgctttgccccccgctgccctggacatcgccgcactctggtgctttcctgctcagccccaccaagctgatgcgcacggtggaaggcgccacgcagcaccaggagctgctggaaacctgcccgcccaccgcgctgcatggcgcactggacgccctcacccaactgggcaactgcgcctggcgcgtcaacgggcgcgtgctggacctggtgctgcagctcttccaggccaagggctgcccccagctaggcgtgccggccccgccctccgaggcgccccagccgcccgaggcccacctgccgcacagcgccgcgcccgcccgcaaggccgagctgcgccgtgagctggcgcactgccagaaggtggcccgggagatgcacagcctgcgggcggaggcgctgtaccgcctctcgctggcgcagcacctgcgggaccgcgtcttctggctgccgcacaacatggacttccgcggccgcacctacccctgcccgccgcacttcaaccacctgggcagcgacgtggcgcgggccctgctggagttcgcccagggccgcccgctcggcccgcacggcctggattggctcaagatccacctggtcaatctcacggggttgaagaagcgggagccgctgcggaagcgcctggcctttgcggaggaggtgatggatgacatcctggactccgcggaccaacccttgacgggccgaaagtggtggatgggcgcggaggaaccctggcagacgctggcctgctgtatggaggtggcgaacgctgtgcgcgcctccgaccctgccgcctatgtctcccacctccccgtccatcaggacggctcttgcaacggcctgcagcattatgctgctctgggccgcgacagcgtgggcgccgcctccgtcaacctggagccctcggatgtgccgcaggacgtgtacagcggcgtggccgcgcaggtggaggtgttccgtaggcaggacgcccagcggggcatgcgggtggcacaggtgctggaaggtttcatcacccgcaaggtggtgaagcagacggtgatgacggtggtgtacggggtcacgcgctatggcgggcgcctgcagattgagaagcgcctccgggagctgagcgactttccccaggagttcgtgtgggaggcctctcactatctcgtacgccaggtcttcaagagtctacaggagatgttctcggggacccgggccatccagcactggctgaccgagagtgcccgcctcatctcccacatgggctctgtggtggagtgggtcacacccctgggcgtccccgtcatccagccgtatcgcctggactccaaggtcaagcaaataggaggtggaattcagagcatcacctacacccacaacggagacatcagccgaaagcccaacacacgtaagcagaagaacggcttcccgcccaacttcatccactcgctggactcctcccacatgatgctcaccgccctgcactgctacaggaagggcctgaccttcgtctctgtgcacgactgttactggactcacgcagctgatgtctccgtcatgaaccaggtgcccccgtagtctgagcctcagtccacccatgggtggggcccccacactggggcgttgggtaggggtggtgcccagagcctgcctgatcacccctggggatcctctgactcctgcccaggtgtgccgggagcagtttgtccgcttgcacagcgagcccatcctgcaggacctgtccagattcctggtcaagcggttctgctctgagccccagaagatcttggaggccagccagctgaaggagacactgcaggcggtgcccaagccaggggccttcgacctggagcaggtgaagcgttccacctacttcttcagctgacaccccgtgagccttgtcagtgtgtaaataaagctcttttgccacccccaaaaaaaa

SEQ ID NO: 417927 - DNA, 3151 bp, Homo sapiens
agtgctacctccacaaacagagtgctacctccacaacggagacatcagccgaaagcccaacacacgtaagcagaggctcctggccttcttcaagtgctgcctgctcactgaccagctgcccctcgcccaccacctgctggtcgtccaccacggccagcggcagaagcggaagctgctcacgctggacatgtacaacgccgtgatgcttggctgggcgcggcagggtgccttcaaggagctggtatatgtgttattcatggtgaaggatgccggcttgaccccggacctgctgtcctatgcggctgccctccagtgcatggggaggcaggaccaggacgccgggaccatcgaaaggtgtctggaacagatgagccaggaggggctgaagctgcaggcactcttcaccgccgttctgctgtctgaggaggatcgggccactgttctgaaggccgtgcacaaggtgaagcccaccttcagcctcccgccgcagctgccgcccccggtcaacacctccaagctgctcagggacgtgtatgccaaggatgggcgtgtgtcctacccgaagctgcacctgcccttgaagaccctgcagtgcctctttgagaagcagctccacatggagctggccagcagggtgtgcgtggtgtccgtggagaagcccacgttgccaagcaaggaggtcaagcacgcgcggaagaccctgaagaccctgcgggaccaatgggagaaagcactgtgccgggcgctgcgggagaccaagaaccgcctagagcgcgaggtgtacgagggccggttctcactttaccccttcctgtgcctgctggacgagcgcgaggtggtgcggatgctcctgcaggtcctgcaggcgctgcccgcccaaggtgagtccttcaccaccctggcccgggagctgagtgcgcgcactttcagccggcacgtggtgcagaggcagcgggtcagtggccaggtgcaggcgctgcagaaccactacaggaagtacctctgcttgctggcctccgacgccgaggtgcccgagccctgcctgccgcggcagtactgggaggcgctgggggcgcccgaggccctgcgggagcagccctggcccctgccagtgcagatggagctgggcaagctgctggcggagatgctggtgcaggctacgcagatgccatgcagcctggacaagccgcatcgttcctctcggcttgtccccgtgctctaccacgtgtattccttccgcaacgtccagcagatcggcatcctgaagccgcacccggcctacgtgcagctgctggagaaggccgcggagcccacgctgaccttcgaggcggtggatgtacccatgctttgccccccgctgccctggacatcgccgcactctggtgctttcctgctcagccccaccaagctgatgcgcacggtggaaggcgccacgcagcaccaggagctgctggaaacctgcccgcccaccgcgctgcatggcgcactggacgccctcacccaactgggcaactgcgcctggcgcgtcaacgggcgcgtgctggacctggtgctgcagctcttccaggccaagggctgcccccagctaggcgtgccggccccgccctccgaggcgccccagccgcccgaggcccacctgccgcacagcgccgcgcccgcccgcaaggccgagctgcgccgtgagctggcgcactgccagaaggtggcccgggagatgcacagcctgcgggcggaggcgctgtaccgcctctcgctggcgcagcacctgcgggaccgcgtcttctggctgccgcacaacatggacttccgcggccgcacctacccctgcccgccgcacttcaaccacctgggcagcgacgtggcgcgggccctgctggagttcgcccagggccgcccgctcggcccgcacggcctggattggctcaagatccacctggtcaatctcacggggttgaagaagcgggagccgctgcggaagcgcctggcctttgcggaggaggtgatggatgacatcctggactccgcggaccaacccttgacgggccgaaagtggtggatgggcgcggaggaaccctggcagacgctggcctgctgtatggaggtggcgaacgctgtgcgcgcctccgaccctgccgcctatgtctcccacctccccgtccatcaggacggctcttgcaacggcctgcagcattatgctgctctgggccgcgacagcgtgggcgccgcctccgtcaacctggagccctcggatgtgccgcaggacgtgtacagcggcgtggccgcgcaggtggaggtgttccgtaggcaggacgcccagcggggcatgcgggtggcacaggtgctggaaggtttcatcacccgcaaggtggtgaagcagacggtgatgacggtggtgtacggggtcacgcgctatggcgggcgcctgcagattgagaagcgcctccgggagctgagcgactttccccaggagttcgtgtgggaggcctctcactatctcgtacgccaggtcttcaagagtctacaggagatgttctcggggacccgggccatccagcactggctgaccgagagtgcccgcctcatctcccacatgggctctgtggtggagtgggtcacacccctgggcgtccccgtcatccagccgtatcgcctggactccaaggtcaagcaaataggaggtggaattcagagcatcacctacacccacaacggagacatcagccgaaagcccaacacacgtaagcagaagaacggcttcccgcccaacttcatccactcgctggactcctcccacatgatgctcaccgccctgcactgctacaggaagggcctgaccttcgtctctgtgcacgactgttactggactcacgcagctgatgtctccgtcatgaaccaggtgtgccgggagcagtttgtccgcttgcacagcgagcccatcctgcaggacctgtccagattcctggtcaagcggttctgctctgagccccagaagatcttggaggccagccagctgaaggagacactgcaggcggtgcccaagccaggggccttcgacctggagcaggtgaagcgttccacctacttcttcagctgacaccccgtgagccttgtcagtgtgtaaataaagctcttttgccacccccaaaaaaaa

SEQ ID NO: 417928 - DNA, 2996 bp, Homo sapiens
gctaggctttagttgttatttttaattcatctatttctggatgggtcacattcatacagttctgagtttgaggagaaaacagccaacatctgggggtgcagtgaacggtctccccaggctctgccagctcccagcatcaccgcccctgccaccccctgcacggtgcccagtgtcccttctagaggggtcgaggccaggagggtcaaggcctttggtttgcactgctggcactgactttacccgcagcccgcctttccccgcgtcagcgatagccaccagcaacttgcaggagacgcagaaacgcgtgcacccatgctgtctcggggtcctgggagggcaggtcgccctctggcaagcccccaacctcactacccccatccctgcaggatgggcgtgtgtcctacccgaagctgcacctgcccttgaagaccctgcagtgcctctttgagaagcagctccacatggagctggccagcagggtgtgcgtggtgtccgtggagaagcccacgttgccaagcaaggaggtcaagcacgcgcggaagaccctgaagaccctgcgggaccaatgggagaaagcactgtgccgggcgctgcgggagaccaagaaccgcctagagcgcgaggtgtacgagggccggttctcactttaccccttcctgtgcctgctggacgagcgcgaggtggtgcggatgctcctgcaggtcctgcaggcgctgcccgcccaaggtgagtccttcaccaccctggcccgggagctgagtgcgcgcactttcagccggcacgtggtgcagaggcagcgggtcagtggccaggtgcaggcgctgcagaaccactacaggaagtacctctgcttgctggcctccgacgccgaggtgcccgagccctgcctgccgcggcagtactgggaggcgctgggggcgcccgaggccctgcgggagcagccctggcccctgccagtgcagatggagctgggcaagctgctggcggagatgctggtgcaggctacgcagatgccatgcagcctggacaagccgcatcgttcctctcggcttgtccccgtgctctaccacgtgtattccttccgcaacgtccagcagatcggcatcctgaagccgcacccggcctacgtgcagctgctggagaaggccgcggagcccacgctgaccttcgaggcggtggatgtacccatgctttgccccccgctgccctggacatcgccgcactctggtgctttcctgctcagccccaccaagctgatgcgcacggtggaaggcgccacgcagcaccaggagctgctggaaacctgcccgcccaccgcgctgcatggcgcactggacgccctcacccaactgggcaactgcgcctggcgcgtcaacgggcgcgtgctggacctggtgctgcagctcttccaggccaagggctgcccccagctaggcgtgccggccccgccctccgaggcgccccagccgcccgaggcccacctgccgcacagcgccgcgcccgcccgcaaggccgagctgcgccgtgagctggcgcactgccagaaggtggcccgggagatgcacagcctgcgggcggaggcgctgtaccgcctctcgctggcgcagcacctgcgggaccgcgtcttctggctgccgcacaacatggacttccgcggccgcacctacccctgcccgccgcacttcaaccacctgggcagcgacgtggcgcgggccctgctggagttcgcccagggccgcccgctcggcccgcacggcctggattggctcaagatccacctggtcaatctcacggggttgaagaagcgggagccgctgcggaagcgcctggcctttgcggaggaggtgatggatgacatcctggactccgcggaccaacccttgacgggccgaaagtggtggatgggcgcggaggaaccctggcagacgctggcctgctgtatggaggtggcgaacgctgtgcgcgcctccgaccctgccgcctatgtctcccacctccccgtccatcaggacggctcttgcaacggcctgcagcattatgctgctctgggccgcgacagcgtgggcgccgcctccgtcaacctggagccctcggatgtgccgcaggacgtgtacagcggcgtggccgcgcaggtggaggtgttccgtaggcaggacgcccagcggggcatgcgggtggcacaggtgctggaaggtttcatcacccgcaaggtggtgaagcagacggtgatgacggtggtgtacggggtcacgcgctatggcgggcgcctgcagattgagaagcgcctccgggagctgagcgactttccccaggagttcgtgtgggaggcctctcactatctcgtacgccaggtcttcaagagtctacaggagatgttctcggggacccgggccatccagcactggctgaccgagagtgcccgcctcatctcccacatgggctctgtggtggagtgggtcacacccctgggcgtccccgtcatccagccgtatcgcctggactccaaggtcaagcaaataggaggtggaattcagagcatcacctacacccacaacggagacatcagccgaaagcccaacacacgtaagcagaagaacggcttcccgcccaacttcatccactcgctggactcctcccacatgatgctcaccgccctgcactgctacaggaagggcctgaccttcgtctctgtgcacgactgttactggactcacgcagctgatgtctccgtcatgaaccaggtgtgccgggagcagtttgtccgcttgcacagcgagcccatcctgcaggacctgtccagattcctggtcaagcggttctgctctgagccccagaagatcttggaggccagccagctgaaggagacactgcaggcggtgcccaagccaggggccttcgacctggagcaggtgaagcgttccacctacttcttcagctgacaccccgtgagccttgtcagtgtgtaaataaagctcttttgccacccccaaaaaaaa

SEQ ID NO: 417929 - DNA, 1021 bp, Homo sapiens
agctggcaaggctgggtctagctgggggcagggactgggcagagtggatctgctgtgtctgtggggcctgtgtagaggccctgaggctgtgtgccccgaatgtaggtggtcctggcagctcccctcctgtggcccgacagggagagccgagcatgggcgctgccccttcctgctgggcatttcttggcaccgcgatgtgtggttagatctggagcacgtggaggtcgttccagcagaatctaccggccacgggagctgggaatgctcaggatgcggggtggtggccctggcaggaggggacctcgtagccgccctcggagctgaggctcccacagcagcgtggggggcggcaggggtggggcgaggaggcttctgggaacatttcctccccctgtactgatacctaacccaggatgtttggggaggggcggggcgaggggtggggcgaggcctgcaggagggtgggcttccctggacctcaagtggagggggctgagcgcagggccaggatgctggtcactgggtggccctgtgagctcccctcccttcaggagtcctccgctctgccacaggaagggcctgaccttcgtctctgtgcacgactgttactggactcacgcagctgatgtctccgtcatgaaccaggtgcccccgtagtctgagcctcagtccacccatgggtggggcccccacactggggcgttgggtaggggtggtgcccagagcctgcctgatcacccctggggatcctctgactcctgcccaggtgtgccgggagcagtttgtccgcttgcacagcgagcccatcctgcaggacctgtccagattcctggtcaagcggttctgctctgagccccagaagatcttggaggccagccagctgaaggagacactgcaggcggtgcccaagccaggggccttcgacctggagcaggtgaagcgttccacctacttcttcagctgacaccccgtgagccttgtcagtgtgtaaataaagctcttttgccacccccaaaaaaaa

SEQ ID NO: 417930 - DNA, 485 bp, Homo sapiens
agcccccaacctcactacccccatccctgcaggatgggcgtgtgtcctacccgaagctgcacctgcccttgaagaccctgcagtgcctctttgagaagcagctccacatggagctggccagcagggtgtgcgtggtgtccgtggagaagcccacgttgccaagcaaggaggtcaagcacgcggtaggggctgagccggggtcccgtgtccgccgcaggggctgagccggggtcgcgtgtccaccgcacgggctgagccggggtcccgtgtccgccgcaggggctgagccggggtcgcgtgtccgccgcaggggctgagctccgtgtatgcggttgaattgctcatgccctggtctggtcatgcagggcctaggaactcagcctggctgccgctcagggaaaacttgtggggtcccgaggttgggtcttggcctgtgcttctgcgcacactgcagctgggcttttgctcttggctgcgtcaggcac

SEQ ID NO: 417931 - DNA, 3816 bp, Homo sapiens
cccggcaggcggcgcgggcgcatgcgcaggcgcgggccggtggggtggcctggagcggcgtgcgtaatgtcggcactttgctggggccgcggagcggcggggctcaaacgagccctacggccttgcggccgcccgggactccccggcaaagaagggaccgccggtggcgtctgcggccccaggaggagctcgtccgccagcccccaggagcaagaccaagaccgcaggaaggactggggccacgtggagctgctggaggtgctccaggcgcgggtgcggcagctgcaggctgagagcgtgtcggaggtggtggtgaacagggtggatgtggcgcggctcccagaatgtggcagtggagatggtagcctccagccacccaggaaggtccagatgggggccaaggatgccaccccggtgccctgtggccgctgggcaaagatactggagaaggataagcggacccagcagatgcgtatgcagcggttgaaggcgaagctgcagatgccattccagagcggggagttcaaggcgctgaccaggcgcctgcaggtggagccccggctcctgagcaagcagatggccgggtgcctggaggactgcacgcgccaggcccccgagagcccctgggaggagcagctggcccggctgctgcaggaggcccctgggaagctgagcctcgatgtggagcaggccccgtcggggcagcactcgcaggcccagctctcaggtcagcagcagaggctcctggccttcttcaagtgctgcctgctcactgaccagctgcccctcgcccaccacctgctggtcgtccaccacggccagcggcagaagcggaagctgctcacgctggacatgtacaacgccgtgatgcttggctgggcgcggcagggtgccttcaaggagctggtatatgtgttattcatggtgaaggatgccggcttgaccccggacctgctgtcctatgcggctgccctccagtgcatggggaggcaggaccaggacgccgggaccatcgaaaggtgtctggaacagatgagccaggaggggctgaagctgcaggcactcttcaccgccgttctgctgtctgaggaggatcgggccactgttctgaaggccgtgcacaaggtgaagcccaccttcagcctcccgccgcagctgccgcccccggtcaacacctccaagctgctcagggacgtgtatgccaaggatgggcgtgtgtcctacccgaagctgcacctgcccttgaagaccctgcagtgcctctttgagaagcagctccacatggagctggccagcagggtgtgcgtggtgtccgtggagaagcccacgttgccaagcaaggaggtcaagcacgcgcggaagaccctgaagaccctgcgggaccaatgggagaaagcactgtgccgggcgctgcgggagaccaagaaccgcctagagcgcgaggtgtacgagggccggttctcactttaccccttcctgtgcctgctggacgagcgcgaggtggtgcggatgctcctgcaggtcctgcaggcgctgcccgcccaaggtgagtccttcaccaccctggcccgggagctgagtgcgcgcactttcagccggcacgtggtgcagaggcagcgggtcagtggccaggtgcaggcgctgcagaaccactacaggaagtacctctgcttgctggcctccgacgccgaggtgcccgagccctgcctgccgcggcagtactgggaggcgctgggggcgcccgaggccctgcgggagcagccctggcccctgccagtgcagatggagctgggcaagctgctggcggagatgctggtgcaggctacgcagatgccatgcagcctggacaagccgcatcgttcctctcggcttgtccccgtgctctaccacgtgtattccttccgcaacgtccagcagatcggcatcctgaagccgcacccggcctacgtgcagctgctggagaaggccgcggagcccacgctgaccttcgaggcggtggatgtacccatgctttgccccccgctgccctggacatcgccgcactctggtgctttcctgctcagccccaccaagctgatgcgcacggtggaaggcgccacgcagcaccaggagctgctggaaacctgcccgcccaccgcgctgcatggcgcactggacgccctcacccaactgggcaactgcgcctggcgcgtcaacgggcgcgtgctggacctggtgctgcagctcttccaggccaagggctgcccccagctaggcgtgccggccccgccctccgaggcgccccagccgcccgaggcccacctgccgcacagcgccgcgcccgcccgcaaggccgagctgcgccgtgagctggcgcactgccagaaggtggcccgggagatgcacagcctgcgggcggaggcgctgtaccgcctctcgctggcgcagcacctgcgggaccgcgtcttctggctgccgcacaacatggacttccgcggccgcacctacccctgcccgccgcacttcaaccacctgggcagcgacgtggcgcgggccctgctggagttcgcccagggccgcccgctcggcccgcacggcctggattggctcaagatccacctggtcaatctcacggggttgaagaagcgggagccgctgcggaagcgcctggcctttgcggaggaggtgatggatgacatcctggactccgcggaccaacccttgacgggccgaaagtggtggatgggcgcggaggaaccctggcagacgctggcctgctgtatggaggtggcgaacgctgtgcgcgcctccgaccctgccgcctatgtctcccacctccccgtccatcaggacggctcttgcaacggcctgcagcattatgctgctctgggccgcgacagcgtgggcgccgcctccgtcaacctggagccctcggatgtgccgcaggacgtgtacagcggcgtggccgcgcaggtggaggtgttccgtaggcaggacgcccagcggggcatgcgggtggcacaggtgctggaaggtttcatcacccgcaaggtggtgaagcagacggtgatgacggtggtgtacggggtcacgcgctatggcgggcgcctgcagattgagaagcgcctccgggagctgagcgactttccccaggagttcgtgtgggaggcctctcactatctcgtacgccaggtcttcaagagtctacaggagatgttctcggggacccgggccatccagcactggctgaccgagagtgcccgcctcatctcccacatgggctctgtggtggagtgggtcacacccctgggcgtccccgtcatccagccgtatcgcctggactccaaggtcaagcaaataggaggtggaattcagagcatcacctacacccacaacggagacatcagccgaaagcccaacacacgtaagcagaagaacggcttcccgcccaacttcatccactcgctggactcctcccacatgatgctcaccgccctgcactgctacaggaagggcctgaccttcgtctctgtgcacgactgttactggactcacgcagctgatgtctccgtcatgaaccaggtgtgccgggagcagtttgtccgcttgcacagcgagcccatcctgcaggacctgtccagattcctggtcaagcggttctgctctgagccccagaagatcttggaggccagccagctgaaggagacactgcaggcggtgcccaagccaggggccttcgacctggagcaggtgaagcgttccacctacttcttcagctgacaccccgtgagccttgtcagtgtgtaaataaagctcttttgccacccccaaaaaaaa

SEQ ID NO: 417932 - DNA, 558 bp, Homo sapiens
taccttaatgctcagccaacaaactcctcatgataactgcacacaatctgaaaaccactgaaggataagcggacccagcagatgcgtatgcagcggttgaaggcgaagctgcagatgccattccagagcggggagttcaaggcgctgaccaggcgcctgcaggtggagccccggctcctgagcaagcagatggccgggtgcctggaggactgcacgcgccaggcccccgagagcccctgggaggagcagctggcccggctgctgcaggaggcccctgggaagctgagcctcgatgtggagcaggccccgtcggggcagcactcgcaggcccagctctcaggtcagcagcagaggctcctggccttcttcaagtgctgcctgctcactgaccagctgcccctcgcccaccacctgctggtcgtccaccacggccagcggcagaagcggaagctgctcacgctggacatgtacaacgccgtgatgcttggctgggcgcggcaggtaggcagggttcgtgacagaatagggccagcaagtacacgctcacattcccgttgg

SEQ ID NO: 417933 - DNA, 3837 bp, Homo sapiens
cccggcaggcggcgcgggcgcatgcgcaggcgcgggccggtggggtggcctggagcggcgtgcgtaatgtcggcactttgctggggccgcggagcggcggggctcaaacgagccctacggccttgcggccgcccgggactccccggcaaagaagggaccgccggtggcgtctgcggccccaggaggagctcgtccgccagcccccaggagcaagaccaagaccgcaggaaggactggggccacgtggagctgctggaggtgctccaggcgcgggtgcggcagctgcaggctgagagcgtgtcggaggtggtggtgaacagggtggatgtggcgcggctcccagaatgtggcagtggagatggtagcctccagccacccaggaaggtccagatgggggccaaggatgccaccccggtgccctgtggccgctgggcaaagatactggagaaggataagcggacccagcagatgcgtatgcagcggttgaaggcgaagctgcagatgccattccagagcggggagttcaaggcgctgaccaggcgcctgcaggtggagccccggctcctgagcaagcagatggccgggtgcctggaggactgcacgcgccaggcccccgagagcccctgggaggagcagctggcccggctgctgcaggaggcccctgggaagctgagcctcgatgtggagcaggccccgtcggggcagcactcgcaggcccagctctcaggtcagcagcagaggctcctggccttcttcaagtgctgcctgctcactgaccagctgcccctcgcccaccacctgctggtcgtccaccacggccagcggcagaagcggaagctgctcacgctggacatgtacaacgccgtgatgcttggctgggcgcggcagggtgccttcaaggagctggtatatgtgttattcatggtgaaggatgccggcttgaccccggacctgctgtcctatgcggctgccctccagtgcatggggaggcaggaccaggacgccgggaccatcgaaaggtgtctggaacagatgagccaggaggggctgaagctgcaggcactcttcaccgccgttctgctgtctgaggaggatcgggccactgttctgaaggccgtgcacaaggtgaagcccaccttcagcctcccgccgcagctgccgcccccggtcaacacctccaagctgctcagggacgtgtatgccaaggatgggcgtgtgtcctacccgaagctgcacctgcccttgaagaccctgcagtgcctctttgagaagcagctccacatggagctggccagcagggtgtgcgtggtgtccgtggagaagcccacgttgccaagcaaggaggtcaagcacgcgcggaagaccctgaagaccctgcgggaccaatgggagaaagcactgtgccgggcgctgcgggagaccaagaaccgcctagagcgcgaggtgtacgagggccggttctcactttaccccttcctgtgcctgctggacgagcgcgaggtggtgcggatgctcctgcaggtcctgcaggcgctgcccgcccaaggtgagtccttcaccaccctggcccgggagctgagtgcgcgcactttcagccggcacgtggtgcagaggcagcgggtcagtggccaggtgcaggcgctgcagaaccactacaggaagtacctctgcttgctggcctccgacgccgaggtgcccgagccctgcctgccgcggcagtactgggaggcgctgggggcgcccgaggccctgcgggagcagccctggcccctgccagtgcagatggagctgggcaagctgctggcggagatgctggtgcaggctacgcagatgccatgcagcctggacaagccgcatcgttcctctcggcttgtccccgtgctctaccacgtgtattccttccgcaacgtccagcagatcggcatcctgaagccgcacccggcctacgtgcagctgctggagaaggccgcggagcccacgctgaccttcgaggcggtggatgtacccatgctttgccccccgctgccctggacatcgccgcactctggtgctttcctgctcagccccaccaagctgatgcgcacggtggaaggcgccacgcagcaccaggagctgctggaaacctgcccgcccaccgcgctgcatggcgcactggacgccctcacccaactgggcaactgcgcctggcgcgtcaacgggcgcgtgctggacctggtgctgcagctcttccaggccaagggctgcccccagctaggcgtgccggccccgccctccgaggcgccccagccgcccgaggcccacctgccgcacagcgccgcgcccgcccgcaaggccgagctgcgccgtgagctggcgcactgccagaaggtggcccgggagatgcacagcctgcgggcggaggcgctgtaccgcctctcgctggcgcagcacctgcgggaccgcgtcttctggctgccgcacaacatggacttccgcggccgcacctacccctgcccgccgcacttcaaccacctgggcagcgacgtggcgcgggccctgctggagttcgcccagggccgcccgctcggcccgcacggcctggattggctcaagatccacctggtcaatctcacggggttgaagaagcgggagccgctgcggaagcgcctggcctttgcggaggaggtgatggatgacatcctggactccgcggaccaacccttgacgggccgaaagtggtggatgggcgcggaggaaccctggcagacgctggcctgctgtatggaggtggcgaacgctgtgcgcgcctccgaccctgccgcctatgtctcccacctccccgtccatcaggacggctcttgcaacggcctgcagcattatgctgctctgggccgcgacagcgtgggcgccgcctccgtcaacctggagccctcggatgtgccgcaggacgtgtacagcggcgtggccgcgcaggtggaggtgttccgtaggcaggacgcccagcggggcatgcgggtggcacaggtgctggaaggtttcatcacccgcaaggtggtgaagcagacggtgatgacggtggtgtacggggtcacgcgctatggcgggcgcctgcagattgagaagcgcctccgggagctgagcgactttccccaggagttcgtgtgggaggcctctcactatctcgtacgccaggtcttcaagagtctacaggagatgttctcggggacccgggccatccagcactggctgaccgagagtgcccgcctcatctcccacatgggctctgtggtggagtgggtcacacccctgggcgtccccgtcatccagccgtatcgcctggactccaaggtcaagcaaataggaggtggaattcagagcatcacctacacccacaacggagacatcagccgaaagcccaacacacgtaagcagaagaacggcttcccgcccaacttcatccactcgctggactcctcccacatgatgctcaccgccctgcactgctacaggagtcctccgctctgccacaggaagggcctgaccttcgtctctgtgcacgactgttactggactcacgcagctgatgtctccgtcatgaaccaggtgtgccgggagcagtttgtccgcttgcacagcgagcccatcctgcaggacctgtccagattcctggtcaagcggttctgctctgagccccagaagatcttggaggccagccagctgaaggagacactgcaggcggtgcccaagccaggggccttcgacctggagcaggtgaagcgttccacctacttcttcagctgacaccccgtgagccttgtcagtgtgtaaataaagctcttttgccacccccaaaaaaaa

SEQ ID NO: 417934 - DNA, 3509 bp, Homo sapiens
cccggcaggcggcgcgggcgcatgcgcaggcgcgggccggtggggtggcctggagcggcgtgcgtaatgtcggcactttgctggggccgcggagcggcggggctcaaacgagccctacggccttgcggccgcccgggactccccggcaaagaagggaccgccggtggcgtctgcggccccaggaggagctcgtccgccagcccccaggagcaagaccaagaccgcaggaaggactggggccacgtggagctgctggaggtgctccaggcgcgggtgcggcagctgcaggctgagagcgtgtcggaggtggtggtgaacagggtggatgtggcgcggctcccagaatgtggcagtggagatggtagcctccagccacccaggaaggtccagatgggggccaaggatgccaccccggtgccctgtggccgctgggcaaagatactggagaaggataagcggacccagcagatgcgtatgcagcggttgaaggcgaagctgcagatgccattccagagcggggagttcaaggcgctgaccaggcgcctgcaggtggagccccggctcctgagcaagcagatggccgggtgcctggaggactgcacgcgccaggcccccgagagcccctgggaggagcagctggcccggctgctgcaggaggcccctgggaagctgagcctcgatgtggagcaggccccgtcggggcagcactcgcaggcccagctctcaggtcagcagcagaggctcctggccttcttcaagtgctgcctgctcactgaccagctgcccctcgcccaccacctgctggtcgtccaccacggccagcggcagaagcggaagctgctcacgctggacatgtacaacgccgtgatgcttggctgggcgcggcagggtgccttcaaggagctggtatatgtgttattcatggtgaaggatgccggcttgaccccggacctgctgtcctatgcggctgccctccagtgcatggggaggcaggaccaggacgccgggaccatcgaaaggtgtctggaacagatgagccaggaggggctgaagctgcaggcactcttcaccgccgttctgctgtctgaggaggatcgggccactgttctgaaggccgtgcacaaggtgaagcccaccttcagcctcccgccgcagctgccgcccccggtcaacacctccaagctgctcagggacgtgtatgccaaggatgggcgtgtgtcctacccgaagctgcacctgcccttgaagaccctgcagtgcctctttgagaagcagctccacatggagctggccagcagggtgtgcgtggtgtccgtggagaagcccacgttgccaagcaaggaggtcaagcacgcgcggaagaccctgaagaccctgcgggaccaatgggagaaagcactgtgccgggcgctgcgggagaccaagaaccgcctagagcgcgaggtgtacgagggccggttctcactttaccccttcctgtgcctgctggacgagcgcgaggtggtgcggatgctcctgcaggtcctgcaggcgctgcccgcccaaggtgagtccttcaccaccctggcccgggagctgagtgcgcgcactttcagccggcacgtggtgcagaggcagcgggtcagtggccaggtgcaggcgctgcagaaccactacaggaagtacctctgcttgctggcctccgacgccgaggtgcccgagccctgcctgccgcggcagtactgggaggcgctgggggcgcccgaggccctgcgggagcagccctggcccctgccagtgcagatggagctgggcaagctgctggcggagatgctggtgcaggctacgcagatgccatgcagcctggacaagccgcatcgttcctctcggcttgtccccgtgctctaccacgtgtattccttccgcaacgtccagcagatcggcatcctgaagccgcacccggcctacgtgcagctgctggagaaggccgcggagcccacgctgaccttcgaggcggtggatgtacccatgctttgccccccgctgccctggacatcgccgcactctggtgctttcctgctcagccccaccaagctgatgcgcacggtggaaggcgccacgcagcaccaggagctgctggaaacctgcccgcccaccgcgctgcatggcgcactggacgccctcacccaactgggcaactgcgcctggcgcgtcaacgggcgcgtgctggacctggtgctgcagctcttccaggccaagggctgcccccagctaggcgtgccggccccgccctccgaggcgccccagccgcccgaggcccacctgccgcacagcgccgcgcccgcccgcaaggccgagctgcgccgtgagctggcgcactgccagaaggtggcccgggagatgcacagcctgcgggcggaggcgctgtaccgcctctcgctggcgcagcacctgcgggaccgcgtcttctggctgccgcacaacatggacttccgcggccgcacctacccctgcccgccgcacttcaaccacctgggcagcgacgtggcgcgggccctgctggagttcgcccagggccgcccgctcggcccgcacggcctggattggctcaagatccacctggtcaatctcacggggttgaagaagcgggagccgctgcggaagcgcctggcctttgcggaggaggtgatggatgacatcctggactccgcggaccaacccttgacgggccgaaagtggtggatgggcgcggaggaaccctggcagacgctggcctgctgtatggaggtggcgaacgctgtgcgcgcctccgaccctgccgcctatgtctcccacctccccgtccatcaggacggctcttgcaacggcctgcagcattatgctgctctgggccgcgacagcgtgggcgccgcctccgtcaacctggagccctcggatgtgccgcaggacgtgtacagcggcgtggccgcgcaggtggaggtgttccgtaggcaggacgcccagcggggcatgcgggtggcacaggtgctggaaggtttcatcacccgcaaggtggtgaagcagacggtgatgacggtggtgtacggggtcacgcgctatggcgggcgcctgcagattgagaagcgcctccgggagctgagcgactttccccaggagttcgtgtgggaggcctctcactatctcgtacgccaggtcttcaagagtctacaggagatgttctcggggacccgggccatccagcactggctgaccgagagtgcccgcctcatctcccacatgggctctgtggtggagtgggtcacacccctgggcgtccccgtcatccagccgtatcgcctggactccaaggtcaagcaaataggaggtggaattcagagcatcacctacacccacaacggagacatcagccgaaagcccaacacacgtaagcagaagaacggcttcccgcccaacttcatccactcgctggactcctcccacatgaggccacgcggtggcctcatgaggcgcggtggcctcatgaggccacg

SEQ ID NO: 417935 - DNA, 1928 bp, Homo sapiens
cccggcaggcggcgcgggcgcatgcgcaggcgcgggccggtggggtggcctggagcggcgtgcgtaatgtcggcactttgctggggccgcggagcggcggggctcaaacgagccctacggccttgcggccgcccgggactccccggcaaagaagggaccgccggtggcgtctgcggccccaggaggagctcgtccgccagcccccaggagcaagaccaagaccgcaggaaggactggggccacgtggagctgctggaggtgctccaggcgcgggtgcggcagctgcaggctgagagcgtgtcggaggtggtggtgaacagggtggatgtggcgcggctcccagaatgtggcagtggagatggtagcctccagccacccaggaaggtccagatgggggccaaggatgccaccccggtgccctgtggccgctgggcaaagatactggagaaggataagcggacccagcagatgcgtatgcagcggttgaaggcgaagctgcagatgccattccagagcggggagttcaaggcgctgaccaggcgcctgcaggtggagccccggctcctgagcaagcagatggccgggtgcctggaggactgcacgcgccaggcccccgagagcccctgggaggagcagctggcccggctgctgcaggaggcccctgggaagctgagcctcgatgtggagcaggccccgtcggggcagcactcgcaggcccagctctcaggtcagcagcagaggctcctggccttcttcaagtgctgcctgctcactgaccagctgcccctcgcccaccacctgctggtcgtccaccacggccagcggcagaagcggaagctgctcacgctggacatgtacaacgccgtgatgcttggctgggcgcggcagggtgccttcaaggagctggtatatgtgttattcatggtgaaggatgccggcttgaccccggacctgctgtcctatgcggctgccctccagtgcatggggaggcaggaccaggacgccgggaccatcgaaaggtgtctggaacagatgagccaggaggggctgaagctgcaggcactcttcaccgccgttctgctgtctgaggaggatcgggccactgttctgaaggccgtgcacaaggtgaagcccaccttcagcctcccgccgcagctgccgcccccggtcaacacctccaagctgctcagggacgtgtatgccaaggatgggcgtgtgtcctacccgaagctgcacctgcccttgaagaccctgcagtgcctctttgagaagcagctccacatggagctggccagcagggtgtgcgtggtgtccgtggagaagcccacgttgccaagcaaggaggtcaagcacgcgcggaagaccctgaagaccctgcgggaccaatgggagaaagcactgtgccgggcgctgcgggagaccaagaaccgcctagagcgcgaggtcaaataggaggtggaattcagagcatcacctacacccacaacggagacatcagccgaaagcccaacacacgtaagcagaagaacggcttcccgcccaacttcatccactcgctggactcctcccacatgatgctcaccgccctgcactgctacaggaagggcctgaccttcgtctctgtgcacgactgttactggactcacgcagctgatgtctccgtcatgaaccaggtgtgccgggagcagtttgtccgcttgcacagcgagcccatcctgcaggacctgtccagattcctggtcaagcggttctgctctgagccccagaagatcttggaggccagccagctgaaggagacactgcaggcggtgcccaagccaggggccttcgacctggagcaggtgaagcgttccacctacttcttcagctgacaccccgtgagccttgtcagtgtgtaaataaagctcttttgccacccccaaaaaaaa

SEQ ID NO: 417936 - DNA, 620 bp, Homo sapiens
gcggccgcccgggactccccggcaaagaaggtaacacaaagggagacggccaggcagcccgggggccacggcgtgggctcctccccgcgcggccggggcctttggcgctttgacctttgcctctttgcacctgggcgtgcgcagcccaccgacccggccccgctttccactcgcccttgcccgcttttcgactgaggctcctccgtgcagtctgacctttgactcgtggtttcttatgcagcctcctgaccccaggtgtggtgtttagggctcttaacctttgacctgctgcacctcgagtgcgaggaaccctctctcggcggttccgcgcccgtgttcgccgcggcggggcccttccaccttcgctgtcttagtttctttccaacttaagcccgtgctccgagagtttccgctgcgtttagggctcctttgcccttcgacccttcggcttctgcctttatggaggcccccgcccacacgcccggccccgctcagccgctctcgtctttcccgcagggaccgccggtggcgtctgcggccccaggaggagctcgtccgccagcccccaggagcaagaccaagaccgcaggaaggactggggccacgtggagctgctggag

SEQ ID NO: 417937 - DNA, 251 bp, Homo sapiens
gatctttaaaagaagtactgcatgggctttattatttctataaacacgaaggttattttttttaaagtatgacgattgttcctttgcagccagcttgtttatggcaatttttgtgtaattttatggatgaggaataatatcctgaaaggtaaaattgatcacacttaaaatatgtaagaagtaaaattgaaaggtctgttagcaagaggaaaacagtattaaaattcaatgttctaagtaaaaatgtctga

SEQ ID NO: 417938 - DNA, 426 bp, Homo sapiens
acacatactttttgtaggagattctttggctcatccactgactctgttcattcatccaacaaattcttactgcacatcaacagggtgctagaaactgtactagattctgagagaaaagaaataaacaacaatgtgaaaataaatgtgtcttcatgaaggatgcgtttttataagggacgtaacaatcattgtttattagagacgaaaatgagtaagtgtaagttgggtaaagaacaatgttatctccctagtggccccaagcctcccacggaagcatgcacctgttgtgaacagtcaatgacggcagggtggactctcctgaatttcatcttttgcttcgaatgtatctctcactacctaattactctattttattaaatctaaggtatcaatgaatttaagtgatgcattcatttatgtaccact

SEQ ID NO: 417939 - DNA, 488 bp, Homo sapiens
atacgtgtgggtagaactaaaatggctttttggtataatactgttaatgattagtatgcagaaaaaaatgaaaaccccggaagtgtcagttactgtgaaagaggcatattttcagttgtgcttattgtgcagttgtacttaaatacatttgctagatgtaattcaagctgctttacccccagggaattgaaggaaaagatatatctgctggtgagcttcaggctttttatgatgatggcatttcacccttctgtttacagtgtcaactgatggagataaattccataaaattgtcattaactcagatactagccttccatgttaggtgctattcacaaatactggataaaagttaatatgggaatgaaaaactaaatgcaagagtttattgctatgaatgattggttaactgcattttgcagcatggaaatcaacacactatgagagtgaaaactttgtgctgaataaattgactcagacaaaaaact

SEQ ID NO: 417940 - DNA, 1945 bp, Homo sapiens
aaacgcctggctttcaccaggcatcagtgtgcttcacttgagagtttggtaccatggttaagatcgagtccatgctaggtaagtcctgttaggaatgtcagtttgtattccgcccacgtgaatgatgctgagcttaatgtattattttgaggggcttcttcagagcagttctcactgagctttccattaacctacactcttccggacggctcttaaaacttgcaggacataatgaaattgggaagagcagagtgttgaagtctatagcatggccttctgcttgaccctgagttcctgaattgaatgtgggagaccacaggccatacttctctaggcactcacatgtctcccttggcataaggaaacatgttagtaatatagttttttagatccaaacagtttatttggatctaaaagtttaagtgttcagttgaaaaacagctattgattttattagtagcaaattatcaccattaaagccagtggttttttttttggtttttttttttggtttttttttttttttttgcgacagagtctcttgtcgcccaggctggagtacaatggtgtgatctcagctcactgcaacctccgcctcccaggttcaagcgattctcctgcctcagcctcctgcgtagctgggattacaggtgcccaccaccacaccctgctaatttttgtacttttagtagagatggggtttcgccatgttggccaggctggtcttgaactgctgacctcaggtgatccacccgcctcggcctcccaaagtgctggtattacagtcatgagccacctcacccagcctgtttttgagacggagtttcacttttgtcgcccaggctggagtgcaatggcgctatctcagctcactgcaacccccacctcccaggttcaagcgattctcctgcctcagcctcccgagtagctgggattacaggcatgtgccaccacccctggctaattttgtatttttagtggagacggggtttctccatgttggtcaggctggtcttaaactcccgacctcaagtgatctgcccgcctcggctcccaaagtgctgggattacaggcgtgagccattgcacctgtccctgccagtgtgttttaaaatagtttagggggttgagaaaagatgcagtgagccattattctcctttagcaggtagtctcttaaaaattgatgtggattttaaaaatataccattgagaacacgtatctttctcaaacttgaccttgaacagagctggatgggggtgggagggaaacagatttggggcatatggaagatattcttgggagccccatattctacctcagttaccgaaggctattagaacctctgaatttttcctcctctgaaatcctaagcacaacttcagaaaaccatgtctgatagcggatgtcttcctgctgtgaggagctgcttgatgtggggaccaaggtgtgggtgtgggcggaatgtatcctagtagaaacagtgaacctcagatatgaataaataagcaagagaccgaaagttaagtgtgtgacaacctcagtactgtagttaagctacattctttaaattagcttttgtgaactgattgggaacctaatctcttttgtaactgtttgagaaaaactctgaagcacctgatattcaaacaaacttatggtacttactaactcatttgtaaattggcgatgtagctggctgtagtattgctttgataatttttttcttttaatttacctaatatatataaggaaggggtttggatatattaaaataggtgttaattttatctatttaccaataaattcatctctttaaaaaacaagcagcaagagggagaggcacagagaagaaaaaagaaaagagaaagagaaggagagagaaaaagaggagaaaagaaaaacgaaagaagaggggaagaaggggagggacgaaaacgagaggc

SEQ ID NO: 417941 - DNA, 1187 bp, Homo sapiens
cgggtccagcgcacgtttctcgggatgtcatgagccacctcacccagcctgtttttgagacggagtttcacttttgtcgcccaggctggagtgcaatggcgctatctcagctcactgcaacccccacctcccaggttcaagcgattctcctgcctcagcctcccgagtagctgggattacaggcatgtgccaccacccctggctaattttgtatttttagtggagacggggtttctccatgttggtcaggctggtcttaaactcccgacctcaagtgatctgcccgcctcggctcccaaagtgctgggattacaggcgtgagccattgcacctgtccctgccagtgtgttttaaaatagtttagggggttgagaaaagatgcagtgagccattattctcctttagcaggtagtctcttaaaaattgatgtggattttaaaaatataccattgagaacacgtatctttctcaaacttgaccttgaacagagctggatgggggtgggagggaaacagatttggggcatatggaagatattcttgggagccccatattctacctcagttaccgaaggctattagaacctctgaatttttcctcctctgaaatcctaagcacaacttcagaaaaccatgtctgatagcggatgtcttcctgctgtgaggagctgcttgatgtggggaccaaggtgtgggtgtgggcggaatgtatcctagtagaaacagtgaacctcagatatgaataaataagcaagagaccgaaagttaagtgtgtgacaacctcagtactgtagttaagctacattctttaaattagcttttgtgaactgattgggaacctaatctcttttgtaactgtttgagaaaaactctgaagcacctgatattcaaacaaacttatggtacttactaactcatttgtaaattggcgatgtagctggctgtagtattgctttgataatttttttcttttaatttacctaatatatataaggaaggggtttggatatattaaaataggtgttaattttatctatttaccaataaattcatctctttaaaaaacaagcagcaagagggagaggcacagagaagaaaaaagaaaagagaaagagaaggagagagaaaaagaggagaaaagaaaaacgaaagaagaggggaagaaggggagggacgaaaacgagaggc

SEQ ID NO: 417942 - DNA, 1181 bp, Homo sapiens
cagaaactcctccaagcaacctaactcttaacccaacttctgacaccatgacctgctgccagaccagcttctgtggatatcccagcttctccatcagtgggacctgtggctccagctgctgccagccaagctgctgtgagaccagctgctgccagccacgcagctgccagactagcttctgcggatttcccagcttctcaaccagtgggacctgcagctccagttgctgccagccaagctgctgtgagaccagctgctgccagccaagctgctgtgagaccagctgctgccagccaagctgctgccagatcagctcctgcggaactggctgtggcattggtggtggcatcagctatggccaggagggcagcagtggagctgtgagcacccgtatcaggtggtgccgcccagacagtcgtgtggagggcacctacctacccccctgctgtgtggtgagctgcacgcccccatcctgctgccaactgcaccatgcccaggcctcctgctgccgcccgtcctactgtggacagtcctgctgccgcccagtctgctgctgtgagcccacttgctgaaagccagtttgcttattttcaattgcctaggtcacagtgtctctgaactgttcatcccttgaccacctctggaccactaacaagttctcagactttgcattgcttgtgatggagactactaagtatatgagctcacaattctatctgattccattctacaatgaataccttgacccttcactggggacacagaaatgctacaaagccacctgctgatcatcaatttgcttgggatatactatttctgatatttctgcaggattaaaaattactgacatgttgtggaatttatccatgagaactatccacaagtctaatgtttccatgctttataatctattttatcttgtttacctaaaattttttgcaacatcaaagacaccaaattatagccaagtgacattcctcaagtcaccagagagaatggaagctcatcacccaacattcagcttctaagaagtaggctggactttccacattttaacatctgatccatcccttggtttttggatcataatgatcttgcctgctggatatttcagttatatctgtgatacaatgtcttctgtcatttcttaataaatattatatactaggcaaagaaaccat

SEQ ID NO: 417943 - DNA, 325 bp, Homo sapiens
  misc_feature (264)..(264): n is a, c, g, or t
tgatccatatagactagaaattactatcctcactatacagaaaatggaactgaagagcagaggaatctgttaacttgcagaaggtcacatcggcaataaagggtaaagctcccatttgaacccagttctgccagaccctggagactatgttactaatcaccatggcacctggctcccacttgctatttctgagctcatcttccccatctgaaaaaaaaaataacccatgcctaccttccaggatttctagagaggagcatatgnaaccgtggatcgaaggggctttgtacattaaaagaaatgtaaaaaatttttacttatgatc

SEQ ID NO: 417944 - DNA, 652 bp, Homo sapiens
atattgaagctgcatctacattttaaacctttctagcctttagaatttggggatttatatgcgatccagtgttaggacacagcaagctgaagacttcttttacatggcaaaaccagccctctgacactgtgttttccttaatagctaatgagacagctgtttagtgacggcaacagggattgatgcagattttctttttttaatctgactaggtccactgcttccagatattgtctttttatttttttagtgatgtgattgattttccaacattttattatacagcaaagttgaacattctccagtgagctcacttatacgcagtacctacatgctgtgattctcattttactgtatttgtcttatcatgttatctgtttatttctctctctccctctcttcccccgtctatccacccatccatccattttttcttcttttaaataatttttttaatgcctataatcctagcactttgggaggccaaggcgggcagattgcttgaagccaggagttcgagaccatcctggccaacatggtgaaaccccgtctctactaaaaatacaaaaatgagctggatgtggtgacgggcacctataatcccagctattcaggaagctgaagcatgagaattgcttgaacccaggagggc

SEQ ID NO: 417945 - DNA, 367 bp, Homo sapiens
ttgtgcgccgctgggtcctcggatgtgagggcgatctggctgcgacatctgtcaccccattgatcgccagggttgattcggctgatctggctggctaggcgggtgtccccttcctccctcaccgctccatgtgcgtccctcccgaagctgcgcgctcggtcgaagaggacgaccatccccgatagaggaggaccggtcttcggtcaagggtatacgagtagctgcgctcccctgctagaacctccaaacaagctctcaaggtccatttgtaggagaacgtagggtagtcaagcttccaagactccagacacatccgtcgacgcggccgcgaatttagtagtagtaggctagtagtagtagcggccgc

SEQ ID NO: 417946 - DNA, 359 bp, Homo sapiens
ttgtgcgccgctgggtcctcggatgtgagggcgatctggctgcgacatctgtcaccccattgatcgccagggttgattcggctgatctggctggctaggcgggtgtccccttcctccctcaccgctccatgtgcgtccctcccgaagctgcgcgctcggtcgaagaggacgaccatccccgatagaggaggaccggtcttcggtcaagggtatacgagtagctgcgctcccctgctagaacctccaaacaagctctcaaggtccatttgtaggagaacgtagggtagtcaagcttccaagactccagacacatccaaatgaggcgctgcatgtggcagtctgcctttcttaaaaaaaaa

SEQ ID NO: 417947 - DNA, 411 bp, Homo sapiens
aaagcagtaaaaactcggtttatcaaaaaaaataagatataaagagtaccccgggggtgaaataaatacgataaaaaattatagtgcagcggagaacactggctgcgacatctgtcaccccattgatcgccagggttgattcggctgatctggctggctaggcgggtgtccccttcctccctcaccgctccatgtgcgtccctcccgaagctgcgcgctcggtcgaagaggacgaccatccccgatagaggaggaccggtcttcggtcaagggtatacgagtagctgcgctcccctgctagaacctccaaacaagctctcaaggtccatttgtaggagaacgtagggtagtcaagcttccaagactccagacacatccgaaaggcagactgccgtcgacgcggccgcgaat

SEQ ID NO: 417948 - DNA, 348 bp, Homo sapiens
ttgtgcgccgctgggtcctcggatgtgagggcgatctggctgcgacatctgtcaccccattgatcgccagggttgattcggctgatctggctggctaggcgggtgtccccttcctccctcaccgctccatgtgcgtccctcccgaagctgcgcgctcggtcgaagaggacgaccatccccgatagaggaggaccggtcttcggtcaagggtatacgagtagctgcgctcccctgctagaacctccaaacaagctctcaaggtccatttgtaggagaacgtagggtagtcaagcttccaagactccagacacatccgaaaggcagactgccgtcgacgcggccgcgaat

SEQ ID NO: 417949 - DNA, 471 bp, Homo sapiens
  misc_feature (347)..(347): n is a, c, g, or t
  misc_feature (466)..(466): n is a, c, g, or t
ttgtgcgccgctgggtcctcggatgtgagggcgatctggctgcgacatctgtcaccccattgatcgccagggttgattcggctgatctggctggctaggcgggtgtccccttcctccctcaccgctccatgtgcgtccctcccgaagctgcgcgctcggtcgaagaggacgaccatccccgatagaggaggaccggtcttcggtcaagggtatacgagtagctgcgctcccctgctagaacctccaaacaagctctcaaggtccatttgtaggagaacgtagggtagtcaagcttccaagactccagacacatcctcctgttgcattaagacttgaaagacttgtanatgtgtgatgttcaggcacaggatgctgaaagctatgttactattcttagtttgtaaattgtccttttgataccatcatcttgttttctttttgtaggtataaataaaaaccctgttgncaata

SEQ ID NO: 417950 - DNA, 380 bp, Homo sapiens
cgaatttagtagtagtagcggccgcctactactactaaattcgcggccgcgtcgacctggctgcgacatctgtcaccccattgatcgccagggttgattcggctgatctggctggctaggcgggtgtccccttcctccctcaccgctccatgtgcgtccctcccgaagctgcgcgctcggtcgaagaggacgaccatccccgatagaggaggaccggtcttcggtcaagggtatacgagtagctgcgctcccctgctagaacctccaaacaagctctcaaggtccatttgtaggagaacgtagggtagtcaagcttccaagactccagacacatccaaatgaggcgctgcatgtggcagtctgcctttcttaaaaaaaaa

SEQ ID NO: 417951 - DNA, 441 bp, Homo sapiens
gctcgacctaccacaaattatgcagtcgagttcgcacatttggggaaatcgcaggggtcagcacatccggagtgcaatggataagcctcgccctgggaaaaccaccttcgtgatcatctggctgcgacatctgtcaccccattgatcgccagggttgattcggctgatctggctggctaggcgggtgtccccttcctccctcaccgctccatgtgcgtccctcccgaagctgcgcgctcggtcgaagaggacgaccatccccgatagaggaggaccggtcttcggtcaagggtatacgagtagctgcgctcccctgctagaacctccaaacaagctctcaaggtccatttgtaggagaacgtagggtagtcaagcttccaagactccagacacatccaaatgaggcgctgcatgtggcagtctgcctttcttaaaaaaaaa

SEQ ID NO: 417952 - DNA, 3695 bp, Homo sapiens
cttgcttttttttcctaggccaaatcacccaaggaggcggaagcagacctaagctttgactcataccattccacccaaactgacttgggcccatccctgggaaaacctggtgaaacctctcccccagactccaaatcatctccatctgtcttaatacattctttaggtaaatccactactgacaatgatgtcagaattcagcaactgcaagagattttgcaagatctacagaagagattagagagctctgaagcagagagaaaacagctacaggtcgaactccaatcccgaagggcagaactggtatgcttaaacaacactgagatttcagagaacagctctgacctcagccagaaacttaaagaaactcagagcaaatacgaggaggctatgaaagaagtccttagtgtgcagaagcagatgaaactcggtcttgtctcacctgaaagcatggataattattcacatttccacgagctgagggtcacggaagaggaaataaatgtgctaaagcaggatctgcagaatgcattagaagaaagtgaaagaaataaagagaaagtgagagagttagaggaaaaactggtagagagggagaaaggtacagtgattaagccacctgtggaagagtacgaggaaatgaaaagttcatattgctctgttattgagaatatgaataaggagaaagcatttttgtttgagaaataccaagaagcccaagaagaaatcatgaaattaaaagacacactaaaaagtcagatgacacaggaagccagtgatgaagctgaggacatgaaagaagccatgaataggatgatagatgaactcaataaacaggtgagcgagctgtcacagctgtacaaagaagcccaggctgagctggaggattacaggaagaggaaatctctagaggatgtcacagctgaatatatccataaagcagagcatgagaaactgatgcaattgacaaacgtgtccagggctaaagcagaagatgcactgtctgaaatgaagtctcagtattcaaaagtgttgaatgagttgacccagctcaaacaactggtggatgcacaaaaagagaactctgtctctatcacagaacatttgcaagtgataaccacgctgcggactgcagcaaaagagatggaagaaaaaataagcaatcttaaggaacaccttgcaagcaaggaagtggaagtagcaaagctggagaaacaactcttagaagagaaagctgctatgactgatgcaatggtacctcggtcttcctatgaaaaactccagtcatccttagagagtgaagtgagtgtgttggcatcgaaattaaaggaatctgtgaaagagaaagagaaggtccattcagaggttgtccagattagaagtgaggtctcacaggtgaaaagagaaaaggaaaatattcagactctcttgaaatccaaagagcaagaagtaaatgaacttctgcaaaaattccagcaagctcaggaagaacttgcagaaatgaaaagatacgctgagagctcttcaaaactggaggaagataaagataaaaagataaatgagatgtcgaaggaagtcaccaaattgaaggaggccttgaacagcctctcccagctctcctactcaacaagctcatccaaaaggcagagtcagcagctggaggcgctgcagcagcaagtcaaacagctccagaaccagctggcggaatgcaagaaacaacaccaggaggtcatatcagtttacagaatgcatcttctgtatgctgtgcagggccagatggatgaagatgtccagaaagtactgaagcaaatccttaccatgtgtaaaaaccagtctcaaaagaagtaaagtggattccttggcaggacactgccccttgtcatctgtctttgtgttagatccagagttgtcggcagccgctgccattgttctcattcgtggtatgcactgtggcctagcgtagcttcttccctttccaaaggtttctgaggacttctcccaggagaagactgcccgcctcagaactgcttagagacttcaaaccagcagaggtgaaagtccctgtcatcccttcagattccagagctgggatcagccatgcccagaggtctggtcctgatgctggcaggggggccccctcctccatccctgactggctgagtggctttatcaccaccgagtgatgtgctgaggcctcctgcagtgaatgctccttccattcctgtactcgggcagtgccattcagcacaggagagctctttttgcctttggctttcaattccaaaacatgatttaatttctaactaaattagtatggcactagttatgaagtatctgcttaaaacccttcatcatgatatcctgtggatttaaaaactctaattccatgttttcttcccatctgccttatatatctcatcaccctgcttatcaatattcagtttgatgagcactattaactaaaatatgaaacttaaaaacaaaagcaagttgtccttaaaagttctttttttaagtaaattgttgacatactgcaaattttctatgcaaacttgcctcctgctgttatctgtgaagctcaggaaatccaaacatttgtgtttcaacaagggacagtaaactgtgtgtttacagccaaaagaaatgcctcatagttcttaacctcaacttttgtagaagtatttttttctctgtaatatttttattggctcataaagatgttttcatatctgaactcctaaataagtgaaattacagtagattatattaacaaaatactttttaggtagccatgcttgagactttttaaaaatataactttttccttaaagttttcagctatagcaaaaggtagttatgtatgccagacctaatatgagctgccaccaacacccctagaactttcagccatggtgtcttcagaattgtagcgcatttctgaatctagcaaatcctccttttacccgttgaatgttttgaatgccctgactctaccagcgcccataaatgatctctagaaggactgttagtaccaatctgtttttcaactttgaagctaaaaaccctgatatggtaatattatggtgcatagcagaggtctcggaaaaaaaatatttctgttcactttactttcaggttaaaaatgtttctaacacgcttgcaacttcccttatggcattaatcttgttgagggagagagacagaatcctggactctccaaagtatttaactgaaagtagggcctgctctgacagggcccatgtcccacaaggctgcttggcctcagtgggtgcttggctgtgctggatgatatgttgatctgtattggataaggaccaatgacagcaaagcaaaaatggctttaaagcttggtgttacttttcttaagttgtttaattatagttaagcaatttcaaaaatgctccaaagaaatgtgaaaggaccttttgtcacagcacttcagaaaatacacaacagccccttctgcccccgcacagaaatgctgcagagtatataaaacttgagacatttttgtaggatgcctgacgaggtgtagccttttatcttgtttccggatgcatatttattacgagtactctggttaaatattgaaaagttatatgctgtagtttttagtattttgtctttgtaatttacagaagttattggagaaaataaacttgtttcattttgca

SEQ ID NO: 417953 - DNA, 3641 bp, Homo sapiens
cttgcttttttttcctaggccaaatcacccaaggaggcggaagcagacctaagctttgactcataccattccacccaaactgacttgggcccatccctgggaaaacctggtgaaacctctcccccagactccaaatcatctccatctgtcttaatacattctttaggtaaatccactactgacaatgatgtcagaattcagcaactgcaagagattttgcaagatctacagaagagattagagagctctgaagcagagagaaaacagctacaggtcgaactccaatcccgaagggcagaactggtatgcttaaacaacactgagatttcagagaacagctctgacctcagccagaaacttaaagaaactcagagcaaatacgaggaggctatgaaagaagtccttagtgtgcagaagcagatgaaactcggtcttgtctcacctgaaagcatggataattattcacatttccacgagctgagggtcacggaagaggaaataaatgtgctaaagcaggatctgcagaatgcattagaagaaagtgaaagaaataaagagaaagtgagagagttagaggaaaaactggtagagagggagaaaggtacagtgattaagccacctgtggaagagtacgaggaaatgaaaagttcatattgctctgttattgagaatatgaataaggagaaagcatttttgtttgagaaataccaagaagcccaagaagaaatcatgaaattaaaagacacactaaaaagtcagatgacacaggaagccagtgatgaagctgaggacatgaaagaagccatgaataggatgatagatgaactcaataaacaggtgagcgagctgtcacagctgtacaaagaagcccaggctgagctggaggattacaggaagaggaaatctctagaggatgtcacagctgaatatatccataaagcagagcatgagaaactgatgcaattgacaaacgtgtccagggctaaagcagaagatgcactgtctgaaatgaagtctcagtattcaaaagtgttgaatgagttgacccagctcaaacaactggtggatgcacaaaaagagaactctgtctctatcacagaacatttgcaagtgataaccacgctgcggactgcagcaaaagagatggaagaaaaaataagcaatcttaaggaacaccttgcaagcaaggaagtggaagtagcaaagctggagaaacaactcttagaagagaaagctgctatgactgatgcaatggtacctcggtcttcctatgaaaaactccagtcatccttagagagtgaagtgagtgtgttggcatcgaaattaaaggaatctgtgaaagagaaagagaaggtccattcagaggttgtccagattagaagtgaggtctcacaggtgaaaagagaaaaggaaaatattcagactctcttgaaatccaaagagcaagaagtaaatgaacttctgcaaaaattccagcaagctcaggaagaacttgcagaaatgaaaagatacgctgagagctcttcaaaactggaggaagataaagataaaaagataaatgagatgtcgaaggaagtcaccaaattgaaggaggccttgaacagcctctcccagctctcctactcaacaagctcatccaaaaggcagagtcagcagctggaggcgctgcagcagcaagtcaaacagctccagaaccagctggcggaatgcaagaaacaacaccaggaggtcatatcagtttacagaatgcatcttctgtatgctgtgcagggccagatggatgaagatgtccagaaagtactgaagcaaatccttaccatgtgtaaaaaccagtctcaaaagaagtaaagtggattccttggcaggacactgccccttgtcatctgtctttgtgttagatccagagttgtcggcagccgctgccattgttctcattcgtggtatgcactgtggcctagcgtagcttcttccctttccaaaggtttctgaggacttctcccaggagaagactgcccgcctcagaactgcttagagacttcaaaccagcagaggtgaaagtccctgtcatcccttcagattccagagctgggatcagccatgcccagaggtctggtcctgatgctggcaggggggccccctcctccatccctgactggctgagtggctttatcaccaccgagtgatgtgctgaggcctcctgcagtgaatgctccttccattcctgtactcgggcagtgccattcagcacaggagagctctttttgcctttggctttcaattccaaaacatgatttaatttctaactaaattagtatggcactagttatgaagtatctgcttaaaacccttcatcatgatatcctgtggatttaaaaactctaattccatgttttcttcccatctgccttatatatctcatcaccctgcttatcaatattcagtttgatgagcactattaactaaaatatgaaacttaaaaacaaaagcaagttgtccttaaaagttctttttttaagtaaattgttgacatactgcaaattttctatgcaaacttgcctcctgctgttatctgtgaagctcaggaaatccaaacatttgtgtttcaacaagggacagtaaactgtgtgtttacagccctgtaatatttttattggctcataaagatgttttcatatctgaactcctaaataagtgaaattacagtagattatattaacaaaatactttttaggtagccatgcttgagactttttaaaaatataactttttccttaaagttttcagctatagcaaaaggtagttatgtatgccagacctaatatgagctgccaccaacacccctagaactttcagccatggtgtcttcagaattgtagcgcatttctgaatctagcaaatcctccttttacccgttgaatgttttgaatgccctgactctaccagcgcccataaatgatctctagaaggactgttagtaccaatctgtttttcaactttgaagctaaaaaccctgatatggtaatattatggtgcatagcagaggtctcggaaaaaaaatatttctgttcactttactttcaggttaaaaatgtttctaacacgcttgcaacttcccttatggcattaatcttgttgagggagagagacagaatcctggactctccaaagtatttaactgaaagtagggcctgctctgacagggcccatgtcccacaaggctgcttggcctcagtgggtgcttggctgtgctggatgatatgttgatctgtattggataaggaccaatgacagcaaagcaaaaatggctttaaagcttggtgttacttttcttaagttgtttaattatagttaagcaatttcaaaaatgctccaaagaaatgtgaaaggaccttttgtcacagcacttcagaaaatacacaacagccccttctgcccccgcacagaaatgctgcagagtatataaaacttgagacatttttgtaggatgcctgacgaggtgtagccttttatcttgtttccggatgcatatttattacgagtactctggttaaatattgaaaagttatatgctgtagtttttagtattttgtctttgtaatttacagaagttattggagaaaataaacttgtttcattttgca

SEQ ID NO: 417954 - DNA, 3726 bp, Homo sapiens
cttgcttttttttcctaggccaaatcacccaaggaggcggaagcagacctaagctttgactcataccattccacccaaactgacttgggcccatccctgggaaaacctggtgaaacctctcccccagactccaaatcatctccatctgtcttaatacattctttaggtaaatccactactgacaatgatgtcagaattcagcaactgcaagagattttgcaagatctacagaagagattagagagctctgaagcagagagaaaacagctacaggtcgaactccaatcccgaagggcagaactggtatgcttaaacaacactgagatttcagagaacagctctgacctcagccagaaacttaaagaaactcagagcaaatacgaggaggctatgaaagaagtccttagtgtgcagaagcagatgaaactcggtcttgtctcacctgaaagcatggataattattcacatttccacgagctgagggtcacggaagaggaaataaatgtgctaaagcaggatctgcagaatgcattagaagaaagtgaaagaaataaagagaaagtgagagagttagaggaaaaactggtagagagggagaaaggtacagtgattaagccacctgtggaagagtacgaggaaatgaaaagttcatattgctctgttattgagaatatgaataaggagaaagcatttttgtttgagaaataccaagaagcccaagaagaaatcatgaaattaaaagacacactaaaaagtcagatgacacaggaagccagtgatgaagctgaggacatgaaagaagccatgaataggatgatagatgaactcaataaacaggtgagcgagctgtcacagctgtacaaagaagcccaggctgagctggaggattacaggaagaggaaatctctagaggatgtcacagctgaatatatccataaagcagagcatgagaaactgatgcaattgacaaacgtgtccagggctaaagcagaagatgcactgtctgaaatgaagtctcagtattcaaaagtgttgaatgagttgacccagctcaaacaactggtggatgcacaaaaagagaactctgtctctatcacagaacatttgcaagtgataaccacgctgcggactgcagcaaaagagatggaagaaaaaataagcaatcttaaggaacaccttgcaagcaaggaagtggaagtagcaaagctggagaaacaactcttagaagagaaagctgctatgactgatgcaatggtacctcggtcttcctatgaaaaactccagtcatccttagagagtgaagtgagtgtgttggcatcgaaattaaaggaatctgtgaaagagaaagagaaggtccattcagaggttgtccagattagaagtgaggtctcacaggtgaaaagagaaaaggaaaatattcagactctcttgaaatccaaagagcaagaagtaaatgaacttctgcaaaaattccagcaagctcaggaagaacttgcagaaatgaaaagatacgctgagagctcttcaaaactggaggaagataaagataaaaagataaatgagatgtcgaaggaagtcaccaaattgaaggaggccttgaacagcctctcccagctctcctactcaacaagctcatccaaaaggcagagtcagcagctggaggcgctgcagcagcaagtcaaacagctccagaaccagctggcggaatgcaagaaacaacaccaggaggtcatatcagtttacagaatgcatcttctgtatgctgtgcagggccagatggatgaagatgtccagaaagtactgaagcaaatccttaccatgtgtaaaaaccagtctcaaaagaagtaaagtggattccttggcaggacactgccccttgtcatctgtctttgtgttagatccagagttgtcggcagccgctgccattgttctcattcgtggtatgcactgtggcctagcgtagcttcttccctttccaaaggtttctgaggacttctcccaggagaagactgcccgcctcagaactgcttagagacttcaaaccagcagaggtgaaagtccctgtcatcccttcagattccagagctgggatcagccatgcccagaggtctggtcctgatgctggcaggggggccccctcctccatccctgactggctgagtggctttatcaccaccgagtgatgtgctgaggcctcctgcagtgaatgctccttccattcctgtactcgggcagtgccattcagcacaggagagctctttttgcctttggctttcaattccaaaacatgatttaatttctaactaaattagtatggcactagttatgaagtatctgcttaaaacccttcatcatgatatcctgtggatttaaaaactctaattccatgttttcttcccatctgccttatatatctcatcaccctgcttatcaatattcagtttgatgagcactattaactaaaatatgaaacttaaaaacaaaagcaagttgtccttaaaagttctttttttaagtaaattgttgacatactgcaaattttctatgcaaacttgcctcctgctgttatctgtgaagctcaggaaatccaaacatttgtgtttcaacaagggacagtaaactgtgtgtttacagccaaaagaaatgcctcatagttcttaacctcaacttttgtagaagtatttttttctctgtaatatttttattggctcataaagatgttttcatatctgaactcctaaataagtgaaattacagtagattatattaacaaaatactttttaggtagccatgcttgagactttttaaaaatataactttttccttaaagttttcagctatagcaaaaggtagttatgtatgccagacctaatatgagctgccaccaacacccctagaactttcagccatggtgtcttcagaattgtagcgcatttctgaatctagcaaatcctccttttacccgttgaatgttttgaatgccctgactctaccagcgcccataaatgatctctagaaggactgttagtaccaatctgtttttcaactttgaagctaaaaaccctgatatggtaatattatggtgcatagcagaggtctcggaaaaaaaatatttctgttcactttactttcaggttaaaaatgtttctaacacgcttgcaacttcccttatggcattaatcttgttgagggagagagacagaatcctggactctccaaagtatttaactgaaagtagggcctgctctgacagggcccatgtcccacaaggctgcttggcctcagtgggtgcttggctgtgctggatgatatgttgatctgtattggataaggaccaatgacagcaaagcaaaaatggctttaaagcttggtgttacttttcttaagttgtttaattatagttaagcaatttcaaaaatgctccaaagaaatgtgaaaggaccttttgtcacagcacttcagaaaatacacaacagccccttctgcccccgcacagaaatgctgcagagtatataaaacttgagacatttttgtaggatgcctgacgaggtgtagccttttatcttgtttccggatgcatatttattacgagtactctggttaaatattgaaaagttatatgctgtagtttttagtattttgtctttgtaatttacagaagttattggagaaaataaacttgtttcattttgcaaaaaaaaaaaagacgagacaacaacacaaca

SEQ ID NO: 417955 - DNA, 2658 bp, Homo sapiens
ataaaatcttgagtcagatacccttcttctaaaagtcgagtttcccttacacaaaagttctagaatgtttttagctcacatttatggtttcatggaaacatgaatgatttttttgaattttttgctactaaaaataactaaactataaagggggaattactgactggatcccagttagtcttacaaaaaagagaaagctgctatgactgatgcaatggtacctcggtcttcctatgaaaaactccagtcatccttagagagtgaagtgagtgtgttggcatcgaaattaaaggaatctgtgaaagagaaagagaaggtccattcagaggttgtccagattagaagtgaggtctcacaggtgaaaagagaaaaggaaaatattcagactctcttgaaatccaaagagcaagaagtaaatgaacttctgcaaaaattccagcaagctcaggaagaacttgcagaaatgaaaagatacgctgagagctcttcaaaactggaggaagataaagataaaaagataaatgagatgtcgaaggaagtcaccaaattgaaggaggccttgaacagcctctcccagctctcctactcaacaagctcatccaaaaggcagagtcagcagctggaggcgctgcagcagcaagtcaaacagctccagaaccagctggcggaatgcaagaaacaacaccaggaggtcatatcagtttacagaatgcatcttctgtatgctgtgcagggccagatggatgaagatgtccagaaagtactgaagcaaatccttaccatgtgtaaaaaccagtctcaaaagaagtaaagtggattccttggcaggacactgccccttgtcatctgtctttgtgttagatccagagttgtcggcagccgctgccattgttctcattcgtggtatgcactgtggcctagcgtagcttcttccctttccaaaggtttctgaggacttctcccaggagaagactgcccgcctcagaactgcttagagacttcaaaccagcagaggtgaaagtccctgtcatcccttcagattccagagctgggatcagccatgcccagaggtctggtcctgatgctggcaggggggccccctcctccatccctgactggctgagtggctttatcaccaccgagtgatgtgctgaggcctcctgcagtgaatgctccttccattcctgtactcgggcagtgccattcagcacaggagagctctttttgcctttggctttcaattccaaaacatgatttaatttctaactaaattagtatggcactagttatgaagtatctgcttaaaacccttcatcatgatatcctgtggatttaaaaactctaattccatgttttcttcccatctgccttatatatctcatcaccctgcttatcaatattcagtttgatgagcactattaactaaaatatgaaacttaaaaacaaaagcaagttgtccttaaaagttctttttttaagtaaattgttgacatactgcaaattttctatgcaaacttgcctcctgctgttatctgtgaagctcaggaaatccaaacatttgtgtttcaacaagggacagtaaactgtgtgtttacagccaaaagaaatgcctcatagttcttaacctcaacttttgtagaagtatttttttctctgtaatatttttattggctcataaagatgttttcatatctgaactcctaaataagtgaaattacagtagattatattaacaaaatactttttaggtagccatgcttgagactttttaaaaatataactttttccttaaagttttcagctatagcaaaaggtagttatgtatgccagacctaatatgagctgccaccaacacccctagaactttcagccatggtgtcttcagaattgtagcgcatttctgaatctagcaaatcctccttttacccgttgaatgttttgaatgccctgactctaccagcgcccataaatgatctctagaaggactgttagtaccaatctgtttttcaactttgaagctaaaaaccctgatatggtaatattatggtgcatagcagaggtctcggaaaaaaaatatttctgttcactttactttcaggttaaaaatgtttctaacacgcttgcaacttcccttatggcattaatcttgttgagggagagagacagaatcctggactctccaaagtatttaactgaaagtagggcctgctctgacagggcccatgtcccacaaggctgcttggcctcagtgggtgcttggctgtgctggatgatatgttgatctgtattggataaggaccaatgacagcaaagcaaaaatggctttaaagcttggtgttacttttcttaagttgtttaattatagttaagcaatttcaaaaatgctccaaagaaatgtgaaaggaccttttgtcacagcacttcagaaaatacacaacagccccttctgcccccgcacagaaatgctgcagagtatataaaacttgagacatttttgtaggatgcctgacgaggtgtagccttttatcttgtttccggatgcatatttattacgagtactctggttaaatattgaaaagttatatgctgtagtttttagtattttgtctttgtaatttacagaagttattggagaaaataaacttgtttcattttgca

SEQ ID NO: 417956 - DNA, 3941 bp, Homo sapiens
  misc_feature (3735)..(3735): n is a, c, g, or t
  misc_feature (3740)..(3740): n is a, c, g, or t
  misc_feature (3753)..(3753): n is a, c, g, or t
  misc_feature (3757)..(3757): n is a, c, g, or t
cttgcttttttttcctaggccaaatcacccaaggaggcggaagcagacctaagctttgactcataccattccacccaaactgacttgggcccatccctgggaaaacctggtgaaacctctcccccagactccaaatcatctccatctgtcttaatacattctttaggtaaatccactactgacaatgatgtcagaattcagcaactgcaagagattttgcaagatctacagaagagattagagagctctgaagcagagagaaaacagctacaggtcgaactccaatcccgaagggcagaactggtatgcttaaacaacactgagatttcagagaacagctctgacctcagccagaaacttaaagaaactcagagcaaatacgaggaggctatgaaagaagtccttagtgtgcagaagcagatgaaactcggtcttgtctcacctgaaagcatggataattattcacatttccacgagctgagggtcacggaagaggaaataaatgtgctaaagcaggatctgcagaatgcattagaagaaagtgaaagaaataaagagaaagtgagagagttagaggaaaaactggtagagagggagaaaggtacagtgattaagccacctgtggaagagtacgaggaaatgaaaagttcatattgctctgttattgagaatatgaataaggagaaagcatttttgtttgagaaataccaagaagcccaagaagaaatcatgaaattaaaagacacactaaaaagtcagatgacacaggaagccagtgatgaagctgaggacatgaaagaagccatgaataggatgatagatgaactcaataaacaggtgagcgagctgtcacagctgtacaaagaagcccaggctgagctggaggattacaggaagaggaaatctctagaggatgtcacagctgaatatatccataaagcagagcatgagaaactgatgcaattgacaaacgtgtccagggctaaagcagaagatgcactgtctgaaatgaagtctcagtattcaaaagtgttgaatgagttgacccagctcaaacaactggtggatgcacaaaaagagaactctgtctctatcacagaacatttgcaagtgataaccacgctgcggactgcagcaaaagagatggaagaaaaaataagcaatcttaaggaacaccttgcaagcaaggaagtggaagtagcaaagctggagaaacaactcttagaagagaaagctgctatgactgatgcaatggtacctcggtcttcctatgaaaaactccagtcatccttagagagtgaagtgagtgtgttggcatcgaaattaaaggaatctgtgaaagagaaagagaaggtccattcagaggttgtccagattagaagtgaggtctcacaggtgaaaagagaaaaggaaaatattcagactctcttgaaatccaaagagcaagaagtaaatgaacttctgcaaaaattccagcaagctcaggaagaacttgcagaaatgaaaagatacgctgagagctcttcaaaactggaggaagataaagataaaaagataaatgagatgtcgaaggaagtcaccaaattgaaggaggccttgaacagcctctcccagctctcctactcaacaagctcatccaaaaggcagagtcagcagctggaggcgctgcagcagcaagtcaaacagctccagaaccagctggcggaatgcaagaaacaacaccaggaggtcatatcagtttacagaatgcatcttctgtatgctgtgcagggccagatggatgaagatgtccagaaagtactgaagcaaatccttaccatgtgtaaaaaccagtctcaaaagaagtaaagtggattccttggcaggacactgccccttgtcatctgtctttgtgttagatccagagttgtcggcagccgctgccattgttctcattcgtggtatgcactgtggcctagcgtagcttcttccctttccaaaggtttctgaggacttctcccaggagaagactgcccgcctcagaactgcttagagacttcaaaccagcagaggtgaaagtccctgtcatcccttcagattccagagctgggatcagccatgcccagaggtctggtcctgatgctggcaggggggccccctcctccatccctgactggctgagtggctttatcaccaccgagtgatgtgctgaggcctcctgcagtgaatgctccttccattcctgtactcgggcagtgccattcagcacaggagagctctttttgcctttggctttcaattccaaaacatgatttaatttctaactaaattagtatggcactagttatgaagtatctgcttaaaacccttcatcatgatatcctgtggatttaaaaactctaattccatgttttcttcccatctgccttatatatctcatcaccctgcttatcaatattcagtttgatgagcactattaactaaaatatgaaacttaaaaacaaaagcaagttgtccttaaaagttctttttttaagtaaattgttgacatactgcaaattttctatgcaaacttgcctcctgctgttatctgtgaagctcaggaaatccaaacatttgtgtttcaacaagggacagtaaactgtgtgtttacagccaaaagaaatgcctcatagttcttaacctcaacttttgtagaagtatttttttctctgtaatatttttattggctcataaagatgttttcatatctgaactcctaaataagtgaaattacagtagattatattaacaaaatactttttaggtagccatgcttgagactttttaaaaatataactttttccttaaagttttcagctatagcaaaaggtagttatgtatgccagacctaatatgagctgccaccaacacccctagaactttcagccatggtgtcttcagaattgtagcgcatttctgaatctagcaaatcctccttttacccgttgaatgttttgaatgccctgactctaccagcgcccataaatgatctctagaaggactgttagtaccaatctgtttttcaactttgaagctaaaaaccctgatatggtaatattatggtgcatagcagaggtctcggaaaaaaaatatttctgttcactttactttcaggttaaaaatgtttctaacacgcttgcaacttcccttatggcattaatcttgttgagggagagagacagaatcctggactctccaaagtatttaactgaaagtagggcctgctctgacagggcccatgtcccacaaggctgcttggcctcagtgggtgcttggctgtgctggatgatatgttgatctgtattggataaggaccaatgacagcaaagcaaaaatggctttaaagcttggtgttacttttcttaagttgtttaattatagttaagcaatttcaaaaatgctccaaagaaatgtgaaaggaccttttgtcacagcacttcagaaaatacacaacagccccttctgcccccgcacagaaatgctgcagagtatataaaacttgagacatttttgtaggatgcctgacgaggtgtagccttttatcttgtttccggatgcatatttattacgagtactctggttaaatattgaaaagttatatgctgtagtttttagtattttgtctttgtaatttacagaagttattggagaaaataaacttgtttcattttgcaaaaaaaaaaaaaaaaaaaaaaaaaaaaaaaaaaaaaaaanaaaanaacaaaaaaaaanaaanaaaaaaaaaaaaaaaaaaaaaacaaacgagggggggcggccgccgacgacgccccacagaaagagcagtacaggccaccaggggggggtgcggcggcgccccgaagagagagagagaggcagaagaggggggcaagggagtgtgagaaaggaaaccgggggcaaaacaaagggaggggagagac

SEQ ID NO: 417957 - DNA, 2731 bp, Homo sapiens
  misc_feature (2525)..(2525): n is a, c, g, or t
  misc_feature (2530)..(2530): n is a, c, g, or t
  misc_feature (2543)..(2543): n is a, c, g, or t
  misc_feature (2547)..(2547): n is a, c, g, or t
cttgcttttttttcctaggccaaatcacccaaggaggcggaagcagacctaagctttgactcataccattccacccaaactgacttgggcccatccctgggaaaacctggtgaaacctctcccccagactccaaatcatctccatctgtcttaatacattctttaggtaaatccactactgacaatgatgtcagaattcagcaactgcaagagattttgcaagatctacagaagagattagagagctctgaagcagagagaaaacagctacaggtcgaactccaatcccgaagggcagaactggtatgcttaaacaacactgagatttcagagaacagctctgacctcagccagaaacttaaagaaactcagagcaaatacgaggaggctatgaaagaagtccttagtgtgcagaagcagatgaaactcggtcttgtctcacctgaaagcatggataattattcacatttccacgagctgagggtcacggaagaggaaataaatgtgctaaagcaggatctgcagaatgcattagaagaaagtgaaagaaataaagagaaagtgagagagttagaggaaaaactggtagagagggagaaaggtacagtgattaagccacctgtggaagagtacgaggaaatgaaaagttcatattgctctgttattgagaatatgaataaggagaaagcatttttgtttgagaaataccaagaagcccaagaagaaatcatgaaattaaaagacacactaaaaagtcagatgacacaggaagccagtgatgaagctgaggacatgaaagaagccatgaataggatgatagatgaactcaataaacaggtgagcgagctgtcacagctgtacaaagaagcccaggctgagctggaggattacaggaagaggaaatctctagaggatgtcacagctgaatatatccataaagcagagcatgagaaactgatgcaattgacaaacgtgtccagggctaaagcagaagatgcactgtctgaaatgaagtctcagtattcaaaagtgttgaatgagttgacccagctcaaacaactggtggatgcacaaaaagagaactctgtctctatcacagaacatttgcaagtgataaccacgctgcggactgcagcaaaagagatggaagaaaaaataagcaatcttaaggaacaccttgcaagcaaggaagtggaagtagcaaagctggagaaacaactcttagaagagaaagctgctatgactgatgcaatggtacctcggtcttcctatgaaaaactccagtcatccttagagagtgaagtgagtgtgttggcatcgaaattaaaggaatctgtgaaagagaaagagaaggtccattcagaggttgtccagattagaagtgaggtctcacaggtgaaaagagaaaaggaaaatattcagactctcttgaaatccaaagagcaagaagtaaatgaacttctgcaaaaattccagcaagctcaggaagaacttgcagaaatgaaaagatacgctgagagctcttcaaaactggaggaagataaagataaaaagataaatgagatgtcgaaggaagtcaccaaattgaaggaggccttgaacagcctctcccagctctcctactcaacaagctcatccaaaaggcagagtcagcagctggaggcgctgcagcagcaagtcaaacagctccagaaccagctggcggaatgcaagaaacaacaccaggaggtcatatcagtttacagaatgcatcttctgtatgctgtgcagggccagatggatgaagatgtccagaaagtactgaagcaaatccttaccatgtgtaaaaaccagtctcaaaagaagtaaagtggattccttggcaggacactgccccttgtcatctgtctttgtgttagatccagagttgtcggcagccgctgccattgttctcattcgtggtatgcactgtggcctagcgtagcttcttccctttccaaaggtttctgaggacttctcccaggagaagactgcccgcctcagaactgcttagagacttcaaaccagcagaggtgaaagtccctgtcatcccttcagattccagagctgggatcagccatgcccagaggtctggtcctgatgctggcaggggggccccctcctccatccctgactggctgagtggctttatcaccaccgagtgatgtgctgaggcctcctgcagtgaatgctccttccattcctgtactcgggcagtgccattcagcacaggagagctctttttgcctttggctttcaattccaaaacatgatttaatttctaactaaattagtatggcactagttatgaagtatctgcttaaaacccttcatcatgatatcctgtggatttaaaaactctaattccatgttttcttcccatctgccttatatatctcatcaccctgcttatcaatattcagtttgatgagcactattaactaaaatatgaaacttaaaaacaaaaaaaaaaaaaaaaaaaaaaaaaaaaaaaaaaaaaaaaaaanaaaanaacaaaaaaaaanaaanaaaaaaaaaaaaaaaaaaaaaacaaacgagggggggcggccgccgacgacgccccacagaaagagcagtacaggccaccaggggggggtgcggcggcgccccgaagagagagagagaggcagaagaggggggcaagggagtgtgagaaaggaaaccgggggcaaaacaaagggaggggagagac

SEQ ID NO: 417958 - DNA, 1867 bp, Homo sapiens
cttgcttttttttcctaggccaaatcacccaaggaggcggaagcagacctaagctttgactcataccattccacccaaactgacttgggcccatccctgggaaaacctggtgaaacctctcccccagactccaaatcatctccatctgtcttaatacattctttaggtaaatccactactgacaatgatgtcagaattcagcaactgcaagagattttgcaagatctacagaagagattagagagctctgaagcagagagaaaacagctacaggtcgaactccaatcccgaagggcagaactggtatgcttaaacaacactgagatttcagagaacagctctgacctcagccagaaacttaaagaaactcagagcaaatacgaggaggctatgaaagaagtccttagtgtgcagaagcagatgaaactcggtcttgtctcacctgaaagcatggataattattcacatttccacgagctgagggtcacggaagaggaaataaatgtgctaaagcaggatctgcagaatgcattagaagaaagtgaaagaaataaagagaaagtgagagagttagaggaaaaactggtagagagggagaaaggtacagtgattaagccacctgtggaagagtacgaggaaatgaaaagttcatattgctctgttattgagaatatgaataaggagaaagcatttttgtttgagaaataccaagaagcccaagaagaaatcatgaaattaaaagacacactaaaaagtcagatgacacaggaagccagtgatgaagctgaggacatgaaagaagccatgaataggatgatagatgaactcaataaacaggtgagcgagctgtcacagctgtacaaagaagcccaggctgagctggaggattacaggaagaggaaatctctagaggatgtcacagctgaatatatccataaagcagagcatgagaaactgatgcaattgacaaacgtgtccagggctaaagcagaagatgcactgtctgaaatgaagtctcagtattcaaaagtgttgaatgagttgacccagctcaaacaactggtggatgcacaaaaagagaactctgtctctatcacagaacatttgcaagtgataaccacgctgcggactgcagcaaaagagatggaagaaaaaataagcaatcttaaggaacaccttgcaagcaaggaagtggaagtagcaaagctggagaaacaactcttagaagagaaagctgctatgactgatgcaatggtacctcggtcttcctatgaaaaactccagtcatccttagagagtgaagtgagtgtgttggcatcgaaattaaaggaatctgtgaaagagaaagagaaggtccattcagaggttgtccagattagaagtgaggtctcacaggtgaaaagagaaaaggaaaatattcagactctcttgaaatccaaagagcaagaagtaaatgaacttctgcaaaaattccagcaagctcaggaagaacttgcagaaatgaaaagatacgctgagagctcttcaaaactggaggaagataaagataaaaagataaatgagatgtcgaaggaagtcaccaaattgaaggaggccttgaacagcctctcccagctctcctactcaacaagctcatccaaaaggcagagtcagcagctggaggcgctgcagcagcaagtcaaacagctccagaaccagctggcggaatgcaagaaacaacaccaggaggtcatatcagtttacagaatgcatcttctgtatgctgtgcagggccagatggatgaagatgtccagaaagtactgaagcaaatccttaccatgtgtaaaaaccagtctcaaaagaagtaaagtggattccttggcagga

SEQ ID NO: 417959 - DNA, 2160 bp, Homo sapiens
cttgcttttttttcctaggccaaatcacccaaggaggcggaagcagacctaagctttgactcataccattccacccaaactgacttgggcccatccctgggaaaacctggtgaaacctctcccccagactccaaatcatctccatctgtcttaatacattctttaggtaaatccactactgacaatgatgtcagaattcagcaactgcaagagattttgcaagatctacagaagagattagagagctctgaagcagagagaaaacagctacaggtcgaactccaatcccgaagggcagaactggtatgcttaaacaacactgagatttcagagaacagctctgacctcagccagaaacttaaagaaactcagagcaaatacgaggaggctatgaaagaagtccttagtgtgcagaagcagatgaaactcggtcttgtctcacctgaaagcatggataattattcacatttccacgagctgagggtcacggaagaggaaataaatgtgctaaagcaggatctgcagaatgcattagaagaaagtgaaagaaataaagagaaagtgagagagttagaggaaaaactggtagagagggagaaaggtacagtgattaagccacctgtggaagagtacgaggaaatgaaaagttcatattgctctgttattgagaatatgaataaggagaaagcatttttgtttgagaaataccaagaagcccaagaagaaatcatgaaattaaaagacacactaaaaagtcagatgacacaggaagccagtgatgaagctgaggacatgaaagaagccatgaataggatgatagatgaactcaataaacaggtgagcgagctgtcacagctgtacaaagaagcccaggctgagctggaggattacaggaagaggaaatctctagaggatgtcacagctgaatatatccataaagcagagcatgagaaactgatgcaattgacaaacgtgtccagggctaaagcagaagatgcactgtctgaaatgaagtctcagtattcaaaagtgttgaatgagttgacccagctcaaacaactggtggatgcacaaaaagagaactctgtctctatcacagaacatttgcaagtgataaccacgctgcggactgcagcaaaagagatggaagaaaaaataagcaatcttaaggaacaccttgcaagcaaggaagtggaagtagcaaagctggagaaacaactcttagaagagaaagctgctatgactgatgcaatggtacctcggtcttcctatgaaaaactccagtcatccttagagagtgaagtgagtgtgttggcatcgaaattaaaggaatctgtgaaagagaaagagaaggtccattcagaggttgtccagattagaagtgaggtctcacaggtgaaaagagaaaaggaaaatattcagactctcttgaaatccaaagagcaagaagtaaatgaacttctgcaaaaattccagcaagctcaggaagaacttgcagaaatgaaaagatacgctgagagctcttcaaaactggaggaagataaagataaaaagataaatgagatgtcgaaggaagtcaccaaattgaaggaggccttgaacagcctctcccagctctcctactcaacaagctcatccaaaaggcagagtcagcagctggaggcgctgcagcagcaagtcaaacagctccagaaccagctggcggaatgcaagaaacaacaccaggaggtcatatcagtttacagaatgcatcttctgtatgctgtgcagggccagatggatgaagatgtccagaaagtactgaagcaaatccttaccatgtgtaaaaaccagtctcaaaagaagtaaagtggattccttggcaggaaaacaaaaacaaaaaataactgaggcagcctacaagagcaatcaaacagaatggagccagaagatgcgatcaccaacggaaatacaagacagaaaaggaccactaaagccacgctatatcatgatagaccccgagccatcgaatcaaatatataaatagcgagatgatgtataagataatgtgaagacacaagaacttcggtggcgcactgggtaccacccagcgtagatgaccacgaagataaaaaacgtattatggaaagaaaacataggtaagaaagcagtatatcgaac

SEQ ID NO: 417960 - DNA, 307 bp, Homo sapiens
ttttatgagttttttaatttaaatgtattaaaaaggaattgttccaaagtcttaagtcccagaggccaaaagagatgactatgtttgaggcttacaaatatatgaaattttgctttgtagacatgttactgtctgctaataccattttcctttgcccctagataaatgagatgtcgaaggaagtcaccaaattgaaggaggccttgaacagcctctcccagctctcctactcaacaagctcatccaaaaggcagagtcagcagctggaggcgctgcagcagcaagtcaaacagctccagaaccagct

SEQ ID NO: 417961 - DNA, 517 bp, Homo sapiens
  misc_feature (477)..(477): n is a, c, g, or t
ttcaaatagtatgactattatggttatgtgcatacaaactatcctacctattggattataaaccctgatatttaaatccatcctcacacatatcaccctacgcaaggctgccaagaaggtgtgttggtttttgttggttttttgagaccaggtctcactctgtcacccaggctgaagtgcagtggtgtgatcacggcttactgcagccttgacctccagggctcgtgtgatcctccaacctcagcctctcgaatacctgggactgcaagtgtacaccaccatatacagcattattttttgtgttttgtagagatgggggtctcaccaccttgcccaggctaatcgcgaactcctgagctcaagcgatcctccaattacagcctctcaaaggtctgggattatatgcgtgagccaccatgccaagcctggtatgctctttaaatgaaagccctcttctcttttccccatgaattgtgnaccctagctttttctccatcaattatagatttaggtgatc

SEQ ID NO: 417962 - DNA, 463 bp, Homo sapiens
  misc_feature (423)..(423): n is a, c, g, or t
ttcaaatagtatgactattatggttatgtgcatacaaactatcctacctattggattataaaccctgatatttaaatccatcctcacttgagaccaggtctcactctgtcacccaggctgaagtgcagtggtgtgatcacggcttactgcagccttgacctccagggctcgtgtgatcctccaacctcagcctctcgaatacctgggactgcaagtgtacaccaccatatacagcattattttttgtgttttgtagagatgggggtctcaccaccttgcccaggctaatcgcgaactcctgagctcaagcgatcctccaattacagcctctcaaaggtctgggattatatgcgtgagccaccatgccaagcctggtatgctctttaaatgaaagccctcttctcttttccccatgaattgtgnaccctagctttttctccatcaattatagatttaggtgatc

SEQ ID NO: 417963 - DNA, 432 bp, Homo sapiens
atccttttgcttaaattaattgtttggtacatccaaatgagcctaataatgttatccaaggaagtgttagctgaatcttttaagtatggagagaggaggtatttgaaatccgcttaatcctactaaatatttgaagtttaaaaagaacttaacgctatacaatttagaatgtaaagaggttttagatgtctagaccaactcccttttttacagatgggaaaactaagagctagtgctgttaaatgacttgcctacataactgtttatctttgttactaagaagttgtttgtaagttgaatttcattttacatgtattaaatgttttagagtgttgtgtagtaaattcagatctttatattttgattttccaacctaaggcatttctatattttgtaccattttaactacttttattaaaatatatacctttt

SEQ ID NO: 417964 - DNA, 1855 bp, Homo sapiens
atttttcatagtctattgttttgaactatggattctgttttatggtggatacctaaggtttatataatagttgctggaaaacttaaagtagctggtgagcttcctgttatgtcactattaaagaatgatggctgatgtaactctgcccctgaaatctacaagggtcatgcccaaattaatacaggttaacctttgtagaggtatatatgttggcattatttattgacatttatgcttcaagcatgtcttattttatgtaattttaagaaatactctatttaacttgtgaaatatacctaaaagcatactagttagctcttagactctcacttagggagggtaaagaaacatcactgatgccaatatgaagatctataaacaaatcctttgtttagaacttttttctcttcgtgcacctcacaacacacttaccatggtacatatttcttaatgccactaagaaaggcaagatagtgaacgcagaattatttatgtggtatagtgtttgttttcctgttttagtgcttttgtagctaaacttactggaactgcatcacaactacatttgcagtctcagtgggaggtggactagcctgtggttaattttagagcttaaaagtttataagcattaaaaacacatacatgtattagaatcttgtctaacccctcacaaaggatgatggtgatcagcatgccatcttttgaaggattaattctaaaattgaggactctggtaggttgttttatttccttcccaaccagccattcatttccaattgttctgcctttgaaactttttgtgaaaattgcctgtaccaattgcattggttgcgttgctctgatttaaatgccaaaaacactaaatatttgtgtagtgctgttaaatgaggtttttgatatttccatcaaaatgaatataaaattcacttgatggattttgtagtgatgttttcacagttgaaacaaacatattgctgtgcggtggacagccacttcacagacatgcagacccatttctttagagatattaggtttaaaacccattttaattttattttgctgaaggtttggaatatataaagtaatggattcacaaaatatgatatcttaaaacatgttgaaagatttgaaagtggtgcatttttacttttaagagcagcaatctttgaaattagtcaacaatgcagtcttttttaaaagtcagttttctcaagtagtatgttgtaacgtaagatgtaactgatataactagattttgactggtaaacttaaagtgctttttatatttgaggttgactttaaaaagccattgagcagtcctcagaggttatggactctcaagcgactaatggaatagtgttctgttgtgaagtctagaactaaagcaccttgtattgtctgcttctaaagtgtcctatagtttttaacttaaagtgtaaagagtaacattttatcttatgtcaattaaagttacatttttcatttgttggtgtacatgtgctacctgttttatggggaatgtttaacacgatcctccaagttggttctatgcataaccattcaccaaatactgctgctgtgattccttgaaggaaatattctgtggtctgctatgatgcattgccatcttgctgcttgacaataggtttataaataattagaattacgtgttttaatagtacctttgtatatataacaagatgtaaaattaaagatgaggaatgtgtgtaaatgatcattcactgtttttgttttaaaactggtcagtactatgaagcttctgtggtttgtatgatgttttaactttcactttaaactgcatagaataaattaaattgaaaacaacaaaaaaaa

SEQ ID NO: 417965 - DNA, 677 bp, Homo sapiens
caattttctatttttatgtgactctagggcataacaaaacagtgacagtttcaagcgttaattttaatgcttcctactagctaaatatcatcttaaaatgattatcagaaaaaaaaataatgcccccaaaaacttttgggggcattatttggtactgggaggatatttaaattagatttttcatagtctattgttttgaactatggattctgttttatggtggatacctaaggtttatataatagttgctggaaaacttaaagtagctggtgagcttcctgttatgtcactattaaagaatgatggctgatgtaactctgcccctgaaatctacaagggtcatgcccaaattaatacaggttaacctttgtagaggtatatatgttggcattatttattgacatttatgcttcaagcatgtcttattttatgtaattttaagaaatactctatttaacttgtgaaatatacctaaaagcatactagttagctcttagactctcacttagggagggtaaagaaacatcactgatgccaatatgaagatctataaacaaatcctttgtttagaacttttttctcttcgtgcacctcacaacacacttaccatggtacatatttcttaatgccactaagaaaggcaagatagtgaacgcagaattatttatgtggtatag

SEQ ID NO: 417966 - DNA, 4748 bp, Homo sapiens
  misc_feature (3457)..(3457): n is a, c, g, or t
  misc_feature (3479)..(3479): n is a, c, g, or t
  misc_feature (3922)..(3922): n is a, c, g, or t
  misc_feature (4512)..(4512): n is a, c, g, or t
ggttagaaggagccaggctagagtcctggaaggtggcagtcaggtcgcagggccacagcagtcactctgcgactctctcttccggtgtttctccagcgccaagcgggagaagacggagcctgggagctgggactggaggagcgggaagcgcagtatcgggaccacggctctgggaccaggaaaaacgcagactctccagagtcaatgtctacttcagccagctcaagggcgcgacaacctggcgccgagcatctcaggccgccgcggggaccccccctaagggactcgggaacacctgcctaccctagaagaggcggagaataaccccgtagggagttaagcggcctctgcctacagcgttcctcccgcctccacggcgccgagccctgattgacgttcagccaggccaatcatagcctgtgtctgaggcgcgcggagctggagcgcccagggcatgtccgccgatcccaaggaggcaatctgtcaggcgccgcccgggcggcagtatgcctgagggggtcctccgtgttcgcgcctcccgccgcctgcactgaaaggtctgtacctgagcctggatacttgaacagaggcagacactgcggctcaaaaccccaaggaatatcctagctctgagacaaaaattgggaacctcagcatgagtttgtcacctgaatgaaataaaaaaaatcacgttgaaggctggtgcagtaacatgtgcctgtagtcccagctactctggaggctgagtcaggaggatcacttgagaccagaagttcaggaattcaagactggcttgagcaacatagcaagacttcatttcaaaacaaacagaaaaaagccaccaccttcagtatttcttgccaaagcaaaggagccatttgttctttacgatggtcaggaaaggaagcatcaaggtcatcaaatgaaaaattttcagcatttcagcctctctgctcagggaaatacctgaatctagaatatcacaacatgagccaaaaccgccccatttctcatgccacatgtcactcttaacacaaggttactcaacctcgagcatggttggcatttggggctgaataattcttttttgtagggggctgtcctgggcattgtaggatgctcatgagctacctcagtctctaccacccactagatgccagtagcattgacccctgatctctctacccaagttgtgacaactaaaaccatctctggataatggaggaaccttaaatgcatattgctaaggaaaagccaatctgaaaggattacatattgtatgagtccaactatatggtaatctggaaaaggcaaaaccatggagacagtgaaaaggtagtggttaccagtggtccatgggaagggttggatgaataggtggagcacagaggatttttaaggcagtgaaactattctgaatgatactgtaatggtggatacatgtcatacctttgtcaaaaccaataaaatataacaaccaataaaactgcacaaagagtgaaccctaatgtaaactatggacttaataatgtatcaatattggctcaccaattttaacaaatgtaccacactaatgcaagatgttactaatagtggaaactggagggaagagggcttgaggggacatacgggaactctctgtaattcctgttcagtttttctgtaactgttaaactgtccaaaaaaagtctgtttttataaatggaggcatggttttatatggactaaaatactatgattgcctttttattttacacatggtgaaattagagcaggacatattttaaactcaaaattcacaaaattaatttatgaaaatgtttacccagatcaagaatattaaagaaacttagattaatattgttaccttgaatttattttactgagtaatcctctaagactcctctacacattattaatctagaaggatttttaaagtctttatgacaattaattattggtctacagtcaaattgcatatccccattaactagagttatatttttccattttctgatccaaaaactttaggaacaggaaatgtttattttagaaaacaagaacacttcttaagcatttgctgttaacagttattttcacatgtgcttgtacttattttacacttgtcagaacatagtatttacctttgaaccaaggttttataataagcaagcactttttttatttagaagtcacattttccaagtagaaaaatcattaaaaattcagtcctctgaaggctaatttctttaaatcatttaacctaattgtttaaggtatagattggaatttttctcagcactctcttgaaaacaggtgacagtggaaccctgttaggttcacaaatcctagactttgattatatagcccaggctcaaatttttctcgaatgttacgaacattcaaagcattaggagtcttggtttcatttcttaattttttttcttctgggtatatttgagactcatcttggattcaaataaattaataatagtctcatgaaaccgataaaaatgggagctccattgaacatgagagacattgattcgtagtttctaacatcctccaaatgaggagcccatccctaatttagatgcttctttcaaaggaggctcctttccttcgttatccataatatagtcacaccagtcctgaaaaaacatggaacagactccagatctttatatttcatactctaaagtcgtacaagccaatctgcatttcctctagtggaaactgtatagctggtcatctttccaggacccttttatcaagaaacaatgcagcttctacatttgtgctgcttctacaccaaaacagctggaatgtatatagtatggttctggatgctcttgtatacctcactcttcatttctcacctaacccatgtgctatgatttgaatgtttctcccctgcaaaactcatgttgaaatgtaattgccatgataacagtattaataggtggaatatttaagaggtgattagggtgggattggtgatgttataaaagggtaagttcagccccttcttgctctctctgtcacccttccaccttcctctgtgtgatgatgcaacaaaaaagcccttcccagatgccagcatcttgattttggacttctcagcctacagaactataagccaataaatttctgttatttgttattagtctgtgatattctgttacagtagcacaaaatggactatgacaccatgtgtttacacagaaagaaaaaaatatcatacggtaattgctcctaaatatgcagagaatatgttctgatatccttagtggatgcctgaaactgcagatagtaccaaaccttatatatactatgttttttttcccatacatatgcatgttaaagtttataagttaggcagagtaagatatgaacaataactaataatgaaatagaaacgtaacgatgtgctgtaataaaagttatgtgactgacncctctttttcttcctctttctntcaaaatatcttaatattttcaagccatggataactgaaactgcagaaagtgaaactgtagataaactattaactctatttaaacaataaaagaattataattatattcttgggaaaattaacaattatccaaagtccctttgcaaagggaaaaaaaatgcatgtattggaaaaaatctcaaccacagggttccctaagctttgcaaacaacaaatagcatccacctatccatcctcagagagcaacagttttactgttatttagaaaaagcaactatttcaggctgcaggttgtgcacatcagcacttcccagctctctactaatatgggaaaactgactatccctgacttcagtttttgtgaagctaaatgcctgactagagtttaaactgaggctaattggagatcataaaattttacagcttgctagaggtggaccacnattttgattggaaactttccaccaaccaattctaaaaggtgttaatggtgactattttctaaaacaaatctgaagagtaactaatatgataagaccagaaatatatttctctggcaagtccctataaaaagaaagctaggtaattaaataatctctcaacaatattgttttaggaaacccaatagagagtttcacaggcctgtttcttatgggattgctcaatgtaggtaaatattatcaaaccaaaaagtaattttgtaacagaaattctacagagccccaataccttacagaatgatgagtacaacagtagaaacaaatagaagataacctagaaaaataaagcgaataacttaatggcgtgagttaggttaagaaaagcttcctggaaaaagacatctgaatagaattttagtagatatagctaggaattcccaagcaggtagaagaagggggacattccaggcaaaggaatcatgtgaatgcaaaggtagggagtcatgaatcaatatgttcggtttttttgttgtttttgttttataaagagctataataggctgggcacagtggctgtaatcccagcactttgngaggctgaagcaggtggatcacttgagcccaggagttcgagaccagcctgggcaacatggcaaaacactgtctctacaaaaacaaaaaaaattatccctgttcagtggtgtgcgcctgtggtcccggctacctgggaggctgaggcgagaggagtgctcaaggtgggaggtggagattacagtgagcagagatcacaccactgcactccagcctgagcgacagagagactctgtct

SEQ ID NO: 417967 - DNA, 4847 bp, Homo sapiens
  misc_feature (3556)..(3556): n is a, c, g, or t
  misc_feature (3578)..(3578): n is a, c, g, or t
  misc_feature (4021)..(4021): n is a, c, g, or t
  misc_feature (4611)..(4611): n is a, c, g, or t
ggttagaaggagccaggctagagtcctggaaggtggcagtcaggtcgcagggccacagcagtcactctgcgactctctcttccggtgtttctccagcgccaagcgggagaagacggagcctgggagctgggactggaggagcgggaagcgcagtatcgggaccacggctctgggaccaggaaaaacgcagactctccagagtcaatgtctacttcagccagctcaagggcgcgacaacctggcgccgagcatctcaggccgccgcggggaccccccctaagggactcgggaacacctgcctaccctagaagaggcggagaataaccccgtagggagttaagcggcctctgcctacagcgttcctcccgcctccacggcgccgagccctgattgacgttcagccaggccaatcatagcctgtgtctgaggcgcgcggagctggagcgcccagggcatgtccgccgatcccaaggaggcaatctgtcaggcgccgcccgggcggcagtatgcctgagggggtcctccgtgttcgcgcctcccgccgcctgcactgaaaggtctgtacctgagcctggatacttgaacagaggcagacactgcggctcaaaaccccaagggtaggtgcctattgtgcggagtctcggaacgcctgtctggaagaagagttccggcggctccccgaacgcttggagaaagcgcttggatgcagttgcaggaatatcctagctctgagacaaaaattgggaacctcagcatgagtttgtcacctgaatgaaataaaaaaaatcacgttgaaggctggtgcagtaacatgtgcctgtagtcccagctactctggaggctgagtcaggaggatcacttgagaccagaagttcaggaattcaagactggcttgagcaacatagcaagacttcatttcaaaacaaacagaaaaaagccaccaccttcagtatttcttgccaaagcaaaggagccatttgttctttacgatggtcaggaaaggaagcatcaaggtcatcaaatgaaaaattttcagcatttcagcctctctgctcagggaaatacctgaatctagaatatcacaacatgagccaaaaccgccccatttctcatgccacatgtcactcttaacacaaggttactcaacctcgagcatggttggcatttggggctgaataattcttttttgtagggggctgtcctgggcattgtaggatgctcatgagctacctcagtctctaccacccactagatgccagtagcattgacccctgatctctctacccaagttgtgacaactaaaaccatctctggataatggaggaaccttaaatgcatattgctaaggaaaagccaatctgaaaggattacatattgtatgagtccaactatatggtaatctggaaaaggcaaaaccatggagacagtgaaaaggtagtggttaccagtggtccatgggaagggttggatgaataggtggagcacagaggatttttaaggcagtgaaactattctgaatgatactgtaatggtggatacatgtcatacctttgtcaaaaccaataaaatataacaaccaataaaactgcacaaagagtgaaccctaatgtaaactatggacttaataatgtatcaatattggctcaccaattttaacaaatgtaccacactaatgcaagatgttactaatagtggaaactggagggaagagggcttgaggggacatacgggaactctctgtaattcctgttcagtttttctgtaactgttaaactgtccaaaaaaagtctgtttttataaatggaggcatggttttatatggactaaaatactatgattgcctttttattttacacatggtgaaattagagcaggacatattttaaactcaaaattcacaaaattaatttatgaaaatgtttacccagatcaagaatattaaagaaacttagattaatattgttaccttgaatttattttactgagtaatcctctaagactcctctacacattattaatctagaaggatttttaaagtctttatgacaattaattattggtctacagtcaaattgcatatccccattaactagagttatatttttccattttctgatccaaaaactttaggaacaggaaatgtttattttagaaaacaagaacacttcttaagcatttgctgttaacagttattttcacatgtgcttgtacttattttacacttgtcagaacatagtatttacctttgaaccaaggttttataataagcaagcactttttttatttagaagtcacattttccaagtagaaaaatcattaaaaattcagtcctctgaaggctaatttctttaaatcatttaacctaattgtttaaggtatagattggaatttttctcagcactctcttgaaaacaggtgacagtggaaccctgttaggttcacaaatcctagactttgattatatagcccaggctcaaatttttctcgaatgttacgaacattcaaagcattaggagtcttggtttcatttcttaattttttttcttctgggtatatttgagactcatcttggattcaaataaattaataatagtctcatgaaaccgataaaaatgggagctccattgaacatgagagacattgattcgtagtttctaacatcctccaaatgaggagcccatccctaatttagatgcttctttcaaaggaggctcctttccttcgttatccataatatagtcacaccagtcctgaaaaaacatggaacagactccagatctttatatttcatactctaaagtcgtacaagccaatctgcatttcctctagtggaaactgtatagctggtcatctttccaggacccttttatcaagaaacaatgcagcttctacatttgtgctgcttctacaccaaaacagctggaatgtatatagtatggttctggatgctcttgtatacctcactcttcatttctcacctaacccatgtgctatgatttgaatgtttctcccctgcaaaactcatgttgaaatgtaattgccatgataacagtattaataggtggaatatttaagaggtgattagggtgggattggtgatgttataaaagggtaagttcagccccttcttgctctctctgtcacccttccaccttcctctgtgtgatgatgcaacaaaaaagcccttcccagatgccagcatcttgattttggacttctcagcctacagaactataagccaataaatttctgttatttgttattagtctgtgatattctgttacagtagcacaaaatggactatgacaccatgtgtttacacagaaagaaaaaaatatcatacggtaattgctcctaaatatgcagagaatatgttctgatatccttagtggatgcctgaaactgcagatagtaccaaaccttatatatactatgttttttttcccatacatatgcatgttaaagtttataagttaggcagagtaagatatgaacaataactaataatgaaatagaaacgtaacgatgtgctgtaataaaagttatgtgactgacncctctttttcttcctctttctntcaaaatatcttaatattttcaagccatggataactgaaactgcagaaagtgaaactgtagataaactattaactctatttaaacaataaaagaattataattatattcttgggaaaattaacaattatccaaagtccctttgcaaagggaaaaaaaatgcatgtattggaaaaaatctcaaccacagggttccctaagctttgcaaacaacaaatagcatccacctatccatcctcagagagcaacagttttactgttatttagaaaaagcaactatttcaggctgcaggttgtgcacatcagcacttcccagctctctactaatatgggaaaactgactatccctgacttcagtttttgtgaagctaaatgcctgactagagtttaaactgaggctaattggagatcataaaattttacagcttgctagaggtggaccacnattttgattggaaactttccaccaaccaattctaaaaggtgttaatggtgactattttctaaaacaaatctgaagagtaactaatatgataagaccagaaatatatttctctggcaagtccctataaaaagaaagctaggtaattaaataatctctcaacaatattgttttaggaaacccaatagagagtttcacaggcctgtttcttatgggattgctcaatgtaggtaaatattatcaaaccaaaaagtaattttgtaacagaaattctacagagccccaataccttacagaatgatgagtacaacagtagaaacaaatagaagataacctagaaaaataaagcgaataacttaatggcgtgagttaggttaagaaaagcttcctggaaaaagacatctgaatagaattttagtagatatagctaggaattcccaagcaggtagaagaagggggacattccaggcaaaggaatcatgtgaatgcaaaggtagggagtcatgaatcaatatgttcggtttttttgttgtttttgttttataaagagctataataggctgggcacagtggctgtaatcccagcactttgngaggctgaagcaggtggatcacttgagcccaggagttcgagaccagcctgggcaacatggcaaaacactgtctctacaaaaacaaaaaaaattatccctgttcagtggtgtgcgcctgtggtcccggctacctgggaggctgaggcgagaggagtgctcaaggtgggaggtggagattacagtgagcagagatcacaccactgcactccagcctgagcgacagagagactctgtct

SEQ ID NO: 417968 - DNA, 4688 bp, Homo sapiens
  misc_feature (3397)..(3397): n is a, c, g, or t
  misc_feature (3419)..(3419): n is a, c, g, or t
  misc_feature (3862)..(3862): n is a, c, g, or t
  misc_feature (4452)..(4452): n is a, c, g, or t
ggttagaaggagccaggctagagtcctggaaggtggcagtcaggtcgcagggccacagcagtcactctgcgactctctcttccggtgtttctccagcgccaagcgggagaagacggagcctgggagctgggactggaggagcgggaagcgcagtatcgggaccacggctctgggaccaggaaaaacgcagactctccagagtcaatgtctacttcagccagctcaagggcgcgacaacctggcgccgagcatctcaggccgccgcggggaccccccctaagggactcgggaacacctgcctaccctagaagaggcggagaataaccccgtagggagttaagcggcctctgcctacagcgttcctcccgcctccacggcgccgagccctgattgacgttcagccaggccaatcatagcctgtgtctgaggcgcgcggagctggagcgcccagggcatgtccgccgatcccaaggaggcaatctgtcaggcgccgcccgggcggcagtatgcctgagggggtcctccgtgttcgcgcctcccgccgcctgcactgaaagaatatcctagctctgagacaaaaattgggaacctcagcatgagtttgtcacctgaatgaaataaaaaaaatcacgttgaaggctggtgcagtaacatgtgcctgtagtcccagctactctggaggctgagtcaggaggatcacttgagaccagaagttcaggaattcaagactggcttgagcaacatagcaagacttcatttcaaaacaaacagaaaaaagccaccaccttcagtatttcttgccaaagcaaaggagccatttgttctttacgatggtcaggaaaggaagcatcaaggtcatcaaatgaaaaattttcagcatttcagcctctctgctcagggaaatacctgaatctagaatatcacaacatgagccaaaaccgccccatttctcatgccacatgtcactcttaacacaaggttactcaacctcgagcatggttggcatttggggctgaataattcttttttgtagggggctgtcctgggcattgtaggatgctcatgagctacctcagtctctaccacccactagatgccagtagcattgacccctgatctctctacccaagttgtgacaactaaaaccatctctggataatggaggaaccttaaatgcatattgctaaggaaaagccaatctgaaaggattacatattgtatgagtccaactatatggtaatctggaaaaggcaaaaccatggagacagtgaaaaggtagtggttaccagtggtccatgggaagggttggatgaataggtggagcacagaggatttttaaggcagtgaaactattctgaatgatactgtaatggtggatacatgtcatacctttgtcaaaaccaataaaatataacaaccaataaaactgcacaaagagtgaaccctaatgtaaactatggacttaataatgtatcaatattggctcaccaattttaacaaatgtaccacactaatgcaagatgttactaatagtggaaactggagggaagagggcttgaggggacatacgggaactctctgtaattcctgttcagtttttctgtaactgttaaactgtccaaaaaaagtctgtttttataaatggaggcatggttttatatggactaaaatactatgattgcctttttattttacacatggtgaaattagagcaggacatattttaaactcaaaattcacaaaattaatttatgaaaatgtttacccagatcaagaatattaaagaaacttagattaatattgttaccttgaatttattttactgagtaatcctctaagactcctctacacattattaatctagaaggatttttaaagtctttatgacaattaattattggtctacagtcaaattgcatatccccattaactagagttatatttttccattttctgatccaaaaactttaggaacaggaaatgtttattttagaaaacaagaacacttcttaagcatttgctgttaacagttattttcacatgtgcttgtacttattttacacttgtcagaacatagtatttacctttgaaccaaggttttataataagcaagcactttttttatttagaagtcacattttccaagtagaaaaatcattaaaaattcagtcctctgaaggctaatttctttaaatcatttaacctaattgtttaaggtatagattggaatttttctcagcactctcttgaaaacaggtgacagtggaaccctgttaggttcacaaatcctagactttgattatatagcccaggctcaaatttttctcgaatgttacgaacattcaaagcattaggagtcttggtttcatttcttaattttttttcttctgggtatatttgagactcatcttggattcaaataaattaataatagtctcatgaaaccgataaaaatgggagctccattgaacatgagagacattgattcgtagtttctaacatcctccaaatgaggagcccatccctaatttagatgcttctttcaaaggaggctcctttccttcgttatccataatatagtcacaccagtcctgaaaaaacatggaacagactccagatctttatatttcatactctaaagtcgtacaagccaatctgcatttcctctagtggaaactgtatagctggtcatctttccaggacccttttatcaagaaacaatgcagcttctacatttgtgctgcttctacaccaaaacagctggaatgtatatagtatggttctggatgctcttgtatacctcactcttcatttctcacctaacccatgtgctatgatttgaatgtttctcccctgcaaaactcatgttgaaatgtaattgccatgataacagtattaataggtggaatatttaagaggtgattagggtgggattggtgatgttataaaagggtaagttcagccccttcttgctctctctgtcacccttccaccttcctctgtgtgatgatgcaacaaaaaagcccttcccagatgccagcatcttgattttggacttctcagcctacagaactataagccaataaatttctgttatttgttattagtctgtgatattctgttacagtagcacaaaatggactatgacaccatgtgtttacacagaaagaaaaaaatatcatacggtaattgctcctaaatatgcagagaatatgttctgatatccttagtggatgcctgaaactgcagatagtaccaaaccttatatatactatgttttttttcccatacatatgcatgttaaagtttataagttaggcagagtaagatatgaacaataactaataatgaaatagaaacgtaacgatgtgctgtaataaaagttatgtgactgacncctctttttcttcctctttctntcaaaatatcttaatattttcaagccatggataactgaaactgcagaaagtgaaactgtagataaactattaactctatttaaacaataaaagaattataattatattcttgggaaaattaacaattatccaaagtccctttgcaaagggaaaaaaaatgcatgtattggaaaaaatctcaaccacagggttccctaagctttgcaaacaacaaatagcatccacctatccatcctcagagagcaacagttttactgttatttagaaaaagcaactatttcaggctgcaggttgtgcacatcagcacttcccagctctctactaatatgggaaaactgactatccctgacttcagtttttgtgaagctaaatgcctgactagagtttaaactgaggctaattggagatcataaaattttacagcttgctagaggtggaccacnattttgattggaaactttccaccaaccaattctaaaaggtgttaatggtgactattttctaaaacaaatctgaagagtaactaatatgataagaccagaaatatatttctctggcaagtccctataaaaagaaagctaggtaattaaataatctctcaacaatattgttttaggaaacccaatagagagtttcacaggcctgtttcttatgggattgctcaatgtaggtaaatattatcaaaccaaaaagtaattttgtaacagaaattctacagagccccaataccttacagaatgatgagtacaacagtagaaacaaatagaagataacctagaaaaataaagcgaataacttaatggcgtgagttaggttaagaaaagcttcctggaaaaagacatctgaatagaattttagtagatatagctaggaattcccaagcaggtagaagaagggggacattccaggcaaaggaatcatgtgaatgcaaaggtagggagtcatgaatcaatatgttcggtttttttgttgtttttgttttataaagagctataataggctgggcacagtggctgtaatcccagcactttgngaggctgaagcaggtggatcacttgagcccaggagttcgagaccagcctgggcaacatggcaaaacactgtctctacaaaaacaaaaaaaattatccctgttcagtggtgtgcgcctgtggtcccggctacctgggaggctgaggcgagaggagtgctcaaggtgggaggtggagattacagtgagcagagatcacaccactgcactccagcctgagcgacagagagactctgtct

SEQ ID NO: 417969 - DNA, 3455 bp, Homo sapiens
ggttagaaggagccaggctagagtcctggaaggtggcagtcaggtcgcagggccacagcagtcactctgcgactctctcttccggtgtttctccagcgccaagcgggagaagacggagcctgggagctgggactggaggagcgggaagcgcagtatcgggaccacggctctgggaccaggaaaaacgcagactctccagagtcaatgtctacttcagccagctcaagggcgcgacaacctggcgccgagcatctcaggccgccgcggggaccccccctaagggactcgggaacacctgcctaccctagaagaggcggagaataaccccgtagggagttaagcggcctctgcctacagcgttcctcccgcctccacggcgccgagccctgattgacgttcagccaggccaatcatagcctgtgtctgaggcgcgcggagctggagcgcccagggcatgtccgccgatcccaaggaggcaatctgtcaggcgccgcccgggcggcagtatgcctgagggggtcctccgtgttcgcgcctcccgccgcctgcactgaaaggtctgtacctgagcctggatacttgaacagaggcagacactgcggctcaaaaccccaaggaatatcctagctctgagacaaaaattgggaacctcagcatgagtttgtcacctgaatgaaataaaaaaaatcacgttgaaggctggtgcagtaacatgtgcctgtagtcccagctactctggaggctgagtcaggaggatcacttgagaccagaagttcaggaattcaagactggcttgagcaacatagcaagacttcatttcaaaacaaacagaaaaaagccaccaccttcagtatttcttgccaaagcaaaggagccatttgttctttacgatggtcaggaaaggaagcatcaaggtcatcaaatgaaaaattttcagcatttcagcctctctgctcagggaaatacctgaatctagaatatcacaacatgagccaaaaccgccccatttctcatgccacatgtcactcttaacacaaggttactcaacctcgagcatggttggcatttggggctgaataattcttttttgtagggggctgtcctgggcattgtaggatgctcatgagctacctcagtctctaccacccactagatgccagtagcattgacccctgatctctctacccaagttgtgacaactaaaaccatctctggataatggaggaaccttaaatgcatattgctaaggaaaagccaatctgaaaggattacatattgtatgagtccaactatatggtaatctggaaaaggcaaaaccatggagacagtgaaaaggtagtggttaccagtggtccatgggaagggttggatgaataggtggagcacagaggatttttaaggcagtgaaactattctgaatgatactgtaatggtggatacatgtcatacctttgtcaaaaccaataaaatataacaaccaataaaactgcacaaagagtgaaccctaatgtaaactatggacttaataatgtatcaatattggctcaccaattttaacaaatgtaccacactaatgcaagatgttactaatagtggaaactggagggaagagggcttgaggggacatacgggaactctctgtaattcctgttcagtttttctgtaactgttaaactgtccaaaaaaagtctgtttttataaatggaggcatggttttatatggactaaaatactatgattgcctttttattttacacatggtgaaattagagcaggacatattttaaactcaaaattcacaaaattaatttatgaaaatgtttacccagatcaagaatattaaagaaacttagattaatattgttaccttgaatttattttactgagtaatcctctaagactcctctacacattattaatctagaaggatttttaaagtctttatgacaattaattattggtctacagtcaaattgcatatccccattaactagagttatatttttccattttctgatccaaaaactttaggaacaggaaatgtttattttagaaaacaagaacacttcttaagcatttgctgttaacagttattttcacatgtgcttgtacttattttacacttgtcagaacatagtatttacctttgaaccaaggttttataataagcaagcactttttttatttagaagtcacattttccaagtagaaaaatcattaaaaattcagtcctctgaaggctaatttctttaaatcatttaacctaattgtttaaggtatagattggaatttttctcagcactctcttgaaaacaggtgacagtggaaccctgttaggttcacaaatcctagactttgattatatagcccaggctcaaatttttctcgaatgttacgaacattcaaagcattaggagtcttggtttcatttcttaattttttttcttctgggtatatttgagactcatcttggattcaaataaattaataatagtctcatgaaaccgataaaaatgggagctccattgaacatgagagacattgattcgtagtttctaacatcctccaaatgaggagcccatccctaatttagatgcttctttcaaaggaggctcctttccttcgttatccataatatagtcacaccagtcctgaaaaaacatggaacagactccagatctttatatttcatactctaaagtcgtacaagccaatctgcatttcctctagtggaaactgtatagctggtcatctttccaggacccttttatcaagaaacaatgcagcttctacatttgtgctgcttctacaccaaaacagctggaatgtatatagtatggttctggatgctcttgtatacctcactcttcatttctcacctaacccatgtgctatgatttgaatgtttctcccctgcaaaactcatgttgaaatgtaattgccatgataacagtattaataggtggaatatttaagaggtgattagggtgggattggtgatgttataaaagggtaagttcagccccttcttgctctctctgtcacccttccaccttcctctgtgtgatgatgcaacaaaaaagcccttcccagatgccagcatcttgattttggacttctcagcctacagaactataagccaataaatttctgttatttgttattagtctgtgatattctgttacagtagcacaaaatggactatgacaccatgtgtttacacagaaagaaaaaaatatcatacggtaattgctcctaaatatgcagagaatatgttctgatatccttagtggatgcctgaaactgcagatagtaccaaaccttatatatactatgttttttttcccatacatatgcatgttaaagtttataagttaggcagagtaagatatgaacaataactaataatgaaatagaaacgtaacgatgtgctgtaataaaagttatgtgactga

SEQ ID NO: 417970 - DNA, 3680 bp, Homo sapiens
ggttagaaggagccaggctagagtcctggaaggtggcagtcaggtcgcagggccacagcagtcactctgcgactctctcttccggtgtttctccagcgccaagcgggagaagacggagcctgggagctgggactggaggagcgggaagcgcagtatcgggaccacggctctgggaccaggaaaaacgcagactctccagagtcaatgtctacttcagccagctcaagggcgcgacaacctggcgccgagcatctcaggccgccgcggggaccccccctaagggactcgggaacacctgcctaccctagaagaggcggagaataaccccgtagggagttaagcggcctctgcctacagcgttcctcccgcctccacggcgccgagccctgattgacgttcagccaggccaatcatagcctgtgtctgaggcgcgcggagctggagcgcccagggcatgtccgccgatcccaaggaggcaatctgtcaggcgccgcccgggcggcagtatgcctgagggggtcctccgtgttcgcgcctcccgccgcctgcactgaaaggtctgtacctgagcctggatacttgaacagaggcagacactgcggctcaaaaccccaaggaatatcctagctctgagacaaaaattgggaacctcagcatgagtttgtcacctgaatgaaataaaaaaaatcacgttgaaggctggtgcagtaacatgtgcctgtagtcccagctactctggaggctgagtcaggaggatcacttgagaccagaagttcaggaattcaagactggcttgagcaacatagcaagacttcatttcaaaacaaacagaaaaaagccaccaccttcagtatttcttgccaaagcaaaggagccatttgttctttacgatggtcaggaaaggaagcatcaaggtcatcaaatgaaaaattttcagcatttcagcctctctgctcagggaaatacctgaatctagaatatcacaacatgagccaaaaccgccccatttctcatgccacatgtcactcttaacacaaggttactcaacctcgagcatggttggcatttggggctgaataattcttttttgtagggggctgtcctgggcattgtaggatgctcatgagctacctcagtctctaccacccactagatgccagtagcattgacccctgatctctctacccaagttgtgacaactaaaaccatctctggataatggaggaaccttaaatgcatattgctaaggaaaagccaatctgaaaggattacatattgtatgagtccaactatatggtaatctggaaaaggcaaaaccatggagacagtgaaaaggtagtggttaccagtggtccatgggaagggttggatgaataggtggagcacagaggatttttaaggcagtgaaactattctgaatgatactgtaatggtggatacatgtcatacctttgtcaaaaccaataaaatataacaaccaataaaactgcacaaagagtgaaccctaatgtaaactatggacttaataatgtatcaatattggctcaccaattttaacaaatgtaccacactaatgcaagatgttactaatagtggaaactggagggaagagggcttgaggggacatacgggaactctctgtaattcctgttcagtttttctgtaactgttaaactgtccaaaaaaagtctgtttttataaatggaggcatggttttatatggactaaaatactatgattgcctttttattttacacatggtgaaattagagcaggacatattttaaactcaaaattcacaaaattaatttatgaaaatgtttacccagatcaagaatattaaagaaacttagattaatattgttaccttgaatttattttactgagtaatcctctaagactcctctacacattattaatctagaaggatttttaaagtctttatgacaattaattattggtctacagtcaaattgcatatccccattaactagagttatatttttccattttctgatccaaaaactttaggaacaggaaatgtttattttagaaaacaagaacacttcttaagcatttgctgttaacagttattttcacatgtgcttgtacttattttacacttgtcagaacatagtatttacctttgaaccaaggttttataataagcaagcactttttttatttagaagtcacattttccaagtagaaaaatcattaaaaattcagtcctctgaaggctaatttctttaaatcatttaacctaattgtttaaggtatagattggaatttttctcagcactctcttgaaaacaggtgacagtggaaccctgttaggttcacaaatcctagactttgattatatagcccaggctcaaatttttctcgaatgttacgaacattcaaagcattaggagtcttggtttcatttcttaattttttttcttctgggtatatttgagactcatcttggattcaaataaattaataatagtctcatgaaaccgataaaaatgggagctccattgaacatgagagacattgattcgtagtttctaacatcctccaaatgaggagcccatccctaatttagatgcttctttcaaaggaggctcctttccttcgttatccataatatagtcacaccagtcctgaaaaaacatggaacagactccagatctttatatttcatactctaaagtcgtacaagccaatctgcatttcctctagtggaaactgtatagctggtcatctttccaggacccttttatcaagaaacaatgcagcttctacatttgtgctgcttctacaccaaaacagctggaatgtatatagtatggttctggatgctcttgtatacctcactcttcatttctcacctaacccatgtgctatgatttgaatgtttctcccctgcaaaactcatgtataaaagggtaagttcagccccttcttgctctctctgtcacccttccaccttcctctgtgtgatgatgcaacaaaaaagcccttcccagatgccagcatcttgattttggacttctcagcctacagaactataagccaataaatttctgttatttgttattagtctgtgatattctgttacagtagcacaaaatggactatgacaccatgtgtttacacagaaagaaaaaaatatcatacggtaattgctcctaaatatgcagagaatatgttctgatatccttagtggatgcctgaaactgcagatagtaccaaaccttatatatactatgttttttttcccatacatatgcatgttaaagtttataagttaggcagagtaagatatgaacaataactaataatgaaatagaaacgtaacgatgtgctgtaataaaagttatgtgactgaaaaaaaaaaaaaaaaaaaaaaaaaaaaaaacaagcaaaaaaacaaaaaagatgagaaagacatatctcttcgactcgaaaaagaaatcaacaacaactcggcacgcaaaaaaagcaagaagaccaaataaagtgatgaactgcaaagaaggaaagaaaacagagaaagaggggaagccaagaaaggaaagagaagaagatagagtagagaaagaaaatgagatagaagagaaggcaaacacgagcaagccagaaaaaagagaacagatgacaatcagagaaagcattagaaaataaaacaa

SEQ ID NO: 417971 - DNA, 1507 bp, Homo sapiens
ggttagaaggagccaggctagagtcctggaaggtggcagtcaggtcgcagggccacagcagtcactctgcgactctctcttccggtgtttctccagcgccaagcgggagaagacggagcctgggagctgggactggaggagcgggaagcgcagtatcgggaccacggctctgggaccaggaaaaacgcagactctccagagtcaatgtctacttcagccagctcaagggcgcgacaacctggcgccgagcatctcaggccgccgcggggaccccccctaagggactcgggaacacctgcctaccctagaagaggcggagaataaccccgtagggagttaagcggcctctgcctacagcgttcctcccgcctccacggcgccgagccctgattgacgttcagccaggccaatcatagcctgtgtctgaggcgcgcggagctggagcgcccagggcatgtccgccgatcccaaggaggcaatctgtcaggcgccgcccgggcggcagtatgcctgagggggtcctccgtgttcgcgcctcccgccgcctgcactgaaaggtctgtacctgagcctggatacttgaacagaggcagacactgcggctcaaaaccccaaggaatatcctagctctgagacaaaaattgggaacctcagcatgagtttgtcacctgaatgaaataaaaaaaatcacgttgaaggctggtgcagtaacatgtgcctgtagtcccagctactctggaggctgagtcaggaggatcacttgagaccagaagttcaggaattcaagactggcttgagcaacatagcaagacttcatttcaaaacaaacagaaaaaagccaccaccttcagtatttcttgccaaagcaaaggagccatttgttctttacgatggtcaggaaaggaagcatcaaggtcatcaaatgaaaaattttcagcatttcagcctctctgctcagggaaatacctgaatctagaatatcacaacatgagccaaaaccgccccatttctcatgccacatgtcactcttaacacaaggttactcaacctcgagcatggttggcatttggggctgaataattcttttttgtagggggctgtcctgggcattgtaggatgctcatgagctacctcagtctctaccacccactagatgccagtagcattgacccctgatctctctacccaagttgtgacaactaaaaccatctctggataatggaggaaccttaaatgcatattgctaaggaaaagccaatctgaaaggattacatattgtatgagtccaactatatggtaatctggaaaaggcaaaaccatggagacagtgaaaaggtagtggttaccagtggtccatgggaagggttggatgaataggtggagcacagaggatttttaaggcagtgaaactattctgaatgatactgtaatggtggatacatgtcatacctttgtcaaaaccaataaaatataacaaccaataaaactgcacaaagagtgaacccta

SEQ ID NO: 417972 - DNA, 857 bp, Homo sapiens
ggttagaaggagccaggctagagtcctggaaggtggcagtcaggtcgcagggccacagcagtcactctgcgactctctcttccggtgtttctccagcgccaagcgggagaagacggagcctgggagctgggactggaggagcgggaagcgcagtatcgggaccacggctctgggaccaggaaaaacgcagactctccagagtcaatgtctacttcagccagctcaagggcgcgacaacctggcgccgagcatctcaggccgccgcggggaccccccctaagggactcgggaacacctgcctaccctagaagaggcggagaataaccccgtagggagttaagcggcctctgcctacagcgttcctcccgcctccacggcgccgagccctgattgacgttcagccaggccaatcatagcctgtgtctgaggcgcgcggagctggagcgcccagggcatgtccgccgatcccaaggaggcaatctgtcaggcgccgcccgggcggcagtatgcctgagggggtcctccgtgttcgcgcctcccgccgcctgcactgaaaggtctgtacctgagcctggatacttgaacagaggcagacactgcggctcaaaaccccaagggtaggtgcctattgtgcggagtctcggaacgcctgtctggaagaagagttccggcggctccccgaacgcttggagaaagcgcttggatgcagttgcaggaatatcctagctctgagacaaaaattgggactacaggcctccctattctctgagacacagcaatatggaaattaggcaaatcaatgactgtacaatggcctctaagtgtccaggttaaaggaagaattacatgtctctccc

SEQ ID NO: 417973 - DNA, 2238 bp, Homo sapiens
ctcccttccctactattgcctctctgacctttttaaattatttttaataccaaaagagttcttttgaaatggaactgattaaaagggcagagggtctgttgccagcctgcattgatataccagtcccatttgtaaatatttacgtacctttataaattcagttgcatctgtggcaaaatttcagactatttttgcgtctttcctcatcactttttgtgatgcaactccagtctggactcagatgcatagatttggtccagtgtattttcatgataaagtgaaattgagtcagaacaagagttaatatctgcctgtatcttgcacagttcgagcgatctgttattaactgggaagcatttggtgttggttttcattccatttcgacgagcatgttattgggaagtattctgaagaggcaatagcagtaataacaacagacttaagtgctacgcccctttgtgctgctggcttttctggttgcaggctttcccatggtcacaggatgcactgtcagcatcaggtcccagagggccaccgtgtccattacagcagagtccagctgcagcatccagctcacgccctcatgggaattggcacaggcctggggcagggcttctgatggccatttgcttggcctcctgcattttagtccaactcacagtccactagcttcactcctttaaattcactttgaaacaggcctcatcccacttccaccagcaccatagaagaataattctgggcagaagtctgttttttttcatttttccaggacagttggatattgtcaggccacttgtgaccccagccatgtagtgagggtgctctttctctgtgcctgctccttatgagtgcagtggaaggaagccacacactggtcagtcatttcagaggcagcagatgcccagggagacccaagaaagagtcaggttagggagcagtgaaagtgaggagggaagacaattctgtgaactctgtaactcttaaaatttttgaaaactccatcgttaaacaacttttaaaagaaataactaaattttcaaatgagtaagcagtgccaccaactagtgttttgcccgatagaagagccagcatgttcacgttatttaaattaggtggaaaaatctaaacatttttatcttcataatttaaaaaatatatatgtatatattgcatattcactttttcctttaggtagagatgatttcaatccaaatactcttactttaaaaaatttcctttccccaagaatctccttgggactttgacttatttttaaagctgtgttggagctcatcttgttccctgatgtgtctcgagcccattggtagggtcatacaaagcccacggttacaagcagtggtaggattgcagccgtgggcctgctggacacacacatacaccaaagatgtatttggatctgggcaccccctcccaggatccctgtactcacgtgccagtctcctgactagagcactttactctgtttcctcagccctgcagcccctgggagcacacactgggtgcagccctgggccaggcacgggaggccctgccctgtgctgcccaggggctgtgtgcaccacatgagcacatttccctctggcctggcggcctccaggctggctgtggaaacagttcctgaggaaattagagattctatgaattgtaggagtattaaagaccaggctgttggcaccagaacttaaagcgatgactggatgtctctgtactgtatgtatctggttatcaagatgcctctgtgcagaaagtatgcctcccgtgggtatacgtttttaccttttttaaaaaacatttttgtagaaaaaataattaaatcccctttttggaaacttactgcaggttttgtgccttgacaacctctccctatgtgaggtttgtaaaaagtgtcctgtgacttaacacagaaacgcaataaacacacacaaaatagtttcatgagtgattcttcagatgcccttcccaactggttagttgatcaagaattttgggggtgggggttgcggagaaatcaagtttaaaattccttctgattaaaaaaatatagtggaatacaattgtctgccgtttccccttcttaatgtatatattgtgagtatttattagattcgtaggtcatattacttatcaactgagccaaatgtctgtgtgcaattgtgtttcctttaccttgtaaaattttgtacagcataaataagtaaaaaaatcactgttttt

SEQ ID NO: 417974 - DNA, 3686 bp, Homo sapiens
ctcccttccctactattgcctctctgacctttttaaattatttttaataccaaaagagttcttttgaaatggaactgattaaaagggcagagggtctgttgccagcctgcattgatataccagtcccatttgtaaatatttacgtacctttataaattcagttgcatctgtggcaaaatttcagactatttttgcgtctttcctcatcactttttgtgatgcaactccagtctggactcagatgcatagatttggtccagtgtattttcatgataaagtgaaattgagtcagaacaagagttaatatctgcctgtatcttgcacagttcgagcgatctgttattaactgggaagcatttggtgttggttttcattccatttcgacgagcatgttattgggaagtattctgaagaggcaatagcagtaataacaacagacttaagtgctacgcccctttgtgctgctggcttttctggttgcaggctttcccatggtcacaggatgcactgtcagcatcaggtcccagagggccaccgtgtccattacagcagagtccagctgcagcatccagctcacgccctcatgggaattggcacaggcctggggcagggcttctgatggccatttgcttggcctcctgcattttagtccaactcacagtccactagcttcactcctttaaattcactttgaaacaggcctcatcccacttccaccagcaccatagaagaataattctgggcagaagtctgttttttttcatttttccaggacagttggatattgtcaggccacttgtgaccccagccatgtagtgagggtgctctttctctgtgcctgctccttatgagtgcagtggaaggaagccacacactggtcagtcatttcagaggcagcagatgcccagggagacccaagaaagagtcaggttagggagcagtgaaagtgaggagggaagacaattctgtgaactctgtaactcttaaaatttttgaaaactccatcgttaaacaacttttaaaagaaataactaaattttcaaatgagtaagcagtgccaccaactagtgttttgcccgatagaagagccagcatgttcacgttatttaaattaggtggaaaaatctaaacatttttatcttcataatttaaaaaatatatatgtatatattgcatattcactttttcctttaggtagagatgatttcaatccaaatactcttactttaaaaaatttcctttccccaagaatctccttgggactttgacttatttttaaagctgtgttggagctcatcttgttccctgatgtgtctcgagcccattggtagggtcatacaaagcccacggttacaagcagtggtaggattgcagccgtgggcctgctggacacacacatacaccaaagatgtatttggatctgggcaccccctcccaggatccctgtactcacgtgccagtctcctgactagagcactttactctgtttcctcagccctgcagcccctgggagcacacactgggtgcagccctgggccaggcacgggaggccctgccctgtgctgcccaggggctgtgtgcaccacatgagcacatttccctctggcctggcggcctccaggctggctgtggaaacagttcctgaggaaattagagattctatgaattgtaggagtattaaagaccaggctgttggcaccagaacttaaagcgatgactggatgtctctgtactgtatgtatctggttatcaagatgcctctgtgcagaaagtatgcctcccgtgggtatacgtttttaccttttttaaaaaacatttttgtagaaaaaataattaaatcccctttttggaaacttactgcaggttttgtgccttgacaacctctccctatgtgaggtttgtaaaaagtgtcctgtgacttaacacagaaacgcaataaacacacacaaaatagtttcatgagtgattcttcagatgcccttcccaactggttagttgatcaagaattttgggggtgggggttgcggagaaatcaagtttaaaattccttctgattaaaaaaatatagtggaatacaattgtctgccgtttccccttcttaatgtatatattgtgagtatttattagattcgtaggtcatattacttatcaactgagccaaatgtctgtgtgcaattgtgtttcctttaccttgtaaaattttgtacagcataaataagtaaaaaaatcactgtttttctcaactttttcaaaatcaaggattgtaaatattgtagattctttttctgtgtgatgtgtcctactgtttcataatgctgtaacttgtagaaatattgtatatttattttctgcttatttaatgtcttaatttctgaaaagtattaacatccctgtctcccactcccctgccgtcccatgaagttaactcctgagagttgtcgggggtgactggagagctcattgcagaccacgtggtcctccagggtggctctccaccttcgggtcctggtatttccagtcaagtgggtttcaattcttgggctttgccgcccttatgatgaagtgtgtgtttgatgccagtgagaaactcagtctggcaggctacaaaattctactccaagaaatacccagcaaccttctgtttgttccaaagcaactagcttatcatgcaagcaaattttgctgactccaggctttatctttaggaaaacaaaaaaaccaaagtattatcagcaggtgggaaagatttttctattgaaaatttatccctgacaactcagcgtttagaaaagaaataaaatgtgccacttccagaggtgctgcattgcagttgttcagggctagggccaggcaggacaagtgaatgggtgggacaggtggctcctgcctaaggaccacctcaggccactaaccccttgtggacaactgtgagtagctgggttttcccccacctgctgtgcaacttcctgtgctttgaggttggactaacttgtcttcaggagctaattaactgtacagccctccccacgccccacccatacggtcactgcatttggtcagcctgcttcttcaggtcgatgccctccttctgatactccatctccttcaggggaggttggggccccactggactgggtgtcaagatgtgaaagcttatgggagctttaaggagacttcatggtggttccatgcaggtggttctgccatccctgctgatttagcctggtgcctgtgtgtgtccactcacgtacacgtggggtgggggaaacgtgtctacagatgacgctaaatcagttggggtctactctaaacagcattgtgtgtaagaagcatcctcaagctcccagttaagtaacttgactacttttatttgggaatttcagactatagaagctctcttatgttttatgtccagattctgtgaccactagttactgtatcagaactcatcaggtacccacttataaatagcactgatctggctgtatactgatccatcactaacctgttttctaggacccagcgtatgtagcatttgtattgcagtttccctggcttacttgtgttttgcactgatgaattttgacagggtaattgccactttacttgtgcaatactgctgtaaataactgcagatttttaaacaatcttttatgttaattttataaaaataaaactttcaacta

SEQ ID NO: 417975 - DNA, 3754 bp, Homo sapiens
ctcccttccctactattgcctctctgacctttttaaattatttttaataccaaaagagttcttttgaaatggaactgattaaaagggcagagggtctgttgccagcctgcattgatataccagtcccatttgtaaatatttacgtacctttataaattcagttgcatctgtggcaaaatttcagactatttttgcgtctttcctcatcactttttgtgatgcaactccagtctggactcagatgcatagatttggtccagtgtattttcatgataaagtgaaattgagtcagaacaagagttaatatctgcctgtatcttgcacagttcgagcgatctgttattaactgggaagcatttggtgttggttttcattccatttcgacgagcatgttattgggaagtattctgaagaggcaatagcagtaataacaacagacttaagtgctacgcccctttgtgctgctggcttttctggttgcaggctttcccatggtcacaggatgcactgtcagcatcaggtcccagagggccaccgtgtccattacagcagagtccagctgcagcatccagctcacgccctcatgggaattggcacaggcctggggcagggcttctgatggccatttgcttggcctcctgcattttagtccaactcacagtccactagcttcactcctttaaattcactttgaaacaggcctcatcccacttccaccagcaccatagaagaataattctgggcagaagtctgttttttttcatttttccaggacagttggatattgtcaggccacttgtgaccccagccatgtagtgagggtgctctttctctgtgcctgctccttatgagtgcagtggaaggaagccacacactggtcagtcatttcagaggcagcagatgcccagggagacccaagaaagagtcaggttagggagcagtgaaagtgaggagggaagacaattctgtgaactctgtaactcttaaaatttttgaaaactccatcgttaaacaacttttaaaagaaataactaaattttcaaatgagtaagcagtgccaccaactagtgttttgcccgatagaagagccagcatgttcacgttatttaaattaggtggaaaaatctaaacatttttatcttcataatttaaaaaatatatatgtatatattgcatattcactttttcctttaggtagagatgatttcaatccaaatactcttactttaaaaaatttcctttccccaagaatctccttgggactttgacttatttttaaagctgtgttggagctcatcttgttccctgatgtgtctcgagcccattggtagggtcatacaaagcccacggttacaagcagtggtaggattgcagccgtgggcctgctggacacacacatacaccaaagatgtatttggatctgggcaccccctcccaggatccctgtactcacgtgccagtctcctgactagagcactttactctgtttcctcagccctgcagcccctgggagcacacactgggtgcagccctgggccaggcacgggaggccctgccctgtgctgcccaggggctgtgtgcaccacatgagcacatttccctctggcctggcggcctccaggctggctgtggaaacagttcctgaggaaattagagattctatgaattgtaggagtattaaagaccaggctgttggcaccagaacttaaagcgatgactggatgtctctgtactgtatgtatctggttatcaagatgcctctgtgcagaaagtatgcctcccgtgggtatacgtttttaccttttttaaaaaacatttttgtagaaaaaataattaaatcccctttttggaaacttactgcaggttttgtgccttgacaacctctccctatgtgaggtttgtaaaaagtgtcctgtgacttaacacagaaacgcaataaacacacacaaaatagtttcatgagtgattcttcagatgcccttcccaactggttagttgatcaagaattttgggggtgggggttgcggagaaatcaagtttaaaattccttctgattaaaaaaatatagtggaatacaattgtctgccgtttccccttcttaatgtatatattgtgagtatttattagattcgtaggtcatattacttatcaactgagccaaatgtctgtgtgcaattgtgtttcctttaccttgtaaaattttgtacagcataaataagtaaaaaaatcactgtttttctcaactttttcaaaatcaaggattgtaaatattgtagattctttttctgtgtgatgtgtcctactgtttcataatgctgtaacttgtagaaatattgtatatttattttctgcttatttaatgtcttaatttctgaaaagtattaacatccctgtctcccactcccctgccgtcccatgaagttaactcctgagagttgtcgggggtgactggagagctcattgcagaccacgtggtcctccagggtggctctccaccttcgggtcctggtatttccagtcaagtgggtttcaattcttgggctttgccgcccttatgatgaagtgtgtgtttgatgccagtgagaaactcagtctggcaggctacaaaattctactccaagaaatacccagcaaccttctgtttgttccaaagcaactagcttatcatgcaagcaaattttgctgactccaggctttatctttaggaaaacaaaaaaaccaaagtattatcagcaggtgggaaagatttttctattgaaaatttatccctgacaactcagcgtttagaaaagaaataaaatgtgccacttccagaggtgctgcattgcagttgttcagggctagggccaggcaggacaagtgaatgggtgggacaggtggctcctgcctaaggaccacctcaggccactaaccccttgtggacaactgtgagtagctgggttttcccccacctgctgtgcaacttcctgtgctttgaggttggactaacttgtcttcaggagctaattaactgtacagccctccccacgccccacccatacggtcactgcatttggtcagcctgcttcttcaggtcgatgccctccttctgatactccatctccttcaggggaggttggggccccactggactgggtgtcaagatgtgaaagcttatgggagctttaaggagacttcatggtggttccatgcaggtggttctgccatccctgctgatttagcctggtgcctgtgtgtgtccactcacgtacacgtggggtgggggaaacgtgtctacagatgacgctaaatcagttggggtctactctaaacagcattgtgtgtaagaagcatcctcaagctcccagttaagtaacttgactacttttatttgggaatttcagactatagaagctctcttatgttttatgtccagattctgtgaccactagttactgtatcagaactcatcaggtacccacttataaatagcactgatctggctgtatactgatccatcactaacctgttttctaggacccagcgtatgtagcatttgtattgcagtttccctggcttacttgtgttttgcactgatgaattttgacagggtaattgccactttacttgtgcaatactgctgtaaataactgcagatttttaaacaatcttttatgttaattttataaaaataaaactttcaactaagtaaatacaacaaaacccagcaacacccgcgagtcagcaaggctatctaagcaccggaacaacacat

SEQ ID NO: 417976 - DNA, 3811 bp, Homo sapiens
ctcccttccctactattgcctctctgacctttttaaattatttttaataccaaaagagttcttttgaaatggaactgattaaaagggcagagggtctgttgccagcctgcattgatataccagtcccatttgtaaatatttacgtacctttataaattcagttgcatctgtggcaaaatttcagactatttttgcgtctttcctcatcactttttgtgatgcaactccagtctggactcagatgcatagatttggtccagtgtattttcatgataaagtgaaattgagtcagaacaagagttaatatctgcctgtatcttgcacagttcgagcgatctgttattaactgggaagcatttggtgttggttttcattccatttcgacgagcatgttattgggaagtattctgaagaggcaatagcagtaataacaacagacttaagtgctacgcccctttgtgctgctggcttttctggttgcaggctttcccatggtcacaggatgcactgtcagcatcaggtcccagagggccaccgtgtccattacagcagagtccagctgcagcatccagctcacgccctcatgggaattggcacaggcctggggcagggcttctgatggccatttgcttggcctcctgcattttagtccaactcacagtccactagcttcactcctttaaattcactttgaaacaggcctcatcccacttccaccagcaccatagaagaataattctgggcagaagtctgttttttttcatttttccaggacagttggatattgtcaggccacttgtgaccccagccatgtagtgagggtgctctttctctgtgcctgctccttatgagtgcagtggaaggaagccacacactggtcagtcatttcagaggcagcagatgcccagggagacccaagaaagagtcaggttagggagcagtgaaagtgaggagggaagacaattctgtgaactctgtaactcttaaaatttttgaaaactccatcgttaaacaacttttaaaagaaataactaaattttcaaatgagtaagcagtgccaccaactagtgttttgcccgatagaagagccagcatgttcacgttatttaaattaggtggaaaaatctaaacatttttatcttcataatttaaaaaatatatatgtatatattgcatattcactttttcctttaggtagagatgatttcaatccaaatactcttactttaaaaaatttcctttccccaagaatctccttgggactttgacttatttttaaagctgtgttggagctcatcttgttccctgatgtgtctcgagcccattggtagggtcatacaaagcccacggttacaagcagtggtaggattgcagccgtgggcctgctggacacacacatacaccaaagatgtatttggatctgggcaccccctcccaggatccctgtactcacgtgccagtctcctgactagagcactttactctgtttcctcagccctgcagcccctgggagcacacactgggtgcagccctgggccaggcacgggaggccctgccctgtgctgcccaggggctgtgtgcaccacatgagcacatttccctctggcctggcggcctccaggctggctgtggaaacagttcctgaggaaattagagattctatgaattgtaggagtattaaagaccaggctgttggcaccagaacttaaagcgatgactggatgtctctgtactgtatgtatctggttatcaagatgcctctgtgcagaaagtatgcctcccgtgggtatacgtttttaccttttttaaaaaacatttttgtagaaaaaataattaaatcccctttttggaaacttactgcaggttttgtgccttgacaacctctccctatgtgaggtttgtaaaaagtgtcctgtgacttaacacagaaacgcaataaacacacacaaaatagtttcatgagtgattcttcagatgcccttcccaactggttagttgatcaagaattttgggggtgggggttgcggagaaatcaagtttaaaattccttctgattaaaaaaatatagtggaatacaattgtctgccgtttccccttcttaatgtatatattgtgagtatttattagattcgtaggtcatattacttatcaactgagccaaatgtctgtgtgcaattgtgtttcctttaccttgtaaaattttgtacagcataaataagtaaaaaaatcactgtttttctcaactttttcaaaatcaaggattgtaaatattgtagattctttttctgtgtgatgtgtcctactgtttcataatgctgtaacttgtagaaatattgtatatttattttctgcttatttaatgtcttaatttctgaaaagtattaacatccctgtctcccactcccctgccgtcccatgaagttaactcctgagagttgtcgggggtgactggagagctcattgcagaccacgtggtcctccagggtggctctccaccttcgggtcctggtatttccagtcaagtgggtttcaattcttgggctttgccgcccttatgatgaagtgtgtgtttgatgccagtgagaaactcagtctggcaggctacaaaattctactccaagaaatacccagcaaccttctgtttgttccaaagcaactagcttatcatgcaagcaaattttgctgactccaggctttatctttaggaaaacaaaaaaaccaaagtattatcagcaggtgggaaagatttttctattgaaaatttatccctgacaactcagcgtttagaaaagaaataaaatgtgccacttccagaggtgctgcattgcagttgttcagggctagggccaggcaggacaagtgaatgggtgggacaggtggctcctgcctaaggaccacctcaggccactaaccccttgtggacaactgtgagtagctgggttttcccccacctgctgtgcaacttcctgtgctttgaggttggactaacttgtcttcaggagctaattaactgtacagccctccccacgccccacccatacggtcactgcatttggtcagcctgcttcttcaggtcgatgccctccttctgatactccatctccttcaggggaggttggggccccactggactgggtgtcaagatgtgaaagcttatgggagctttaaggagacttcatggtggttccatgcaggtggttctgccatccctgctgatttagcctggtgcctgtgtgtgtccactcacgtacacgtggggtgggggaaacgtgtctacagatgacgctaaatcagttggggtctactctaaacagcattgtgtgtaagaagcatcctcaagctcccagttaagtaacttgactacttttatttgggaatttcagactatagaagctctcttatgttttatgtccagattctgtgaccactagttactgtatcagaactcatcaggtacccacttataaatagcactgatctggctgtatactgatccatcactaacctgttttctaggacccagcgtatgtagcatttgtattgcagtttccctggcttacttgtgttttgcactgatgaattttgacagggtaattgccactttacttgtgcaatactgctgtaaataacctgttttctaggacccagcgtatgtagcatttgtattgcagtttccctggcttacttgtgttttgcactgatgaattttgacagggtaattgccactttacttgtgcaatactgctgtaaataactgcagatttttaaacaatcttttatgttaattttataaaaataaaactttcaacta

SEQ ID NO: 417977 - DNA, 961 bp, Homo sapiens
tccttaaagctcccataagctttcacatcttgacacccagtctcagtggggccccaacctcaccctgaagcgagatggagtatcagcaagcgatgggcattcgactctgaagaacctaggctgaccaaactgcagtgactgggtgggacaggtggctcctgcctaaggaccacctcaggccactaaccccttgtggacaactgtgagtagctgggttttcccccacctgctgtgcaacttcctgtgctttgaggttggactaacttgtcttcaggagctaattaactgtacagccctccccacgccccacccatacggtcactgcatttggtcagcctgcttcttcaggtcgatgccctccttctgatactccatctccttcaggggaggttggggccccactggactgggtgtcaagatgtgaaagcttatgggagctttaaggagacttcatggtggttccatgcaggtggttctgccatccctgctgatttagcctggtgcctgtgtgtgtccactcacgtacacgtggggtgggggaaacgtgtctacagatgacgctaaatcagttggggtctactctaaacagcattgtgtgtaagaagcatcctcaagctcccagttaagtaacttgactacttttatttgggaatttcagactatagaagctctcttatgttttatgtccagattctgtgaccactagttactgtatcagaactcatcaggtacccacttataaatagcactgatctggctgtatactgatccatcactaacctgttttctaggacccagcgtatgtagcatttgtattgcagtttccctggcttacttgtgttttgcactgatgaattttgacagggtaattgccactttacttgtgcaatactgctgtaaataactgcagatttttaaacaatcttttatgttaattttataaaaataaaactttcaacta

SEQ ID NO: 417978 - DNA, 3293 bp, Homo sapiens
ctcccttccctactattgcctctctgacctttttaaattatttttaataccaaaagagttcttttgaaatggaactgattaaaagggcagagggtctgttgccagcctgcattgatataccagtcccatttgtaaatatttacgtacctttataaattcagttgcatctgtggcaaaatttcagactatttttgcgtctttcctcatcactttttgtgatgcaactccagtctggactcagatgcatagatttggtccagtgtattttcatgataaagtgaaattgagtcagaacaagagttaatatctgcctgtatcttgcacagttcgagcgatctgttattaactgggaagcatttggtgttggttttcattccatttcgacgagcatgttattgggaagtattctgaagaggcaatagcagtaataacaacagacttaagtgctacgcccctttgtgctgctggcttttctggttgcaggctttcccatggtcacaggatgcactgtcagcatcaggtcccagagggccaccgtgtccattacagcagagtccagctgcagcatccagctcacgccctcatgggaattggcacaggcctggggcagggcttctgatggccatttgcttggcctcctgcattttagtccaactcacagtccactagcttcactcctttaaattcactttgaaacaggcctcatcccacttccaccagcaccatagaagaataattctgggcagaagtctgttttttttcatttttccaggacagttggatattgtcaggccacttgtgaccccagccatgtagtgagggtgctctttctctgtgcctgctccttatgagtgcagtggaaggaagccacacactggtcagtcatttcagaggcagcagatgcccagggagacccaagaaagagtcaggttagggagcagtgaaagtgaggagggaagacaattctgtgaactctgtaactcttaaaatttttgaaaactccatcgttaaacaacttttaaaagaaataactaaattttcaaatgagtaagcagtgccaccaactagtgttttgcccgatagaagagccagcatgttcacgttatttaaattaggtggaaaaatctaaacatttttatcttcataatttaaaaaatatatatgtatatattgcatattcactttttcctttaggtagagatgatttcaatccaaatactcttactttaaaaaatttcctttccccaagaatctccttgggactttgacttatttttaaagctgtgttggagctcatcttgttccctgatgtgtctcgagcccattggtagggtcatacaaagcccacggttacaagcagtggtaggattgcagccgtgggcctgctggacacacacatacaccaaagatgtatttggatctgggcaccccctcccaggatccctgtactcacgtgccagtctcctgactagagcactttactctgtttcctcagccctgcagcccctgggagcacacactgggtgcagccctgggccaggcacgggaggccctgccctgtgctgcccaggggctgtgtgcaccacatgagcacatttccctctggcctggcggcctccaggctggctgtggaaacagttcctgaggaaattagagattctatgaattgtaggagtattaaagaccaggctgttggcaccagaacttaaagcgatgactggatgtctctgtactgtatgtatctggttatcaagatgcctctgtgcagaaagtatgcctcccgtgggtatacgtttttaccttttttaaaaaacatttttgtagaaaaaataattaaatcccctttttggaaacttactgcaggttttgtgccttgacaacctctccctatgtgaggtttgtaaaaagtgtcctgtgacttaacacagaaacgcaataaacacacacaaaatagtttcatgagtgattcttcagatgcccttcccaactggttagttgatcaagaattttgggggtgggggttgcggagaaatcaagtttaaaattccttctgattaaaaaaatatagtggaatacaattgtctgccgtttccccttcttaatgtatatattgtgagtatttattagattcgtaggtcatattacttatcaactgagccaaatgtctgtgtgcaattgtgtttcctttaccttgtaaaattttgtacagcataaataagtaaaaaaatcactgtttttctcaactttttcaaaatcaaggattgtaaatattgtagattctttttctgtgtgatgtgtcctactgtttcataatgctgtaacttgtagaaatattgtatatttattttctgcttatttaatgtcttaatttctgaaaagtattaacatccctgtctcccactcccctgccgtcccatgaagttaactcctgagagttgtcgggggtgactggagagctcattgcagaccacgtggtcctccagggtggctctccaccttcgggtcctggtatttccagtcaagtgggtttcaattcttgggctttgccgcccttatgatgaagtgtgtgtttgatgccagtgagaaactcagtctggcaggctacaaaattctactccaagaaatacccagcaaccttctgtttgttccaaagcaactagcttatcatgcaagcaaattttgctgactccaggctttatctttaggaaaacaaaaaaaccaaagtattatcagcaggtgggaaagatttttctattgaaaatttatccctgacaactcagcgtttagaaaagaaataaaatgtgccacttccagaggtgctgcattgcagttgttcagggctagggccaggcaggacaagtgaatgggtgggacaggtggctcctgcctaaggaccacctcaggccactaaccccttgtggacaactgtgagtagctgggttttcccccacctgctgtgcaacttcctgtgctttgaggttggactaacttgtcttcaggagctaattaactgtacagccctccccacgccccactagttactgtatcagaactcatcaggtacccacttataaatagcactgatctggctgtatactgatccatcactaacctgttttctaggacccagcgtatgtagcatttgtattgcagtttccctggcttacttgtgttttgcactgatgaattttgacagggtaattgccactttacttgtgcaatactgctgtaaataactgcagatttttaaacaatcttttatgttaattttataaaaataaaactttcaacta

SEQ ID NO: 417979 - DNA, 500 bp, Homo sapiens
caaagttgagttctgggtcaaaaatctctcaagcgtcctccacagctgacttccacagtcccctgtgtgtctctgcaaggaacacaaaggaagtgagatagtgggaagtctggggccatcttcggtcacgtgagaattccctctcagttagccggggcgtgcagccgcacagaaggaaggcagccacgcagctccagtccaggctgggagagagctttgtagatccatctcccactgagcaggcttccctcctgcaaggagagactctaccgataatgtgttaagatcagattaatgcaggaaatacacatgaaataaataataacagtgtaataacagtggctgtcattgcaatggttatttctgttaaaaatgtgagatctacactacggatttcttaggataattttgcccttacttaaaagaaactgacagatgtactttataaaaatgaaaataatttaacaaataaagaattggagaatattgactcaccactc

SEQ ID NO: 417980 - DNA, 1441 bp, Homo sapiens
tgcggcttccggtcccggctcagcctccgacccaggtggtctggagcctgccgggagagtggtggcatctgagaggctggtcgtggactgtggttgggggaggtgggagctgttttaaccgtgtgccccctctcctgtgccggcgtgggcatcccccggggcagtggaacgcgggcgctcctccagcttccgagtccagccagcctgggcgcggggcgccgcccccgagacacccgaggagtccgttcctccctggttacgtggactgtggagctggtctcttgtggctcagcgccgtgcggaggttgaagcgtacctgcggaggtcgcaccagggcgtgaggaggaggaggaagggcatgagccgagcttgaggaatccgtgctccaaactctacactcaagggtggcccttgggtagggtgaagatcccctgtctttatcctagttccacaccttggtgtgggttactgggtgcaggatgaactgtcgctcggaggtgctggaggtgtcggtggaggggcggcaggtggaggaggccatgctggctgtgctgcacacggtgcttctgcaccgcagcacaggcaagttccactacaagaaggagggcacctactccattggcaccgtgggcacccaggatgttgactgtgacttcatcgacttcacttatgtgcgtgtctcttctgaggaactggatcgtgccctgcgcaaggttgttggggagttcaaggatgcactgcgcaactctggtggcgatgggctggggcagatgtccttggagttctaccagaagaagaagtctcgctggccattctcagacgagtgcatcccatgggaagtgtggacggtcaaggtgcatgtggtagccctggccacggagcaggagcggcagatctgccgggagaaggtgggtgagaaactctgcgagaagatcatcaacatcgtggaggtgatgaatcggcatgagtacttgcccaagatgcccacacagtcggaggtggataacgtgtttgacacaggcttgcgggacgtgcagccctacctgtacaagatctccttccagatcactgatgccctgggcacctcagtcaccaccaccatgcgcaggctcatcaaagacacccttgccctctgagcgtcgctggatctctgggagctccttgatggctcccagaccttggcttttgggaattgcacttttgggcctttgggctctggaacctgctctgggtcattggtgagacttggaaggggcagcccccgctggcttcttggttttgtggttgccagcctcaggtcatccttttaatctttgctgacggttcagtcctgcctctactgtctctccatagccctggtggggtcccccttctttctccactgtacagaagagccaccactgggatggggaataaagttgagaacatgagtttgggctga

SEQ ID NO: 417981 - DNA, 970 bp, Homo sapiens
gatgagtgatgttgagggtcacgcagagaagcaatggccgaattactagcctccgaaggactgtcaccagattggtcaccatggggtatcaagtagtgctgctgcataaaggcaacactgagagatgaagcccctttctccagcatctgtgtgggtggagggccagggatcccgtctgttacgcacattcaacaaactcaagttttgccatccactgggcgtcctgcagtacagcggtgtgggctcatctccaggacctctctctacggggtacgcccctcatcttgcggtgatcagtgttccttccagacctctcagtccggactgagttgggcaccgcgtcagcgtctcccggccaggctcgccgccgatgactccgctcggcctagggaggcggccgagagcccgtagggctcctccttccctccagtctctatggcggaagtgagttgtacgggccgaaacaccacagcgttctcggtggtgggctgaatggactcgtccacatgagggggatcttcatcaccatcaactcttaaaatccgagacataaccacgaaaggagcagcccccagatcagagagcaacgcatgactatctgcgtgtgcttctgtgactacgcggatgttgtgggcggctacatgcgtgcgggggcccggcgagctgggcaggtgccccctccggggccgtgggatctgctggtctcttgtggctcagcgccgtgcggaggttgaagcgtacctgcggaggtcgcaccagggcgtgaggaggaggaggaagggggcagcccccgctggcttcttggttttgtggttgccagcctcaggtcatccttttaatctttgctgacggttcagtcctgcctctactgtctctccatagccctggtggggtcccccttctttctccactgtacagaagagccaccactgggatggggaataaagttgagaacatgagtttgggctga

SEQ ID NO: 417982 - DNA, 724 bp, Homo sapiens
  misc_feature (39)..(39): n is a, c, g, or t
  misc_feature (46)..(46): n is a, c, g, or t
  misc_feature (53)..(53): n is a, c, g, or t
tggattgcttgctgcttcagctctgtcatttccttcatnctttagncacccanccatgtgccgctcccaaggatgcactgcgcaactctggtggcgatgggctggggcagatgtccttggagttctaccagaagaagaagtctcgctggccattctcagacgagtgcatcccatgggaagtgtggacggtcaaggtgcatgtggtagccctggccacggagcaggagcggcagatctgccgggagaaggtgggtgagaaactctgcgagaagatcatcaacatcgtggaggtgatgaatcggcatgagtacttgcccaagatgcccacacagtcggaggtggataacgtgtttgacacaggcttgcgggacgtgcagccctacctgtacaagatctccttccagatcactgatgccctgggcacctcagtcaccaccaccatgcgcaggctcatcaaagacacccttgccctctgagcgtcgctggatctctgggagctccttgatggctcccagaccttggcttgaaaatctttctctcttaactctattatatttattttatcataccattgaatctttataatcatattctttttcttctctcattttattcactatttacgtatatttctcttactattctaattctctctttactatgttattgtcgctccttaatattattttattatctatcttttatattatctgtatctattacg

SEQ ID NO: 417983 - DNA, 1684 bp, Homo sapiens
tgcggcttccggtcccggctcagcctccgacccaggtggtctggagcctgccgggagagtggtggcatctgagaggctggtcgtggactgtggttgggggaggtgggagctgttttaaccgtgtgccccctctcctgtgccggcgtgggcatcccccggggcagtggaacgcgggcgctcctccagcttccgagtccagccagcctgggcgcggggcgccgcccccgagacacccgaggagtccgttcctccctggttacgtggactgtggagctggtctcttgtggctcagcgccgtgcggaggttgaagcgtacctgcggaggtcgcaccagggcgtgaggaggaggaggaagggcatgagccgagcttgaggaatccgtgctccaaactctacactcaagggtggcccttgggtagggtgaagatcccctgtctttatcctagttccacaccttggtgtgggttactgggtgcaggatgaactgtcgctcggaggtgctggaggtgtcggtggaggggcggcaggtggaggaggccatgctggctgtgctgcacacggtgcttctgcaccgcagcacaggcaagttccactacaagaaggagggcacctactccattggcaccgtgggcacccaggatgttgactgtgacttcatcgacttcacttatgtgcgtgtctcttctgaggaactggatcgtgccctgcgcaaggttgttggggagttcaaggatgcactgcgcaactctggtggcgatgggctggggcagatgtccttggagttctaccagaagaagaagtctcgctggccattctcagacgagtgcatcccatgggaagtgtggacggtcaaggtgcatgtggtagccctggccacggagcaggagcggcagatctgccgggagaaggtgggtgagaaactctgcgagaagatcatcaacatcgtggaggtgatgaatcggcatgagtacttgcccaagatgcccacacagtcggaggtggataacgtgtttgacacaggcttgcgggacgtgcagccctacctgtacaagatctccttccagatcactgatgccctgggcacctcagtcaccaccaccatgcgcaggctcatcaaagacacccttgccctctgagcgtcgctggatctctgggagctccttgatggctcccagaccttggcttttgggaattgcacttttgggcctttgggctctggaacctgctctgggtcattggtgagacttggaaggggcagcccccgctggcttcttggttttgtggttgccagcctcaggtcatccttttaatctttgctgacggttcagtcctgcctctactgtctctccatagccctggtggggtcccccttctttctccactgtacagaagagccaccactgggatggggaataaagttgagaacatgagtttgggctgaaaaaaacataaccgctcatctccccgccagacgcgccacacacaaggggggggcgcgccctctaagagtttccccggcggggggcccccgtttaagcggttccccgcatttctctgttccccccgctggggcccccattgcggccgccctttttaaccctcgtgcctcggtggcgcgctctttaacacgggctccgcacccggcacacccccgccacccgcgggaccccttggcggcgcgcgc

SEQ ID NO: 417984 - DNA, 1422 bp, Homo sapiens
tgcggcttccggtcccggctcagcctccgacccaggtggtctggagcctgccgggagagtggtggcatctgagaggctggtcgtggactgtggttgggggaggtgggagctgttttaaccgtgtgccccctctcctgtgccggcgtgggcatcccccggggcagtggaacgcgggcgctcctccagcttccgagtccagccagcctgggcgcggggcgccgcccccgagacacccgaggagtccgttcctccctggttacgtggactgtggagctggtctcttgtggctcagcgccgtgcggaggttgaagcgtacctgcggaggtcgcaccagggcgtgaggaggaggaggaagggcatgagccgagcttgaggaatccgtgctccaaactctacactcaagggtggcccttgggtagggtgaagatcccctgtctttatcctagttccacaccttggtgtgggttactgggtgcaggatgaactgtcgctcggaggtgctggaggtgtcggtggaggggcggcaggtggaggaggccatgctggctgtgctgcacacggtgcttctgcaccgcagcacaggcaagttccactacaagaaggagggcacctactccattggcaccgtgggcacccaggatgttgactgtgacttcatcgacttcacttatgtgcgtgtctcttctgaggaactggatcgtgccctgcgcaaggttgttggggagttcaaggatgcactgcgcaactctggtggcgatgggctggggcagatgtccttggagttctaccagaagaagaagtctcgctggccattctcagacgagtgcatcccatgggaagtgtggacggtcaaggtgcatgtggtagccctggccacggagcaggagcggcagatctgccgggagaaggtgggtgagaaactctgcgagaagatcatcaacatcgtggaggtgatgaatcggcatgagtacttgcccaagatgcccacacagtcggaggtggataacgtgtttgacacaggcttgcgggacgtgcagccctacctgtacaagatctccttccagatcactgatgccctgggcacctcagtcaccaccaccatgcgcaggctcatcaaagacacccttgccctctgagcgtcgctggatctctgggagctccttgatggctcccagaccttggcttttgggaattgcacttttgggcctttgggctctggaacctgctctgggtcattggtgagacttggaaggggcagcccccgctggcttcttggttttgtggttgccagcctttgctgacggttcagtcctgcctctactgtctctccatagccctggtggggtcccccttctttctccactgtacagaagagccaccactgggatggggaataaagttgagaacatgagtttgggctga

SEQ ID NO: 417985 - DNA, 1170 bp, Homo sapiens
tgcggcttccggtcccggctcagcctccgacccaggtggtctggagcctgccgggagagtggtggcatctgagaggctggtcgtggactgtggttgggggaggtgggagctgttttaaccgtgtgccccctctcctgtgccggcgtgggcatcccccggggcagtggaacgcgggcgctcctccagcttccgagtccagccagcctgggcgcggggcgccgcccccgagacacccgaggagtccgttcctccctggttacgtggactgtggagctggtctcttgtggctcagcgccgtgcggaggttgaagcgtacctgcggaggtcgcaccagggcgtgaggaggaggaggaagggcatgagccgagcttgaggaatccgtgctccaaactctacactcaagggtggcccttgggtagggtgaagatcccctgtctttatcctagttccacaccttggtgtgggttactgggtgcaggatgaactgtcgctcggaggtgctggaggtgtcggtggaggggcggcaggtggaggaggccatgctggctgtgctgcacacggtgcttctgcaccgcagcacaggcaagttccactacaagaaggagggcacctactccattggcaccgtgggcacccaggatgttgactgtgacttcatcgacttcacttatgtgcgtgtctcttctgaggaactggatcgtgccctgcgcaaggttgttggggagttcaaggatgcactgcgcaactctggtggcgatgggctggggcagatgtccttggagttctaccagaagaagaagtctcgctggccattctcagacgagtgcatcccatgggaagtgtggacggtcaaggtgcatgtggtagccctggccacggagcaggagcggcagatctgccgggagaaggtgggtgagaaactctgcgagaagatcatcaacatcgtggaggtgatgaatcggcatgagtacttgcccaagatgcccacacagtcggaggtggataacgtgtttgacacaggcttgcgggacgtgcagccctacctgtacaagatctccttccagatcactgatgccctgggcacctcagtcaccaccaccatgcgcaggctcatcaaagacacccctcactctgtgctgtccacctcctctgtgcttcgggatcctctag

SEQ ID NO: 417986 - DNA, 1552 bp, Homo sapiens
tgcggcttccggtcccggctcagcctccgacccaggtggtctggagcctgccgggagagtggtggcatctgagaggctggtcgtggactgtggttgggggaggtgggagctgttttaaccgtgtgccccctctcctgtgccggcgtgggcatcccccggggcagtggaacgcgggcgctcctccagcttccgagtccagccagcctgggcgcggggcgccgcccccgagacacccgaggagtccgttcctccctggttacgtggactgtggaggttcgcgcgtagtggcggcgggggatacgggacccgggcgggaattccttcctgcgtccgtcccgagtctcttgatatggagccaagtaagttttctggttttgcttttagctggtctcttgtggctcagcgccgtgcggaggttgaagcgtacctgcggaggtcgcaccagggcgtgaggaggaggaggaagggcatgagccgagcttgaggaatccgtgctccaaactctacactcaagggtggcccttgggtagggtgaagatcccctgtctttatcctagttccacaccttggtgtgggttactgggtgcaggatgaactgtcgctcggaggtgctggaggtgtcggtggaggggcggcaggtggaggaggccatgctggctgtgctgcacacggtgcttctgcaccgcagcacaggcaagttccactacaagaaggagggcacctactccattggcaccgtgggcacccaggatgttgactgtgacttcatcgacttcacttatgtgcgtgtctcttctgaggaactggatcgtgccctgcgcaaggttgttggggagttcaaggatgcactgcgcaactctggtggcgatgggctggggcagatgtccttggagttctaccagaagaagaagtctcgctggccattctcagacgagtgcatcccatgggaagtgtggacggtcaaggtgcatgtggtagccctggccacggagcaggagcggcagatctgccgggagaaggtgggtgagaaactctgcgagaagatcatcaacatcgtggaggtgatgaatcggcatgagtacttgcccaagatgcccacacagtcggaggtggataacgtgtttgacacaggcttgcgggacgtgcagccctacctgtacaagatctccttccagatcactgatgccctgggcacctcagtcaccaccaccatgcgcaggctcatcaaagacacccttgccctctgagcgtcgctggatctctgggagctccttgatggctcccagaccttggcttttgggaattgcacttttgggcctttgggctctggaacctgctctgggtcattggtgagacttggaaggggcagcccccgctggcttcttggttttgtggttgccagcctcaggtcatccttttaatctttgctgacggttcagtcctgcctctactgtctctccatagccctggtggggtcccccttctttctccactgtacagaagagccaccactgggatggggaataaagttgagaacatgagtttgggctga

SEQ ID NO: 417987 - DNA, 1270 bp, Homo sapiens
tgcggcttccggtcccggctcagcctccgacccaggtggtctggagcctgccgggagagtggtggcatctgagaggctggtcgtggactgtggttgggggagctggtctcttgtggctcagcgccgtgcggaggttgaagcgtacctgcggaggtcgcaccagggcgtgaggaggaggaggaagggcatgagccgagcttgaggaatccgtgctccaaactctacactcaagggtggcccttgggtagggtgaagatcccctgtctttatcctagttccacaccttggtgtgggttactgggtgcaggatgaactgtcgctcggaggtgctggaggtgtcggtggaggggcggcaggtggaggaggccatgctggctgtgctgcacacggtgcttctgcaccgcagcacaggcaagttccactacaagaaggagggcacctactccattggcaccgtgggcacccaggatgttgactgtgacttcatcgacttcacttatgtgcgtgtctcttctgaggaactggatcgtgccctgcgcaaggttgttggggagttcaaggatgcactgcgcaactctggtggcgatgggctggggcagatgtccttggagttctaccagaagaagaagtctcgctggccattctcagacgagtgcatcccatgggaagtgtggacggtcaaggtgcatgtggtagccctggccacggagcaggagcggcagatctgccgggagaaggtgggtgagaaactctgcgagaagatcatcaacatcgtggaggtgatgaatcggcatgagtacttgcccaagatgcccacacagtcggaggtggataacgtgtttgacacaggcttgcgggacgtgcagccctacctgtacaagatctccttccagatcactgatgccctgggcacctcagtcaccaccaccatgcgcaggctcatcaaagacacccttgccctctgagcgtcgctggatctctgggagctccttgatggctcccagaccttggcttttgggaattgcacttttgggcctttgggctctggaacctgctctgggtcattggtgagacttggaaggggcagcccccgctggcttcttggttttgtggttgccagcctcaggtcatccttttaatctttgctgacggttcagtcctgcctctactgtctctccatagccctggtggggtcccccttctttctccactgtacagaagagccaccactgggatggggaataaagttgagaacatgagtttgggctga

SEQ ID NO: 417988 - DNA, 1247 bp, Homo sapiens
tgcggcttccggtcccggctcagcctccgacccaggtggtctggagcctgccgggagagtggtggcatctgagaggctgctggtctcttgtggctcagcgccgtgcggaggttgaagcgtacctgcggaggtcgcaccagggcgtgaggaggaggaggaagggcatgagccgagcttgaggaatccgtgctccaaactctacactcaagggtggcccttgggtagggtgaagatcccctgtctttatcctagttccacaccttggtgtgggttactgggtgcaggatgaactgtcgctcggaggtgctggaggtgtcggtggaggggcggcaggtggaggaggccatgctggctgtgctgcacacggtgcttctgcaccgcagcacaggcaagttccactacaagaaggagggcacctactccattggcaccgtgggcacccaggatgttgactgtgacttcatcgacttcacttatgtgcgtgtctcttctgaggaactggatcgtgccctgcgcaaggttgttggggagttcaaggatgcactgcgcaactctggtggcgatgggctggggcagatgtccttggagttctaccagaagaagaagtctcgctggccattctcagacgagtgcatcccatgggaagtgtggacggtcaaggtgcatgtggtagccctggccacggagcaggagcggcagatctgccgggagaaggtgggtgagaaactctgcgagaagatcatcaacatcgtggaggtgatgaatcggcatgagtacttgcccaagatgcccacacagtcggaggtggataacgtgtttgacacaggcttgcgggacgtgcagccctacctgtacaagatctccttccagatcactgatgccctgggcacctcagtcaccaccaccatgcgcaggctcatcaaagacacccttgccctctgagcgtcgctggatctctgggagctccttgatggctcccagaccttggcttttgggaattgcacttttgggcctttgggctctggaacctgctctgggtcattggtgagacttggaaggggcagcccccgctggcttcttggttttgtggttgccagcctcaggtcatccttttaatctttgctgacggttcagtcctgcctctactgtctctccatagccctggtggggtcccccttctttctccactgtacagaagagccaccactgggatggggaataaagttgagaacatgagtttgggctga

SEQ ID NO: 417989 - DNA, 1866 bp, Homo sapiens
gatgagtgatgttgagggtcacgcagagaagcaatggccgaattactagcctccgaaggactgtcaccagattggtcaccatggggtatcaagtagtgctgctgcataaaggcaacactgagagatgaagcccctttctccagcatctgtgtgggtggagggccagggatcccgtctgttacgcacattcaacaaactcaagttttgccatccactgggcgtcctgcagtacagcggtgtgggctcatctccaggacctctctctacggggtacgcccctcatcttgcggtgatcagtgttccttccagacctctcagtccggactgagttgggcaccgcgtcagcgtctcccggccaggctcgccgccgatgactccgctcggcctagggaggcggccgagagcccgtagggctcctccttccctccagtctctatggcggaagtgagttgtacgggccgaaacaccacagcgttctcggtggtgggctgaatggactcgtccacatgagggggatcttcatcaccatcaactcttaaaatccgagacataaccacgaaaggagcagcccccagatcagagagcaacgcatgactatctgcgtgtgcttctgtgactacgcggatgttgtgggcggctacatgcgtgcgggggcccggcgagctgggcaggtgccccctccggggccgtgggatctgctggtctcttgtggctcagcgccgtgcggaggttgaagcgtacctgcggaggtcgcaccagggcgtgaggaggaggaggaagggcatgagccgagcttgaggaatccgtgctccaaactctacactcaagggtggcccttgggtagggtgaagatcccctgtctttatcctagttccacaccttggtgtgggttactgggtgcaggatgaactgtcgctcggaggtgctggaggtgtcggtggaggggcggcaggtggaggaggccatgctggctgtgctgcacacggtgcttctgcaccgcagcacaggcaagttccactacaagaaggagggcacctactccattggcaccgtgggcacccaggatgttgactgtgacttcatcgacttcacttatgtgcgtgtctcttctgaggaactggatcgtgccctgcgcaaggttgttggggagttcaaggatgcactgcgcaactctggtggcgatgggctggggcagatgtccttggagttctaccagaagaagaagtctcgctggccattctcagacgagtgcatcccatgggaagtgtggacggtcaaggtgcatgtggtagccctggccacggagcaggagcggcagatctgccgggagaaggtgggtgagaaactctgcgagaagatcatcaacatcgtggaggtgatgaatcggcatgagtacttgcccaagatgcccacacagtcggaggtggataacgtgtttgacacaggcttgcgggacgtgcagccctacctgtacaagatctccttccagatcactgatgccctgggcacctcagtcaccaccaccatgcgcaggctcatcaaagacacccttgccctctgagcgtcgctggatctctgggagctccttgatggctcccagaccttggcttttgggaattgcacttttgggcctttgggctctggaacctgctctgggtcattggtgagacttggaaggggcagcccccgctggcttcttggttttgtggttgccagcctcaggtcatccttttaatctttgctgacggttcagtcctgcctctactgtctctccatagccctggtggggtcccccttctttctccactgtacagaagagccaccactgggatggggaataaagttgagaacatgagtttgggctga

SEQ ID NO: 417990 - DNA, 1397 bp, Homo sapiens
tgcggcttccggtcccggctcagcctccgacccaggtggtctggagcctgccgggagagtggtggcatctgagaggctggtcgtggactgtggttgggggaggtgggagctgttttaaccgtgtgccccctctcctgtgccggcgtgggcatcccccggggcagtggaacgcgggcgctcctccagcttccgagtccagccagcctgggcgcggggcgccgcccccgagacacccgaggagtccgttcctccctggttacgtggactgtggaggttcgcgcgtagtggcggcgggggatacgggacccgggcgggaattccttcctgcgtccgtcccgagtctcttgatatggagccaaggtggcccttgggtagggtgaagatcccctgtctttatcctagttccacaccttggtgtgggttactgggtgcaggatgaactgtcgctcggaggtgctggaggtgtcggtggaggggcggcaggtggaggaggccatgctggctgtgctgcacacggtgcttctgcaccgcagcacaggcaagttccactacaagaaggagggcacctactccattggcaccgtgggcacccaggatgttgactgtgacttcatcgacttcacttatgtgcgtgtctcttctgaggaactggatcgtgccctgcgcaaggttgttggggagttcaaggatgcactgcgcaactctggtggcgatgggctggggcagatgtccttggagttctaccagaagaagaagtctcgctggccattctcagacgagtgcatcccatgggaagtgtggacggtcaaggtgcatgtggtagccctggccacggagcaggagcggcagatctgccgggagaaggtgggtgagaaactctgcgagaagatcatcaacatcgtggaggtgatgaatcggcatgagtacttgcccaagatgcccacacagtcggaggtggataacgtgtttgacacaggcttgcgggacgtgcagccctacctgtacaagatctccttccagatcactgatgccctgggcacctcagtcaccaccaccatgcgcaggctcatcaaagacacccttgccctctgagcgtcgctggatctctgggagctccttgatggctcccagaccttggcttttgggaattgcacttttgggcctttgggctctggaacctgctctgggtcattggtgagacttggaaggggcagcccccgctggcttcttggttttgtggttgccagcctcaggtcatccttttaatctttgctgacggttcagtcctgcctctactgtctctccatagccctggtggggtcccccttctttctccactgtacagaagagccaccactgggatggggaataaagttgagaacatgagtttgggctga

SEQ ID NO: 417991 - DNA, 229 bp, Homo sapiens
cttggatgatgactagagctaagagagcataattccctggggtgtgggaagcaggccctcacaggtgggaactcagaggccttggcttgctcattcgttcccttcttcccaggatgcactgcgcaactctggtggcgatgggctggggcagatgtccttggagttctaccagaagaagaagtctcgctggccattctcagacgagtgcatcccatgggaagtgtggacg

SEQ ID NO: 417992 - DNA, 1697 bp, Homo sapiens
aggagaatcacttgaacccgggaggcagaggttgcagtgagccgagattgcgccactgtactccagcctggtgacagagcaagactccgtcaaaatagtaataataataataataataataataataataagaagaagaagaagaagaagaagaagaagaagaagaaacaggactctagtggctaggaatgaaattctgggataagcttgtgttaaagtagaccatgtgcgtttccaaacagtgagaacaggtcactagcaaacaatggcattttgtttgagaaatggagagcgagcaagactggagcattaccatcatgatggcctgtcaggcttttcagagaagaaatgaactgattaaccacaagtgcattattccaacaagccaaaagtcttccatcccatgggccagggtaattttcccaggttagatccagggtttgggtgaaatttaactttaagatgtgggtgccaaaagagagaattggcttgtggggcctttcaccagagacccatgccagtgactgaatgacctggattaggtatgcatacttgcaagcctcttatttgggaattacactaatggttacctgttttgtgtgaccaaaaatgttgagaactgaagacatcaaattataactgcagtataggggcccagaagaagggaccctcacaatctatctacacactctatttccaaaggataagattgcaagagccaggaggaccaactccagcttctgggatggaaggttcagcaactctactacggggggtcctgtttagtcacagagtgggctaggaaaatttgtcccagccccttaattttccagggtaagggttgattttctgtgagaagtatttaatgctattctttgctaaagagccgggtaaactctgaaaaattaaatccaaagctggttatttaaaaataactatgttcttaacactcttgcagacaaacctaaatatcagatagaaagtccttgtatcatttctatttgaaaattgaagattttattgcctcttttcttatgtactgcaccatcttacatcagaggaccagggcttgttttgacagggattattataattgcagcataatttgtattagacccatgtaacaagcctgtctacttcatggaaattgcagtgggttgcccagtcattccagttaatcagacactcatcgtgtgggaagcccggcattgagtttggtgctttgatgcacgtctgagacagtgtgatgtggttaagcataggaattgtgagcctctgagtggataaccttacctatctctcatttacaggtatgtgaaacaagaagttctgggtcctttcatcataagggagaagcttcagaaagttccgaggacctgctaaaatcagctactagaatctgctgccagaggggacaaagacgtgcactcaaccttctaccaggccactctcaggctcaccttaaaatcagcccttgatcccatttctgggcaatttagacagtgaaactgactttgtttacctgcttgcagcatattagaacagacgatccatgctaatattgtattttctcttaaaacatagctttcctgtaatttaaagtgcttttatgaaaatatttgtaattaattatatatagttggaaatagcagtaagctttcccattataatatatttttgtatacaaataaaatttg

SEQ ID NO: 417993 - DNA, 996 bp, Homo sapiens
ggagggcggcggggacagacccgtcgccccggctccgcagccccgccccggccccgcctccgctccggccgccgaaggctataagatctaggaacccgagccggtggtagggcgggcgcggaccgtgctgggagcggcgcggctggagcgcagcgccgaagggactggcagggctgaagtgtgcgggacagcaagcccccgaatagccccggctgccacctcgcaggacccaaggccacgcgcgccgggcccagctgagccgcctcatgaagccgccggaggacctgtcggacgcgctgtgcgagtttgacgcggtgctggccgacttcgcgtcgcccttccacgagcgccacttccactacgaggagcacctggagcgcatgaagcggcgcagcagcgccagtgtcagcgacagcagcggcttcagcgactcggagagtgcagattcactttataggaacagcttcagcttcagtgatgaaaaactgaattctccaacagactctaccccagctcttctctctgccactgtcactcctcagaaagctaaattaggagacacaaaagagctagaagccttcattgctgatcttgacaaaactttagcaagtatgtgaaacaagaagttctgggtcctttcatcataagggagaagcttcagaaagttccgaggacctgctaaaatcagctactagaatctgctgccagaggggacaaagacgtgcactcaaccttctaccaggccactctcaggctcaccttaaaatcagcccttgatcccatttctgggcaatttagacagtgaaactgactttgtttacctgcttgcagcatattagaacagacgatccatgctaatattgtattttctcttaaaacatagctttcctgtaatttaaagtgcttttatgaaaatatttgtaattaattatatatagttggaaatagcagtaagctttcccattataatatatttttgtatacaaataaaatttg

SEQ ID NO: 417994 - DNA, 890 bp, Homo sapiens
gaaaatttggagactagactgttctctctcatgtgatgtaatcaagactgtgcaaatgacagtgtttcttaggagtctcctcccagacttgttggttctagaatttaaaactcagcagtttgcctttgcagatagtgggattctttttattgcattaattatttaaccaatgctttcagatgaccaatttagcaattaaatggggttgtcattattagataagctatgatctaacatgatttaaaatagcagctccagcctgtctctactgtggtattaatagacctaaaatgtctttaaagatgcatgagcagtttcttattttttggaactggtaaaatgtctccagctagagagttgaatgttctgttacattggacaagtgcctttttgaaaacaaaaggagctttttttcttaagaaaagttatacttgctgaaaatagttgcagaatgcaataaaaatggaacatagttaaaaagaaatgacaattccatcactcttttcactttggcaataagacaggacttcactcttttttcagaagaggcatttgaaagttcccttctcaacatagcaacgttagcacccactgggaattctgccactatccagccctcagtctgtaatgaatcagttgaattcagagacagagcagtctaaaaagtggcttaaaacgtgctcagatttgttacctgatcctcaagaggtaggaattaaagagggaaaaaaagcccctagtggcaaattgacttaaaaggctaagaacaattagccatttgtagccagcaggtgttaattaataaaactgtccagtactgcatttcagggaaggcatgaatgatgtgatgaactctaaagtcagctagctgaatatctcaagggatgtca

SEQ ID NO: 417995 - DNA, 1059 bp, Homo sapiens
ggagggcggcggggacagacccgtcgccccggctccgcagccccgccccggccccgcctccgctccggccgccgaaggctataagatctaggaacccgagccggtggtagggcgggcgcggaccgtgctgggagcggcgcggctggagcgcagcgccgaagggactggcagggctgaagtgtgcgggacagcaagcccccgaatagccccggctgccacctcgcaggacccaaggccacgcgcgccgggcccagctgagccgcctcatgaagccgcccgcggcgcagggcagccccgcggccgccgcggccgcagccccggccctggactcggcggccgcggaggacctgtcggacgcgctgtgcgagtttgacgcggtgctggccgacttcgcgtcgcccttccacgagcgccacttccactacgaggagcacctggagcgcatgaagcggcgcagcagcgccagtgtcagcgacagcagcggcttcagcgactcggagagtgcagattcactttataggaacagcttcagcttcagtgatgaaaaactgaattctccaacagactctaccccagctcttctctctgccactgtcactcctcagaaagctaaattaggagacacaaaagagctagaagccttcattgctgatcttgacaaaactttagcaagtatgtgaaacaagaagttctgggtcctttcatcataagggagaagcttcagaaagttccgaggacctgctaaaatcagctactagaatctgctgccagaggggacaaagacgtgcactcaaccttctaccaggccactctcaggctcaccttaaaatcagcccttgatcccatttctgggcaatttagacagtgaaactgactttgtttacctgcttgcagcatattagaacagacgatccatgctaatattgtattttctcttaaaacatagctttcctgtaatttaaagtgcttttatgaaaatatttgtaattaattatatatagttggaaatagcagtaagctttcccattataatatatttttgtatacaaataaaatttg

SEQ ID NO: 417996 - DNA, 1044 bp, Homo sapiens
agcgggggggggacaggtaaccggcagcgcctggggaggaatctggccgcgccaagtcgctgggtgaccctgggcctggcgaaggctcagttttcttgtctgtaaaacggacttggtaatagaacgcacttcgggggtggtggagaagattacaaggtaacagcgactgcgtggctgtcacttggcagaggcgccaagtgtcagttatcttcgggaaccgtggcggcccctcctggccctgggaggtggtcccgctgcccccctgacttccgtgcactgagcccctggccctgcccgcagccccggccctggactcggcggccgcggaggacctgtcggacgcgctgtgcgagtttgacgcggtgctggccgacttcgcgtcgcccttccacgagcgccacttccactacgaggagcacctggagcgcatgaagcggcgcagcagcgccagtgtcagcgacagcagcggcttcagcgactcggagagtgcagattcactttataggaacagcttcagcttcagtgatgaaaaactgaattctccaacagactctaccccagctcttctctctgccactgtcactcctcagaaagctaaattaggagacacaaaagagctagaagccttcattgctgatcttgacaaaactttagcaagtatgtgaaacaagaagttctgggtcctttcatcataagggagaagcttcagaaagttccgaggacctgctaaaatcagctactagaatctgctgccagaggggacaaagacgtgcactcaaccttctaccaggccactctcaggctcaccttaaaatcagcccttgatcccatttctgggcaatttagacagtgaaactgactttgtttacctgcttgcagcatattagaacagacgatccatgctaatattgtattttctcttaaaacatagctttcctgtaatttaaagtgcttttatgaaaatatttgtaattaattatatatagttggaaatagcagtaagctttcccattataatatatttttgtatacaaataaaatttg

SEQ ID NO: 417997 - DNA, 945 bp, Homo sapiens
ggagggcggcggggacagacccgtcgccccggctccgcagccccgccccggccccgcctccgctccggccgccgaaggctataagatctaggaacccgagccggtggtagggcgggcgcggaccgtgctgggagcggcgcggctggagcgcagcgccgaagggactggcagggctgaagtgtgcgggacagcaagcccccgaatagccccggctgccacctcgcagggaggacctgtcggacgcgctgtgcgagtttgacgcggtgctggccgacttcgcgtcgcccttccacgagcgccacttccactacgaggagcacctggagcgcatgaagcggcgcagcagcgccagtgtcagcgacagcagcggcttcagcgactcggagagtgcagattcactttataggaacagcttcagcttcagtgatgaaaaactgaattctccaacagactctaccccagctcttctctctgccactgtcactcctcagaaagctaaattaggagacacaaaagagctagaagccttcattgctgatcttgacaaaactttagcaagtatgtgaaacaagaagttctgggtcctttcatcataagggagaagcttcagaaagttccgaggacctgctaaaatcagctactagaatctgctgccagaggggacaaagacgtgcactcaaccttctaccaggccactctcaggctcaccttaaaatcagcccttgatcccatttctgggcaatttagacagtgaaactgactttgtttacctgcttgcagcatattagaacagacgatccatgctaatattgtattttctcttaaaacatagctttcctgtaatttaaagtgcttttatgaaaatatttgtaattaattatatatagttggaaatagcagtaagctttcccattataatatatttttgtatacaaataaaatttg

SEQ ID NO: 417998 - DNA, 2057 bp, Homo sapiens
gaaaatttggagactagactgttctctctcatgtgatgtaatcaagactgtgcaaatgacagtgtttcttaggagtctcctcccagacttgttggttctagaatttaaaactcagcagtttgcctttgcagatagtgggattctttttattgcattaattatttaaccaatgctttcagatgaccaatttagcaattaaatggggttgtcattattagataagctatgatctaacatgatttaaaatagcagctccagcctgtctctactgtggtattaatagacctaaaatgtctttaaagatgcatgagcagtttcttattttttggaactggtaaaatgtctccagctagagagttgaatgttctgttacattggacaagtgcctttttgaaaacaaaaggagctttttttcttaagaaaagttatacttgctgaaaatagttgcagaatgcaataaaaatggaacatagttaaaaagaaatgacaattccatcactcttttcactttggcaataagacaggacttcactcttttttcagaagaggcatttgaaagttcccttctcaacatagcaacgttagcacccactgggaattctgccactatccagccctcagtctgtaatgaatcagttgaattcagagacagagcagtctaaaaagtggcttaaaacgtgctcagatttgttacctgatcctcaagaggtaggaattaaagagggaaaaaaagcccctagtggcaaattgacttaaaaggctaagaacaattagccatttgtagccagcaggtgttaattaataaaactgtccagtactgcatttcagggaaggcatgaatgatgtgatgaactctacaaaaataaagtcagctatatgaaaaaaatctctacatctcaggctctagagagaaccaaatcagaatgaggactcgtttccttgtgtgggcacctggaggggatgaggctgtcctgggcccagaagactcatggcaccttccctgtaccattttgataagaaacagtgaactcttcattcatttcatattggaggaactctgagggctgcagcgttgccctggggggacagcacaagcaagaatgcatcagaaggctagtgccgcaggaatgacacaatctaggtgtctgctctgcacagtgctatgcttactgaattttttgactaataactcatattctacacaatacaaaaaccagactccttttatcttcccttcctgctcctcactctcctgcaaacatttaagacagtgaaggaagattcctcttctaggtgagggagaagtggggtgggatgtttggagagggtggtgatgaactaaaaaataaagaaacacttaggctagtcttcagaatcagtttctgagtttactgtatcaaaacactggagcacacacttagggttggcccaggacactcttcaataaaagtctctgaagataaggaggtagatgtaaaatagaaataatccattctataactctggaagttccaacttcctggaaaactcaatatggagtcatcagctgtctttgttatggaaactgaactctctctctctctctctctccctctcctgtttcacagctaaattaggagacacaaaagagctagaagccttcattgctgatcttgacaaaactttagcaagtatgtgaaacaagaagttctgggtcctttcatcataagggagaagcttcagaaagttccgaggacctgctaaaatcagctactagaatctgctgccagaggggacaaagacgtgcactcaaccttctaccaggccactctcaggctcaccttaaaatcagcccttgatcccatttctgggcaatttagacagtgaaactgactttgtttacctgcttgcagcatattagaacagacgatccatgctaatattgtattttctcttaaaacatagctttcctgtaatttaaagtgcttttatgaaaatatttgtaattaattatatatagttggaaatagcagtaagctttcccattataatatatttttgtatacaaataaaatttg

SEQ ID NO: 417999 - DNA, 1092 bp, Homo sapiens
agcgggggggggacaggtaaccggcagcgcctggggaggaatctggccgcgccaagtcgctgggtgaccctgggcctggcgaaggctcagttttcttgtctgtaaaacggacttggtaatagaacgcacttcgggggtggtggagaagattacaagccccggccctggactcggcggccgcggaggacctgtcggacgcgctgtgcgagtttgacgcggtgctggccgacttcgcgtcgcccttccacgagcgccacttccactacgaggagcacctggagcgcatgaagcggcgcagcagcgccagtgtcagcgacagcagcggcttcagcgactcggagagtcctccaccaggctggagggggagccagagagcacatgggcatgaaggtggttcctggtgatctttctcacaatggagactaccccagggtctctttgtcctgaacaactttgtcaacaacagcaacaacaacaaaaacaacaaaagagacagctttttccaggaactcacatgtcctgggaggattacaggtgcagattcactttataggaacagcttcagcttcagtgatgaaaaactgaattctccaacagactctaccccagctcttctctctgccactgtcactcctcagaaagctaaattaggagacacaaaagagctagaagccttcattgctgatcttgacaaaactttagcaagtatgtgaaacaagaagttctgggtcctttcatcataagggagaagcttcagaaagttccgaggacctgctaaaatcagctactagaatctgctgccagaggggacaaagacgtgcactcaaccttctaccaggccactctcaggctcaccttaaaatcagcccttgatcccatttctgggcaatttagacagtgaaactgactttgtttacctgcttgcagcatattagaacagacgatccatgctaatattgtattttctcttaaaacatagctttcctgtaatttaaagtgcttttatgaaaatatttgtaattaattatatatagttggaaatagcagtaagctttcccattataatatatttttgtatacaaataaaatttg

SEQ ID NO: 418000 - DNA, 618 bp, Homo sapiens
gtgctaagtctataatctcatgagtactatttctaatgagtatattttccttcctgaaaggtgcagattcactttataggaacagcttcagcttcagtgatgaaaaactgaattctccaacagactctaccccagctcttctctctgccactgtcactcctcagaaagctaaattaggagacacaaaagagctagaagccttcattgctgatcttgacaaaactttagcaagtatgtgaaacaagaagttctgggtcctttcatcataagggagaagcttcagaaagttccgaggacctgctaaaatcagctactagaatctgctgccagaggggacaaagacgtgcactcaaccttctaccaggccactctcaggctcaccttaaaatcagcccttgatcccatttctgggcaatttagacagtgaaactgactttgtttacctgcttgcagcatattagaacagacgatccatgctaatattgtattttctcttaaaacatagctttcctgtaatttaaagtgcttttatgaaaatatttgtaattaattatatatagttggaaatagcagtaagctttcccattataatatatttttgtatacaaataaaatttg

SEQ ID NO: 418001 - DNA, 624 bp, Homo sapiens
gaggtgtggtccctgcgatctgggccagccagcctctgggcccagggatgggggcgaagctctcaggtgcagattcactttataggaacagcttcagcttcagtgatgaaaaactgaattctccaacagactctaccccagctcttctctctgccactgtcactcctcagaaagctaaattaggagacacaaaagagctagaagccttcattgctgatcttgacaaaactttagcaagtatgtgaaacaagaagttctgggtcctttcatcataagggagaagcttcagaaagttccgaggacctgctaaaatcagctactagaatctgctgccagaggggacaaagacgtgcactcaaccttctaccaggccactctcaggctcaccttaaaatcagcccttgatcccatttctgggcaatttagacagtgaaactgactttgtttacctgcttgcagcatattagaacagacgatccatgctaatattgtattttctcttaaaacatagctttcctgtaatttaaagtgcttttatgaaaatatttgtaattaattatatatagttggaaatagcagtaagctttcccattataatatatttttgtatacaaataaaatttg

SEQ ID NO: 418002 - DNA, 1696 bp, Homo sapiens
gaaaatttggagactagactgttctctctcatgtgatgtaatcaagactgtgcaaatgacagtgtttcttaggagtctcctcccagacttgttggttctagaatttaaaactcagcagtttgcctttgcagatagtgggattctttttattgcattaattatttaaccaatgctttcagatgaccaatttagcaattaaatggggttgtcattattagataagctatgatctaacatgatttaaaatagcagctccagcctgtctctactgtggtattaatagacctaaaatgtctttaaagatgcatgagcagtttcttattttttggaactggtaaaatgtctccagctagagagttgaatgttctgttacattggacaagtgcctttttgaaaacaaaaggagctttttttcttaagaaaagttatacttgctgaaaatagttgcagaatgcaataaaaatggaacatagttaaaaagaaatgacaattccatcactcttttcactttggcaataagacaggacttcactcttttttcagaagaggcatttgaaagttcccttctcaacatagcaacgttagcacccactgggaattctgccactatccagccctcagtctgtaatgaatcagttgaattcagagacagagcagtctaaaaagtggcttaaaacgtgctcagatttgttacctgatcctcaagaggtaggaattaaagagggaaaaaaagcccctagtggcaaattgacttaaaaggctaagaacaattagccatttgtagccagcaggtgttaattaataaaactgtccagtactgcatttcagggaaggcatgaatgatgtgatgaactctacaaaaataaagtcagctatatgaaaaaaatctctacatctcaggctctagagagaaccaaatcagaatgaggactcgtttccttgtgtgggcacctggaggggatgaggctgtcctgggcccagaagactcatggcaccttccctgtaccattttgataagaaacagtgaactcttcattcatttcatattggaggaactctgagggctgcagcgttgccctggggggacagcacaagcaagaatgcatcagaaggctagtgccgcaggaatgacacaatctaggtgtctgctctgcacagtgctatgcttactgaattttttgactaataactcatattctacacaatacaaaaaccagactccttttatcttcccttcctgctcctcactctcctgcaaacatttaagacagtgaaggaagattcctcttctaggtgagggagaagtggggtgggatgtttggagagggtggtgatgaactaaaaaataaagaaacacttaggctagtcttcagaatcagtttctgagtttactgtatcaaaacactggagcacacacttagggttggcccaggacactcttcaataaaagtctctgaagataaggaggtagatgtaaaatagaaataatccattctataactctggaagttccaacttcctggaaaactcaatatggagtcatcagctgtctttgttatggaaactgaactctctctctctctctctctccctctcctgtttcacagctaaattaggagacacaaaagagctagaagccttcattgctgatcttgacaaaactttagcaagtaagtacatgtctgatattaaaaac

SEQ ID NO: 418003 - DNA, 732 bp, Homo sapiens
ggagggcggcggggacagacccgtcgccccggctccgcagccccgccccggccccgcctccgctccggccgccgaaggctataagatctaggaacccgagccggtggtagggcgggcgcggaccgtgctgggagcggcgcggctggagcgcagcgccgaagggactggcagggctgaagtgtgcgggacagcaagcccccgaatagccccggctgccacctcgcaggacccaaggccacgcgcgccgggcccagctgagccgcctcatgaagccgcccgcggcgcagggcagccccgcggccgccgcggccgcagccccggccctggactcggcggccgcggaggacctgtcggacgcgctgtgcgagtttgacgcggtgctggccgacttcgcgtcgcccttccacgagcgccacttccactacgaggagcacctggagcgcatgaagcggcgcagcagcgccagtgtcagcgacagcagcggcttcagcgactcggagagtgcagattcactttataggaacagcttcagcttcagtgatgaaaaactgaattctccaacagactctaccccagctcttctctctgccactgtcactcctcagaaagctaaattaggagacacaaaagagctagaagccttcattgctgatcttgacaaaactttagcaattggaaacaagagtctgggccttctataagggggaggaaagctcaaagttccgagactgc

SEQ ID NO: 418004 - DNA, 1100 bp, Homo sapiens
ggagggcggcggggacagacccgtcgccccggctccgcagccccgccccggccccgcctccgctccggccgccgaaggctataagatctaggaacccgagccggtggtagggcgggcgcggaccgtgctgggagcggcgcggctggagcgcagcgccgaagggactggcagggctgaagtgtgcgggacagcaagcccccgaatagccccggctgccacctcgcaggacccaaggccacgcgcgccgggcccagctgagccgcctcatgaagccgcccgcggcgcagggcagccccgcggccgccgcggccgcagccccggccctggactcggcggccgcggaggacctgtcggacgcgctgtgcgagtttgacgcggtgctggccgacttcgcgtcgcccttccacgagcgccacttccactacgaggagcacctggagcgcatgaagcggcgcagcagcgccagtgtcagcgacagcagcggcttcagcgactcggagagtcctccaccaggctggagggggagccagagagcacatgggcatgaaggtggttcctggtgatctttctcacaatggagactaccccagggtctctttgtcctgaacaactttgtcaacaacagcaacaacaacaaaaacaacaaaagagacagctttttccaggaactcacatgtcctgggaggattacaggtacctcaaacagcaaattaggtgcctttttaatattacatgattgttggtttcaaatccagaattgcttattgtttttcaaagggcaaagtcaattttaaactcttctgtgttattcttcagcctttaatccttagatgggttacaggcatgaatgtcactccttttgctgcccttgactcaggacgtgaaagtaatggcctttccgtgtgattctcttattttgaaacctggagctcttccttgttcctgggctaagattcggggctagacatgaacatgagctgcccttctgcaaagggataaatgcgctcaccaccctggtcagggtttgactcaggaagctgagttccagcttgtttccttggcagcactgccaaagagttagaccaagctgcagcttttga

SEQ ID NO: 418005 - DNA, 885 bp, Homo sapiens
ggagggcggcggggacagacccgtcgccccggctccgcagccccgccccggccccgcctccgctccggccgccgaaggctataagatctaggaacccgagccggtggtagggcgggcgcggaccgtgctgggagcggcgcggctggagcgcagcgccgaagggactggcagggctgaagtgtgcgggacagcaagcccccgaatagccccggctgccacctcgcaggacccaaggccacgcgcgccgggcccagctgagccgcctcatgaagccgcccgcggcgcagggcagccccgcggccgccgcggccgcagccccggccctggactcggcggccgcggaggacctgtcggacgcgctgtgcgagtttgacgcggtgctggccgacttcgcgtcgcccttccacgagcgccacttccactacgaggagcacctggagcgcatgaagcggcgcagcagcgccagtgtcagcgacagcagcggcttcagcgactcggagagtaagtgcggcccccgctaggatggcgccgggatctcccagctcccaggacctgccccgcgaaggctgcggcctcagttttcttatcagtaaactgaggaatggtttcctgaagctcaacgcagtaggccgagtggtggcggggcccctgacgataatcacgggaaaggtcgctggagggcaggttggttcacttgccgcccacgggtgtgtcaccaggcaggcgagtttaagcagcttgtcccgactcagccagacaggactccctggacctgcaccaggcctttccgcagtttccctcctcttctcctttccgtgcctctcccctctcagctgtaactttgcagatgtggaacaagtgccagtggaatgagggggcacagtg

SEQ ID NO: 418006 - DNA, 2718 bp, Homo sapiens
  misc_feature (1)..(1): n is a, c, g, or t
  misc_feature (4)..(4): n is a, c, g, or t
  misc_feature (7)..(8): n is a, c, g, or t
ncgngtnngggggaaatctccttcagtggaagctgctgagtgtcgttggcggaaagtatcctggagcccagcaaaagcctccaaagcactagagcttccctaaagaaaagcagaataaaagaaagacaagaagggaagcccgttcctctaaagcccgggtttccaatagtcccggatcctcctggagttgggcgaaggcgcagttggcagcagccgctgctggcacccggacttggaaaggcggtgttcccccttttcgggaggagggaggcagggacttgcaggcaagagttgcacctggtctaggaacctgcagagaaaagaactctggggagaagaactgccccggagcgcagcagccaccctccgaccatgccccggtgaggggggcggacttcgagggcaacttgccgcggactgcctgggcttagccagcgagctacgcgctcccgggagcccggaattgcacggcgcagcccggcggggggctatcgtctatgtcttcttggggcgccagacgaatcggggtctcgtttttgctggaagagcccagtgttggtggcttcaggtggctgctgccgccgccgccgccgccgccgctgctagtgcggtttccgccgctggtgcgaagagaagagacacgcgagcggggagacctccaaggcagcgaggcatcggacatgtgtcagcacatctggggcgcacatccgtcgagcccgaggggagatttgccggaacaattcaaactgcgatattgatcttgggggtgactgtccctggccggctgtcgggtgggagtgcgagtgtgcactcgctcggaagtgtgtgcgagtgtgtatgtgtgtgtgccgtgtcgggctccccccttccccccgttttcccgtcgagtgatgcacttggaatgagaatcagaggatggaaatagtctgggaggtgctttttcttcttcaagccaatttcatcgtctgcatatcagctcaacagaattcaccaaaaatccatgaaggctggtgggcatacaaggaggtggtccagggaagctttgttccagttccttctttctggggattggtgaactcagcttggaatctttgctctgtggggaaacggcagtcgccagtcaacatagagaccagtcacatgatcttcgacccctttctgacacctcttcgcatcaacacggggggcaggaaggtcagtgggaccatgtacaacactggaagacacgtatcccttcgcctggacaaggagcacttggtcaacatatctggagggcccatgacatacagccaccggctggaggagatccgactacactttgggagtgaggacagccaagggtcggagcacctcctcaatggacaggccttctctggggaggtgcagctcatccactataaccatgagctatatacgaatgtcacagaagctgcaaagagtccaaatggattggtggtagtttctatatttataaaagtttctgattcatcaaacccatttcttaatcgaatgctcaacagagatactatcacaagaataacatataaaaatgatgcatatttactacaggggcttaatatagaggaactatatccagagacctctagtttcatcacttacgatgggtcgatgactatcccaccctgctatgagacagcaagttggatcataatgaacaaacctgtctatataaccaggatgcagatgcattccttgcgcctgctcagccagaaccagccatctcagatctttctgagcatgagtgacaacttcaggcctgtccagccactcaacaaccgctgcatccgcaccaatatcaacttcagtttacaggggaaggactgtccaaacaaccgagcccagaagcttcagtatagagtaaatgaatggctcctcaagtagggaacaaagccaagaagaatcccacctcagtgaaatgctacaactgtgaattgacgtaacctagaatgtcccccttcttgcttctctctccttctttcccccaagcctcattcattcttgggattggccctttcttcatgaaaagtgtctgcaaaaccatggcagaggaatacatctctcacacatactcacaaacacacacacaagcacttgcacatacatacaaacacatgcaaacatacctacacacacacacactcttacaacctccatcatgggaagtcaagtttcagaaacaaaagtctcattcataagaggtcttagaagaaaataaccagttaacctgatttcaattttgataccgttttcctgaactaataaatctacccaatgagacttttcagcctttgtacatacaaaattcttccaaaagagagaggagaaaatacagctctgatggcatcaaacggactttgcatcaagtaatttcagatagtgtcctaggatcctttgagggtgctggtagcaggtgagcaggacaaagttgaccaaggacacttatttctagattatgattcttctgtttactcaacaatttacaaagaaaaaaaggacagacattgaagagctacacattgtatatatatcaccacagactataaggaaatggaattatttccctctttgtcacatatctgtagtaggatttgccaagatcagaaatgatccatttgctgtttcttgttttccaaaggtcatacattgtgtttggttattgttaccagctcaataaatgtgtttaacgagttaatttca

SEQ ID NO: 418007 - DNA, 2932 bp, Homo sapiens
aatcgggacaagcgcgccgagaaatcctggatcttcccagggattccctctacgctccctcctcttcttcaataaccccaaagaggagaagaactgccccggagcgcagcagccaccctccgaccatgccccggtgaggggggcggacttcgagggcaacttgccgcggactgcctgggcttagccagcgagctacgcgctcccgggagcccggaattgcacggcgcagcccggcggggggctatcgtctatgtcttcttggggcgccagacgaatcggggtctcgtttttgctggaagagcccagtgttggtggcttcaggtggctgctgccgccgccgccgccgccgccgctgctagtgcggtttccgccgctggtgcgaagagaagagacacgcgagcggggagacctccaaggcagcgaggcatcggacatgtgtcagcacatctggggcgcacatccgtcgagcccgaggggagatttgccggaacaattcaaactgcgatattgatcttgggggtgactgtccctggccggctgtcgggtgggagtgcgagtgtgcactcgctcggaagtgtgtgcgagtgtgtatgtgtgtgtgccgtgtcgggctccccccttccccccgttttcccgtcgagtgatgcacttggaatgagaatcagaggatggaaatagtctgggaggtgctttttcttcttcaagccaatttcatcgtctgcatatcagctcaacagaattcaccaaaaatccatgaaggctggtgggcatacaaggaggtggtccagggaagctttgttccagttccttctttctggggattggtgaactcagcttggaatctttgctctgtggggaaacggcagtcgccagtcaacatagagaccagtcacatgatcttcgacccctttctgacacctcttcgcatcaacacggggggcaggaaggtcagtgggaccatgtacaacactggaagacacgtatcccttcgcctggacaaggagcacttggtcaacatatctggagggcccatgacatacagccaccggctggaggagatccgactacactttgggagtgaggacagccaagggtcggagcacctcctcaatggacaggccttctctggggaggtgcagctcatccactataaccatgagctatatacgaatgtcacagaagctgcaaagagtccaaatggattggtggtagtttctatatttataaaagtttctgattcatcaaacccatttcttaatcgaatgctcaacagagatactatcacaagaataacatataaaaatgatgcatatttactacaggggcttaatatagaggaactatatccagagacctctagtttcatcacttacgatgggtcgatgactatcccaccctgctatgagacagcaagttggatcataatgaacaaacctgtctatataaccaggatgcagatgcattccttgcgcctgctcagccagaaccagccatctcagatctttctgagcatgagtgacaacttcaggcctgtccagccactcaacaaccgctgcatccgcaccaatatcaacttcagtttacaggggaaggactgtccaaacaaccgagcccagaagcttcagtatagagtaaatgaatggctcctcaagtagggaacaaagccaagaagaatcccacctcagtgaaatgctacaactgtgaattgacgtaacctagaatgtcccccttcttgcttctctctccttctttcccccaagcctcattcattcttgggattggccctttcttcatgaaaagtgtctgcaaaaccatggcagaggaatacatctctcacacatactcacaaacacacacacaagcacttgcacatacatacaaacacatgcaaacatacctacacacacacacactcttacaacctccatcatgggaagtcaagtttcagaaacaaaagtctcattcataagaggtcttagaagaaaataaccagttaacctgatttcaattttgataccgttttcctgaactaataaatctacccaatgagacttttcagcctttgtacatacaaaattcttccaaaagagagaggagaaaatacagctctgatggcatcaaacggactttgcatcaagtaatttcagatagtgtcctaggatcctttgagggtgctggtagcaggtgagcaggacaaagttgaccaaggacacttatttctagattatgattcttctgtttactcaacaatttacaaagaaaaaaaggacagacattgaagagctacacattgtatatatatcaccacagactataaggaaatggaattatttccctctttgtcacatatctgtagtaggatttgccaagatcagaaatgatccatttgctgtttcttgttttccaaaggtcatacattgtgtttggttattgttaccagctcaataaatgtgtttaacgagttaatttcatttttctggctttggtctgttctccttccttacaggctaagccctggctccatgcaactgcattctttgatttcacttgttccttcatctacatgttttgttcatttgcagccagtttttactgagtttgtggcaatcaggaatgcatttgctaagcaagtatgactttaattccactccatggctcaatcattcacatgaggtgagcttcagcctgagatagcaggcgacagacttcttgcgtttcaaaactgccatgcccccctgtgatgctcccgtgaaggaatgcactttgccttgtaagttcctgggaaaggggtatgttttctctccaggtgcagccagatctcacaaagtacaaaacgaatgcctttcttttcttgtttataatggtcactcactgtgtttggttactgtcaagaaatcaataaatgtgtttaacaagttacccagtacccatg

SEQ ID NO: 418008 - DNA, 3212 bp, Homo sapiens
aaataacgacccctgcagttgtattgcggaaaatctcgacagcggcgctagttgcgggcgatggaagccaggcaactgggggttctggggagttcaggaaaatagcagaggagcaggaagggcgcgcgcgacctggagagtctgtgtgcccccaccgcgccccagtccccggggcccagcccttcccctcggcgccctggacgcactgccggaacccggctgagaggctgcaggctgcgcgcggacctggggagcagggagggtcggcggaggctgccggcggctggcggtttcgggcaataatccctgcctctctttctctgtgtgtctgctgtgtctgctccttccccgccccccggaagcaggagaagaactgccccggagcgcagcagccaccctccgaccatgccccggtgaggggggcggacttcgagggcaacttgccgcggactgcctgggcttagccagcgagctacgcgctcccgggagcccggaattgcacggcgcagcccggcggggggctatcgtctatgtcttcttggggcgccagacgaatcggggtctcgtttttgctggaagagcccagtgttggtggcttcaggtggctgctgccgccgccgccgccgccgccgctgctagtgcggtttccgccgctggtgcgaagagaagagacacgcgagcggggagacctccaaggcagcgaggcatcggacatgtgtcagcacatctggggcgcacatccgtcgagcccgaggggagatttgccggaacaattcaaactgcgatattgatcttgggggtgactgtccctggccggctgtcgggtgggagtgcgagtgtgcactcgctcggaagtgtgtgcgagtgtgtatgtgtgtgtgccgtgtcgggctccccccttccccccgttttcccgtcgagtgatgcacttggaatgagaatcagaggatggaaatagtctgggaggtgctttttcttcttcaagccaatttcatcgtctgcatatcagctcaacagaattcaccaaaaatccatgaaggctggtgggcatacaaggaggtggtccagggaagctttgttccagttccttctttctggggattggtgaactcagcttggaatctttgctctgtggggaaacggcagtcgccagtcaacatagagaccagtcacatgatcttcgacccctttctgacacctcttcgcatcaacacggggggcaggaaggtcagtgggaccatgtacaacactggaagacacgtatcccttcgcctggacaaggagcacttggtcaacatatctggagggcccatgacatacagccaccggctggaggagatccgactacactttgggagtgaggacagccaagggtcggagcacctcctcaatggacaggccttctctggggaggtgcagctcatccactataaccatgagctatatacgaatgtcacagaagctgcaaagagtccaaatggattggtggtagtttctatatttataaaagtttctgattcatcaaacccatttcttaatcgaatgctcaacagagatactatcacaagaataacatataaaaatgatgcatatttactacaggggcttaatatagaggaactatatccagagacctctagtttcatcacttacgatgggtcgatgactatcccaccctgctatgagacagcaagttggatcataatgaacaaacctgtctatataaccaggatgcagatgcattccttgcgcctgctcagccagaaccagccatctcagatctttctgagcatgagtgacaacttcaggcctgtccagccactcaacaaccgctgcatccgcaccaatatcaacttcagtttacaggggaaggactgtccaaacaaccgagcccagaagcttcagtatagagtaaatgaatggctcctcaagtagggaacaaagccaagaagaatcccacctcagtgaaatgctacaactgtgaattgacgtaacctagaatgtcccccttcttgcttctctctccttctttcccccaagcctcattcattcttgggattggccctttcttcatgaaaagtgtctgcaaaaccatggcagaggaatacatctctcacacatactcacaaacacacacacaagcacttgcacatacatacaaacacatgcaaacatacctacacacacacacactcttacaacctccatcatgggaagtcaagtttcagaaacaaaagtctcattcataagaggtcttagaagaaaataaccagttaacctgatttcaattttgataccgttttcctgaactaataaatctacccaatgagacttttcagcctttgtacatacaaaattcttccaaaagagagaggagaaaatacagctctgatggcatcaaacggactttgcatcaagtaatttcagatagtgtcctaggatcctttgagggtgctggtagcaggtgagcaggacaaagttgaccaaggacacttatttctagattatgattcttctgtttactcaacaatttacaaagaaaaaaaggacagacattgaagagctacacattgtatatatatcaccacagactataaggaaatggaattatttccctctttgtcacatatctgtagtaggatttgccaagatcagaaatgatccatttgctgtttcttgttttccaaaggtcatacattgtgtttggttattgttaccagctcaataaatgtgtttaacgagttaatttcatttttctggctttggtctgttctccttccttacaggctaagccctggctccatgcaactgcattctttgatttcacttgttccttcatctacatgttttgttcatttgcagccagtttttactgagtttgtggcaatcaggaatgcatttgctaagcaagtatgactttaattccactccatggctcaatcattcacatgaggtgagcttcagcctgagatagcaggcgacagacttcttgcgtttcaaaactgccatgcccccctgtgatgctcccgtgaaggaatgcactttgccttgtaagttcctgggaaaggggtatgttttctctccaggtgcagccagatctcacaaagtacaaaacgaatgcctttcttttcttgtttataatggtcactcactgtgtttggttactgtcaagaaatcaataaatgtgtttaacaagttacccagtacccatg

SEQ ID NO: 418009 - DNA, 2108 bp, Homo sapiens
agcggacagtcaggaaaatgaagctgaacatcaagtcccagcaagaaaagaaggaaaaggaatgccaagcagtcatgttagcagtttgaaggggctggagcaagatggaatcaggaataaggagtcagtgggaccatgtacaacactggaagacacgtatcccttcgcctggacaaggagcacttggtcaacatatctggagggcccatgacatacagccaccggctggaggagatccgactacactttgggagtgaggacagccaagggtcggagcacctcctcaatggacaggccttctctggggaggtgcagctcatccactataaccatgagctatatacgaatgtcacagaagctgcaaagagtccaaatggattggtggtagtttctatatttataaaagtttctgattcatcaaacccatttcttaatcgaatgctcaacagagatactatcacaagaataacatataaaaatgatgcatatttactacaggggcttaatatagaggaactatatccagagacctctagtttcatcacttacgatgggtcgatgactatcccaccctgctatgagacagcaagttggatcataatgaacaaacctgtctatataaccaggatgcagatgcattccttgcgcctgctcagccagaaccagccatctcagatctttctgagcatgagtgacaacttcaggcctgtccagccactcaacaaccgctgcatccgcaccaatatcaacttcagtttacaggggaaggactgtccaaacaaccgagcccagaagcttcagtatagagtaaatgaatggctcctcaagtagggaacaaagccaagaagaatcccacctcagtgaaatgctacaactgtgaattgacgtaacctagaatgtcccccttcttgcttctctctccttctttcccccaagcctcattcattcttgggattggccctttcttcatgaaaagtgtctgcaaaaccatggcagaggaatacatctctcacacatactcacaaacacacacacaagcacttgcacatacatacaaacacatgcaaacatacctacacacacacacactcttacaacctccatcatgggaagtcaagtttcagaaacaaaagtctcattcataagaggtcttagaagaaaataaccagttaacctgatttcaattttgataccgttttcctgaactaataaatctacccaatgagacttttcagcctttgtacatacaaaattcttccaaaagagagaggagaaaatacagctctgatggcatcaaacggactttgcatcaagtaatttcagatagtgtcctaggatcctttgagggtgctggtagcaggtgagcaggacaaagttgaccaaggacacttatttctagattatgattcttctgtttactcaacaatttacaaagaaaaaaaggacagacattgaagagctacacattgtatatatatcaccacagactataaggaaatggaattatttccctctttgtcacatatctgtagtaggatttgccaagatcagaaatgatccatttgctgtttcttgttttccaaaggtcatacattgtgtttggttattgttaccagctcaataaatgtgtttaacgagttaatttcatttttctggctttggtctgttctccttccttacaggctaagccctggctccatgcaactgcattctttgatttcacttgttccttcatctacatgttttgttcatttgcagccagtttttactgagtttgtggcaatcaggaatgcatttgctaagcaagtatgactttaattccactccatggctcaatcattcacatgaggtgagcttcagcctgagatagcaggcgacagacttcttgcgtttcaaaactgccatgcccccctgtgatgctcccgtgaaggaatgcactttgccttgtaagttcctgggaaaggggtatgttttctctccaggtgcagccagatctcacaaagtacaaaacgaatgcctttcttttcttgtttataatggtcactcactgtgtttggttactgtcaagaaatcaataaatgtgtttaacaagttacccagtacccatg

SEQ ID NO: 418010 - DNA, 1666 bp, Homo sapiens
aaataacgacccctgcagttgtattgcggaaaatctcgacagcggcgctagttgcgggcgatggaagccaggcaactgggggttctggggagttcaggaaaatagcagaggagcaggaagggcgcgcgcgacctggagagtctgtgtgcccccaccgcgccccagtccccggggcccagcccttcccctcggcgccctggacgcactgccggaacccggctgagaggctgcaggctgcgcgcggacctggggagcagggagggtcggcggaggctgccggcggctggcggtttcgggcaataatccctgcctctctttctctgtgtgtctgctgtgtctgctccttccccgccccccggaagcaggagaagaactgccccggagcgcagcagccaccctccgaccatgccccggtgaggggggcggacttcgagggcaacttgccgcggactgcctgggcttagccagcgagctacgcgctcccgggagcccggaattgcacggcgcagcccggcggggggctatcgtctatgtcttcttggggcgccagacgaatcggggtctcgtttttgctggaagagcccagtgttggtggcttcaggtggctgctgccgccgccgccgccgccgccgctgctagtgcggtttccgccgctggtgcgaagagaagagacacgcgagcggggagacctccaaggcagcgaggcatcggacatgtgtcagcacatctggggcgcacatccgtcgagcccgaggggagatttgccggaacaattcaaactgcgatattgatcttgggggtgactgtccctggccggctgtcgggtgggagtgcgagtgtgcactcgctcggaagtgtgtgcgagtgtgtatgtgtgtgtgccgtgtcgggctccccccttccccccgttttcccgtcgagtgatgcacttggaatgagaatcagaggatggaaatagtctgggaggtgctttttcttcttcaagccaatttcatcgtctgcatatcagctcaacagaattcaccaaaaatccatgaaggctggtgggcatacaaggaggtggtccagggaagctttgttccagttccttctttctggggattggtgaactcagcttggaatctttgctctgtggggaaacggcagtcgccagtcaacatagagaccagtcacatgatcttcgacccctttctgacacctcttcgcatcaacacggggggcaggaaggtcagtgggaccatgtacaacactggaagacacgtatcccttcgcctggacaaggagcacttggtcaacatatctggagggcccatgacatacagccaccggctggaggagatccgactacactttgggagtgaggacagccaagggtcggagcacctcctcaatggacaggccttctctggggaggaaaaagtctgctgacccctgaattacagtatgagccattcggaatgcatttctctttaaaagttctcgcctcattcagtgtctggaacacagtgggtgctccccaataggtgacaccttcctcaagtttccttgggagaacagactcaatgtcggatccacaaaggagacctgcacatacctaacccctatttctgcagaagctgaaggctgtattatctattgcttgcataataaatattgcataacaaca

SEQ ID NO: 418011 - DNA, 1582 bp, Homo sapiens
  misc_feature (8)..(8): n is a, c, g, or t
  misc_feature (11)..(11): n is a, c, g, or t
gggatctngcnagatcccctacaaattccccacatacgtaggccaggagcctcagcggtgccccttcaggctcatctggcaagacggtaccagcttgctcagaacaggggctggctattcatcatctcagagcatagagaccctctccttgccacccggcccttcccacctggttggtgacaaatcacaaggtggtagaagttgccagggacagataacatggcagccagcgggaagaccagcaagtccgaaccgaaccatgttatcttcaagaagatctcccgggacaaatcggtgaccatctacctggggaacagagactacatagaccatgtcagccaagtccagcctgtggatggtgtcgtgttggttgatcctgatcttgtgaagggaaagaaagtgtatgtcactctgacctgcgccttccgctatggccaagaggacattgacgtgatcggcttgaccttccgcagggacctgtacttctcccgggtccaggtgtatcctcctgtgggggccgcgagcacccccacaaaactgcaagagagcctgcttaaaaagctggggagcaacacgtacccctttctcctgacgtttcctgactacttgccctgttcagtgatgttgcagccagctccacaagattcagggaagtcctgtggggttgactttgaggtcaaagcattcgccacagacagcaccgatgccgaagaggacaaaatccccaagaagagctccgtgcgattactgatccgcaaagtacagcatgccccacttgagatgggtccccagccccgagctgaggcggcctggcagttcttcatgtctgacaagcccctgcaccttgcggtctctctcaacaaagagatctatttccatggggagcccatccctgtgaccgtgactgtcaccaataacacagagaagaccgtgaagaagattaaagcattcgtggaacaggtggccaatgtggttctctactcgagtgattattacgtcaagcccgtggctatggaggaagcgcaagaaaaagtgccaccaaacagcactttgaccaagacgctgacgctgctgcccttgctggctaacaatcgagaaaggagaggcattgccctggatgggaaaatcaagcacgaggacacaaaccttgcctccagcaccatcattaaggagggcatagaccggaccgtcctgggaatcctggtgtcttaccagatcaaggtgaagctcacagtgtcaggctttctgggagagctcacctccagtgaagtcgccactgaggtcccattccgcctcatgcaccctcagcctgaggacccagctaaggaaagttatcaggatgcaaatttagtttttgaggagtttgctcgccataatctgaaagatgcaggagaagctgaggaggggaagagagacaagaatgacattgatgagtgaagatgtcggctcaggatgccggaaaatgacctgtagttaccagtgcaacgagcaaagccccacagtttagtcctttggagttatgctgcgtatgaaaggatgagtcttcttccgagaaataaagcttgtttgttctcccctgggt

SEQ ID NO: 418012 - DNA, 473 bp, Homo sapiens
  misc_feature (170)..(170): n is a, c, g, or t
tcgcctgttcccaggtagatggtcaccgatttgtcccgggagatcttcttgaagataacatggttcggttcggacttgctggtcttcccgctggctgccatgttatctgtccctggcaacttctaccaccttgtgatttgtcaccaaccaggtgggaagggccgggtggnaaggagagtttcctgactacttgccctgttcagtgatgttgcagccagctccacaagattcagggaagtcctgtggggttgactttgaggtcaaagcattcgccacagacagcaccgatgccgaagaggacaaaatccccaagaagagctccgtgcgattactgatccgcaaagtacagcatgccccacttgagatgggtccccagccccgagctgaggcggcctggcagttcttcatgtctgacaagcccctgcaccttgcggtctctctcaacaaagaggtaaccacctaccatcgctact

SEQ ID NO: 418013 - DNA, 470 bp, Homo sapiens
  misc_feature (418)..(418): n is a, c, g, or t
ctcaggaggaggctgtggtctctgactcttgagccagtttgtctcattaactccatagaacattctagaaattcagcaattcagaataggctgagttgcttgaagaaatatcctcctgttgctgccagcccaccctgagatttcacaagcactgttctgcttctcagaaaaagtgccaccaaacagcactttgaccaagacgctgacgctgctgcccttgctggctaacaatcgagaaaggagaggcattgccctggatggtgtcagcaacgagtccaggccagaaagcctcttgtcaccaaaaactgtcactataagggggtcacagtgtgactgtgtggtaagttgtctagaggggcaacgcagggacccacaatttgtggatcacacagaccgaatagcttgggtccaaagcagnacatgctctttctctacttggatcttcttcatcatcaagtcggggtatagat

SEQ ID NO: 418014 - DNA, 1631 bp, Homo sapiens
  misc_feature (8)..(8): n is a, c, g, or t
  misc_feature (11)..(11): n is a, c, g, or t
gggatctngcnagatcccctacaaattccccacatacgtaggccaggagcctcagcggtgccccttcaggctcatctggcaagacggtaccagcttgctcagaacaggggctggctattcatcatctcagagcatagagaccctctccttgccacccggcccttcccacctggttggtgacaaatcacaaggattgtcttacctttctccaaccctctaacacctgaccaacaccccaaggtggtagaagttgccagggacagataacatggcagccagcgggaagaccagcaagtccgaaccgaaccatgttatcttcaagaagatctcccgggacaaatcggtgaccatctacctggggaacagagactacatagaccatgtcagccaagtccagcctgtggatggtgtcgtgttggttgatcctgatcttgtgaagggaaagaaagtgtatgtcactctgacctgcgccttccgctatggccaagaggacattgacgtgatcggcttgaccttccgcagggacctgtacttctcccgggtccaggtgtatcctcctgtgggggccgcgagcacccccacaaaactgcaagagagcctgcttaaaaagctggggagcaacacgtacccctttctcctgacgtttcctgactacttgccctgttcagtgatgttgcagccagctccacaagattcagggaagtcctgtggggttgactttgaggtcaaagcattcgccacagacagcaccgatgccgaagaggacaaaatccccaagaagagctccgtgcgattactgatccgcaaagtacagcatgccccacttgagatgggtccccagccccgagctgaggcggcctggcagttcttcatgtctgacaagcccctgcaccttgcggtctctctcaacaaagagatctatttccatggggagcccatccctgtgaccgtgactgtcaccaataacacagagaagaccgtgaagaagattaaagcattcgtggaacaggtggccaatgtggttctctactcgagtgattattacgtcaagcccgtggctatggaggaagcgcaagaaaaagtgccaccaaacagcactttgaccaagacgctgacgctgctgcccttgctggctaacaatcgagaaaggagaggcattgccctggatgggaaaatcaagcacgaggacacaaaccttgcctccagcaccatcattaaggagggcatagaccggaccgtcctgggaatcctggtgtcttaccagatcaaggtgaagctcacagtgtcaggctttctgggagagctcacctccagtgaagtcgccactgaggtcccattccgcctcatgcaccctcagcctgaggacccagctaaggaaagttatcaggatgcaaatttagtttttgaggagtttgctcgccataatctgaaagatgcaggagaagctgaggaggggaagagagacaagaatgacattgatgagtgaagatgtcggctcaggatgccggaaaatgacctgtagttaccagtgcaacgagcaaagccccacagtttagtcctttggagttatgctgcgtatgaaaggatgagtcttcttccgagaaataaagcttgtttgttctcccctgggt

SEQ ID NO: 418015 - DNA, 1240 bp, Homo sapiens
  misc_feature (2)..(2): n is a, c, g, or t
  misc_feature (6)..(7): n is a, c, g, or t
  misc_feature (28)..(28): n is a, c, g, or t
  misc_feature (42)..(42): n is a, c, g, or t
cncgcnncaagaaacttttggtgtcggncgttgactgatctngtgatgggaaagaaagtgtatgtcactctgacctgcgccttccgctatggccaagaggacattgacgtgatcggcttgaccttccgcagggacctgtacttctcccgggtccaggtgtatcctcctgtgggggccgcgagcacccccacaaaactgcaagagagcctgcttaaaaagctggggagcaacacgtacccctttctcctgacgtttcctgactacttgccctgttcagtgatgttgcagccagctccacaagattcagggaagtcctgtggggttgactttgaggtcaaagcattcgccacagacagcaccgatgccgaagaggacaaaatccccaagaagagctccgtgcgattactgatccgcaaagtacagcatgccccacttgagatgggtccccagccccgagctgaggcggcctggcagttcttcatgtctgacaagcccctgcaccttgcggtctctctcaacaaagagatctatttccatggggagcccatccctgtgaccgtgactgtcaccaataacacagagaagaccgtgaagaagattaaagcattcgtggaacaggtggccaatgtggttctctactcgagtgattattacgtcaagcccgtggctatggaggaagcgcaagaaaaagtgccaccaaacagcactttgaccaagacgctgacgctgctgcccttgctggctaacaatcgagaaaggagaggcattgccctggatgggaaaatcaagcacgaggacacaaaccttgcctccagcaccatcattaaggagggcatagaccggaccgtcctgggaatcctggtgtcttaccagatcaaggtgaagctcacagtgtcaggctttctgggagagctcacctccagtgaagtcgccactgaggtcccattccgcctcatgcaccctcagcctgaggacccagctaaggaaagttatcaggatgcaaatttagtttttgaggagtttgctcgccataatctgaaagatgcaggagaagctgaggaggggaagagagacaagaatgacattgatgagtgaagatgtcggctcaggatgccggaaaatgacctgtagttaccagtgcaacgagcaaagccccacagtttagtcctttggagttatgctgcgtatgaaaggatgagtcttcttccgagaaataaagcttgtttgttctcccctgggt

SEQ ID NO: 418016 - DNA, 929 bp, Homo sapiens
  misc_feature (8)..(8): n is a, c, g, or t
  misc_feature (11)..(11): n is a, c, g, or t
  misc_feature (874)..(874): n is a, c, g, or t
  misc_feature (902)..(902): n is a, c, g, or t
  misc_feature (918)..(918): n is a, c, g, or t
gggatctngcnagatcccctacaaattccccacatacgtaggccaggagcctcagcggtgccccttcaggctcatctggcaagacggtaccagcttgctcagaacaggggctggctattcatcatctcagagcatagagaccctctccttgccacccggcccttcccacctggttggtgacaaatcacaaggtggtagaagttgccagggacagataacatggcagccagcgggaagaccagcaagtccgaaccgaaccatgttatcttcaagaagatctcccgggacaaatcggtgaccatctacctggggaacagagactacatagaccatgtcagccaagtccagcctgtggatggtgtcgtgttggttgatcctgatcttgtgaagggaaagaaagtgtatgtcactctgacctgcgccttccgctatggccaagaggacattgacgtgatcggcttgaccttccgcagggacctgtacttctcccgggtccaggtgtatcctcctgtgggggccgcgagcacccccacaaaactgcaagagagcctgcttaaaaagctggggagcaacacgtacccctttctcctgacgtttcctgactacttgccctgttcagtgatgttgcagccagctccacaagattcagggaagtcctgtggggttgactttgaggtcaaagcattcgccacagacagcaccgatgccgaagaggacaaaatccccaagaagagctccgtgcgattactgatccgcaaagtacagcatgccccacttgagatgggtccccagccccgagctgaggcggcctggcagttcttcatgtctgacaagcccctgcaccttgcggtctctctcaacaaagagttttttncccatgggggggccatccccttttaacnttttttttaaccaatnaaaaagggggg

SEQ ID NO: 418017 - DNA, 464 bp, Homo sapiens
gatgttgagaaatctataccccgactgatgatgaagaagatccagtagagaaagagcatgtgctgctttggacccaagctattcggtctgtgtgatccacaaattgtgggtccctgcgttgcccctctagacaacttaccacacagtcacactgtgacccccttatagtgacagtttttggtgacaagaggctttctggcctggactcgttgctgacaccaaccagaaggttctgcaggccaccgtgtggttcacaaagtctcaggaggaggctgtggtctctgactcttgagccagtttgtctcattaactccatagaacattctagaaattcagcaattcagaataggctgagttgcttgaagaaatatcctcctgttgctgccagcccaccctgagatttcacaagcactgttctgcttctcgtaagtcaagttcccaggctcttgaacccaccttcccag

SEQ ID NO: 418018 - DNA, 3503 bp, Homo sapiens
gtgcacgaacgagaagtgttttttttgttttgttttgttttgttttgttttttgtcccaaggcgctgccgtaccgtccaggcggcgagttgcattctggttccgtcgtgtgtctggcgtgtggagctagtgctcccgcttattcgccactgtcgccaccgctgtcatgaaccgcgagagcttcgcggcgggagagcggctggtgtcgccggcttacgtgcggcagggctgtgaggcccgccgctcgcatgagcacctcatacggctgcttctggagaaggggcaagtgtccagagaatggctgggatgaaagtacacttgaactctttttacatgaacttgcaatcatggacagcaacaatttcttaggcaattgtggtgtgggagaaagggaagggagagtggcatccgcactggttgctcgtcgtcattacaggttcattcatggcattggacgatccggtgatatttctgctgtgcaaccaaaagctgcaggctctagccttttgaacaaaattaccaattctttggtcctggacattataaagctggctggtgtccatacagtagccaactgctttgtagttcctatggcaactggtatgagtctaactctgtgtttcttaacattacgacacaaaagaccaaaggcaaagtatattatatggccacgaatagaccagaagtcctgctttaaatccatgatcactgcaggttttgagcctgtggtgatagaaaatgttttggaaggtgacgagctgcgtacagacctgaaagcagtggaggctaaagtccaggaacttgggcctgattgcattctgtgtattcattctactacatcctgttttgctccaagggtgcctgatagattagaagaactggctgtgatttgtgctaattatgacattccacatatagttaataatgcttatggagtgcagtcttcaaagtgtatgcatctcattcagcagggggctcgagttggtagaatagatgcttttgttcagagcttggacaaaaattttatggttccagtaggtggtgctataattgctggctttaatgattcattcattcaggaaatcagcaagatgtatccaggaagagcttcagcttcaccttctttagatgtccttattactttattgtcacttggatcaaatggctataagaagctactaaaagaaagaaaggaaatgttttcatatttgtccaaccaaataaagaagttgtcagaagcctacaatgaaagactgttgcatacacctcacaatcccatatctttagctatgacacttaaaacactagatgaacaccgtgacaaagctgtcactcagcttggctcgatgctttttaccagacaggtttctggagccagggttgtgcctcttgggtccatgcaaactgtgagtggctatactttcagaggctttatgtcacatacaaataattacccttgtgcttacctcaatgctgcatcagccatcggaatgaagatgcaggatgtggacctgttcataaagagacttgacaggtgtttaaaggcagtaagaaaagaacgaagtaaagagagtgatgacaattatgacaaaactgaagatgtggatattgaagaaatggctttaaaactagataatgtacttcttgacacataccaggatgcttcttcatgacatgcgaagggtttcttcttgatcatttgaaagaaatgataaggctgtagtacaagcaagcagtttaaagataagacttgagatttttgaattgagaatttcatgggaatattcagtcaaggagcagactttggtctgaactagccattgatgattgttaagtttcccattcttagactgcatcaatccttgtgatccttaacaggttataatatacaattagcatttttctaattgttagaatatctgtcaattaagcatcatgactcagataatttttactagtgtaatgacagtaaaattacttcaattctctttgaaatgtagagtgcttcctcctaaccattctttaccgtttctgatcacacagaattgagaaagatctcttaggccactagttactagttgtttgttgagatgtgtaagtcacagtgtgcctgtaaaatgggcattccccaaggaagcagagtcaaggtataaactttcgttttgactcaaaagcagtgggtctcaactggggatgattcgcttatctgaacagcatctgcagacatttttggttgtcacaactggtgggatgctgttaacatctagaggatagaggccagggtgctactcaacatcctacaatgcatgggacaactcccacaacaaagaattatccagcccaaaatgtcattagtgctgaggttgagaaatactcctctaaagtagataaactccttgagtaaagagaagtttaccatagcaactttcagtagtacttcaaagaagatagctgtataaatgtcatcaaactatactatatagagaatcttaagtgataaccagggtcacggattccaaacatgtcattataaattgttttatatggtgctcactggtgcatttttccttttggataagggaaaacattattccacttactgtttttgctttaagcagcctgcatatattggttagtttgttcagatgttgtgcacagacatcatcaaaattagctaacatgggtatttttgaacatatttttgccaggaagatgaaaatcacatagtatgataaacaggtgtattcccctctacttgcccatgtgctcatttttctgagtctgaaattccagacttactggctttaacaataatttttgttgttaatttaagaaatagacttacttaagactattttaagaaatagagatgtcatagcctgaagatttactgaagcttctgaacatgccaccatgccaaagctatgtttctcaaacccagctctgtggatcatgttcctaaaagatgctcatggggagaaaatgtttacagacaaataattttgggagctgcctttgcaaacctgcctgttggcatattgaaggctctaagaattccttcactaaataacccagttttaatatatccttatccaaagagaaactcatttttttaaagtgaaatatttgttaacagcccattgaacatacttttaaaaacactatggtagagaatgctgtgttgccttctgggctgcatttttcttattgatttggaattgtaacctatgtatgagaaagggattttctggtattttggtgacgttgtacattgtcccagactgtttgtaaacatgaggtcagacatgtgtaaggtagacgcctatggccactggcttgaccaccttggaagtcaatgactattttgagatgaagtatttaactatgaatatcatgaaggttatttaaaaatgtatttattttatctttggggttcaaacattaaaaaaatttacataggtgtagtaactcatttcaagggaataaatgctggattaaaaagtg

SEQ ID NO: 418019 - DNA, 765 bp, Homo sapiens
gtgcacgaacgagaagtgttttttttgttttgttttgttttgttttgttttttgtcccaaggcgctgccgtaccgtccaggcggcgagttgcattctggttccgtcgtgtgtctggcgtgtggagctagtgctcccgcttattcgccactgtcgccaccgctgtcatgaaccgcgagagcttcgcggcgggagagcggctggtgtcgccggcttacgtgcggcagggctgtgaggcccgccgctcgcatgagcacctcatacggctgcttctggagaaggtaccgagctgtcggtcccctccccagccgccgcgaccccggggctctggctccgccgggcgtccccgctggtgctgcctcaccggcagctcttcgctgcttgagactagtcccaagtctgtctcagcttggcttgccctagctgaccgactgcggtctgtgccttctcagccttgccaaagccagtgaaagccaaatggtgttgttaggagggggtgttggggtcggggttttgagtcccgctgtttctaacttcgggatgcggaagtgagggaaagtcccagtgtacttttttattcgcggaaagggcaaagttcgcacctccatctttcaccaaccctcaacgactcagaacacataatggtgtttgtagactgtatgctaactcgaaccacgagctttccgcggaacttcacaggtctccctcctgccagcgttcatgtattttaatttcattaaaagttttgttgtgttttgtttttttga

SEQ ID NO: 418020 - DNA, 798 bp, Homo sapiens
gggctacgactcttactattttatatatgaaatatattatttcctcaagaaggatgctgggtgcttagcgggataacagatttctgttttgcttcttatttgtaggtgtccatacagtagccaactgctttgtagttcctatggcaactggtatgagtctaactctgtgtttcttaacattacgacacaaaagaccaaaggcaaagtatattatatggccacgaatagaccagaagtcctgctttaaatccatgatcactgcaggttttgagcctgtggtgatagaaaatgttttggaaggtgacgagctgcgtacagacctgaaagcagtggaggctaaagtccaggaacttgggcctgattgcattctgtgtattcattctactacatcctgttttgctccaagggtgcctgataggtaaatgatttgtgaatattgtcctttagctgtttatcagtcttttaaataaaatatactaattctcaaatatgcttaaataacacttcacaataaataggtgaatggtctgttctaagagaatagattgaccttgtggagaaatagcattaacagcttgggaaaccaaccatttgaaatataacaaggaaaaacaattagtacagggtggggagctccctttatcacctgagtcgatgcagaccgtctctgttttcttgctctttgtcctgtttctgatctcttagcatgttttttcttattatttaatagaagtttcttttctaagctaaatgttgggtttacttcttttcattgctatcagtattaataaattaaaa

SEQ ID NO: 418021 - DNA, 5601 bp, Homo sapiens
gtgcacgaacgagaagtgttttttttgttttgttttgttttgttttgttttttgtcccaaggcgctgccgtaccgtccaggcggcgagttgcattctggttccgtcgtgtgtctggcgtgtggagctagtgctcccgcttattcgccactgtcgccaccgctgtcatgaaccgcgagagcttcgcggcgggagagcggctggtgtcgccggcttacgtgcggcagggctgtgaggcccgccgctcgcatgagcacctcatacggctgcttctggagaaggggcaagtgtccagagaatggctgggatgaaagtacacttgaactctttttacatgaacttgcaatcatggacagcaacaatttcttaggcaattgtggtgtgggagaaagggaagggagagtggcatccgcactggttgctcgtcgtcattacaggttcattcatggcattggacgatccggtgatatttctgctgtgcaaccaaaagctgcaggctctagccttttgaacaaaattaccaattctttggtcctggacattataaagctggctggtgtccatacagtagccaactgctttgtagttcctatggcaactggtatgagtctaactctgtgtttcttaacattacgacacaaaagaccaaaggcaaagtatattatatggccacgaatagaccagaagtcctgctttaaatccatgatcactgcaggttttgagcctgtggtgatagaaaatgttttggaaggtgacgagctgcgtacagacctgaaagcagtggaggctaaagtccaggaacttgggcctgattgcattctgtgtattcattctactacatcctgttttgctccaagggtgcctgatagattagaagaactggctgtgatttgtgctaattatgacattccacatatagttaataatgcttatggagtgcagtcttcaaagtgtatgcatctcattcagcagggggctcgagttggtagaatagatgcttttgttcagagcttggacaaaaattttatggttccagtaggtggtgctataattgctggctttaatgattcattcattcaggaaatcagcaagatgtatccaggaagagcttcagcttcaccttctttagatgtccttattactttattgtcacttggatcaaatggctataagaagctactaaaagaaagaaaggaaatgttttcatatttgtccaaccaaataaagaagttgtcagaagcctacaatgaaagactgttgcatacacctcacaatcccatatctttagctatgacacttaaaacactagatgaacaccgtgacaaagctgtcactcagcttggctcgatgctttttaccagacaggtttctggagccagggttgtgcctcttgggtccatgcaaactgtgagtggctatactttcagaggctttatgtcacatacaaataattacccttgtgcttacctcaatgctgcatcagccatcggaatgaagatgcaggatgtggacctgttcataaagagacttgacaggtgtttaaaggcagtaagaaaagaacgaagtaaagagagtgatgacaattatgacaaaactgaagatgtggatattgaagaaatggctttaaaactagataatgtacttcttgacacataccaggatgcttcttcatgacatgcgaagggtttcttcttgatcatttgaaagaaatgataaggctgtagtacaagcaagcagtttaaagataagacttgagatttttgaattgagaatttcatgggaatattcagtcaaggagcagactttggtctgaactagccattgatgattgttaagtttcccattcttagactgcatcaatccttgtgatccttaacaggttataatatacaattagcatttttctaattgttagaatatctgtcaattaagcatcatgactcagataatttttactagtgtaatgacagtaaaattacttcaattctctttgaaatgtagagtgcttcctcctaaccattctttaccgtttctgatcacacagaattgagaaagatctcttaggccactagttactagttgtttgttgagatgtgtaagtcacagtgtgcctgtaaaatgggcattccccaaggaagcagagtcaaggtataaactttcgttttgactcaaaagcagtgggtctcaactggggatgattcgcttatctgaacagcatctgcagacatttttggttgtcacaactggtgggatgctgttaacatctagaggatagaggccagggtgctactcaacatcctacaatgcatgggacaactcccacaacaaagaattatccagcccaaaatgtcattagtgctgaggttgagaaatactcctctaaagtagataaactccttgagtaaagagaagtttaccatagcaactttcagtagtacttcaaagaagatagctgtataaatgtcatcaaactatactatatagagaatcttaagtgataaccagggtcacggattccaaacatgtcattataaattgttttatatggtgctcactggtgcatttttccttttggataagggaaaacattattccacttactgtttttgctttaagcagcctgcatatattggttagtttgttcagatgttgtgcacagacatcatcaaaattagctaacatgggtatttttgaacatatttttgccaggaagatgaaaatcacatagtatgataaacaggtgtattcccctctacttgcccatgtgctcatttttctgagtctgaaattccagacttactggctttaacaataatttttgttgttaatttaagaaatagacttacttaagactattttaagaaatagagatgtcatagcctgaagatttactgaagcttctgaacatgccaccatgccaaagctatgtttctcaaacccagctctgtggatcatgttcctaaaagatgctcatggggagaaaatgtttacagacaaataattttgggagctgcctttgcaaacctgcctgttggcatattgaaggctctaagaattccttcactaaataacccagttttaatatatccttatccaaagagaaactcatttttttaaagtgaaatatttgttaacagcccattgaacatacttttaaaaacactatggtagagaatgctgtgttgccttctgggctgcatttttcttattgatttggaattgtaacctatgtatgagaaagggattttctggtattttggtgacgttgtacattgtcccagactgtttgtaaacatgaggtcagacatgtgtaaggtagacgcctatggccactggcttgaccaccttggaagtcaatgactattttgagatgaagtatttaactatgaatatcatgaaggttatttaaaaatgtatttattttatctttggggttcaaacattaaaaaaatttacataggtgtagtaactcatttcaagggaataaatgctggattaaaaagtgtaaatttttcatgagaatttgggactaaattgctgaaccaataaagctgaagagttgcaacctctagagtcaaaaaagggattgaaatgttgttgcaaatgtaaatgctggcagtgcagcttgctatacatgtaagccaaaattgttttatagaacaagtgatctatattgttgtgatcatcatttagcttaagaaaggccagagctgggagagtagcaaatgttttctcatctgcagtgtatcagcagttcttgggcttcagctgctgaatagataataattctaattgaacataaattacatgaactcacatgtgaatgatagatatgttacaatatttcattcctgatgcagaaaatcagctgtggtttttattattaaccctttctttttcagtggttttggaattctagctctattcctcctggcttaaaatttgagggcatagaattcacaagagtttttgaagagttctgtctattcaggctttcctttgtccccaccctagtgtcattttcactcactcccatttctacacataagtattaaaaaggatgtatttattataattcgctagtactgattggtaagcctcataattggcctttgttatctttgtactgtgacgaaggcagtggatgatacattaccaatcattgccgaagataacctcttctatctttttgacccaactacccttattaaaactatcaggtaaaatattggagttaggtttttaaagtcattgggctgtggcagtgtgcttagaaaagaaaatggtggaacatagaatattcttttggtcactacacaatgtgttacttatacatggcagggaagggaattttaaatcaaactcgcagtttggttcttaggtcctctgctgatgaattctcgctctatcagggaatgatatgtgacgccagccttaggaacctggtgttcaactgtaaatctttctatttagctttttgtattagttgaatgaagttatagaatatgaattattgaatacagttctgttcagccaataggcacttgatatacagaatggtaaatttaaatataaattaaatttttctaatattatgatcagcacttcactgtggttctgtgtctttaaccacctcataataagaactgttattgaggactgggctacagaatgtgcttagactacatctatggcttccatagattttagtaaaatttaaacagataatttgtgtttactgctgatgttactttaatattgaattagtagttcatcctgagagttatatttcacagaggaaaataaccaacagctgaaaacaacaataataaagctctggtgagtctgactcatactcggagaaagtttttggaatacatacacatttggtgcatataagagttgggtttccttttcccactttctgagatgtactaacctctgccagacccttaaatgattttgttatgttttgcatttttgaggccaaccttattttgtaactgaaaaaagtccagttttgcatacacagaaatttggtcattttagaagtctcacaacctgaataatttgataataattgaatatgctattaacagctttttaagaaaaggttctattagtcagttttttccttgtctgtcatattatgttggttaatgtctcttatggccaatcttagtaaacagacctaacactcactgcatccttttgtgccttactttttactttccttttgcccttttggtatgtgcgcatgtaagatggtaagtttaaggctaatgaatatatgtttgtaatttcctactcactactctgcagttaaagctaaggccttaggcaaaatctagaaatgtttatattgttttgttttttatcaagtggtgtcaacttgagaaatacaaagaaaggctatgcttaactgtataaccgtgggggattttagccatgagaatatgaagctgatgtcagcctgctaacctgttttaccaaaaggaaaagatgtttccaaaaatgttttcggtgtagactgtttaaagatgaaaataaattatataatttattatatgaaataaatttttgataagtcactgaaagtacgt

SEQ ID NO: 418022 - DNA, 5444 bp, Homo sapiens
gtgcacgaacgagaagtgttttttttgttttgttttgttttgttttgttttttgtcccaaggcgctgccgtaccgtccaggcggcgagttgcattctggttccgtcgtgtgtctggcgtgtggagctagtgctcccgcttattcgccactgtcgccaccgctgtcatgaaccgcgagagcttcgcggcgggagagcggctggtgtcgccggcttacgtgcggcagggctgtgaggcccgccgctcgcatgagcacctcatacggctgcttctggagaaggtcattcatggcattggacgatccggtgatatttctgctgtgcaaccaaaagctgcaggctctagccttttgaacaaaattaccaattctttggtcctggacattataaagctggctggtgtccatacagtagccaactgctttgtagttcctatggcaactggtatgagtctaactctgtgtttcttaacattacgacacaaaagaccaaaggcaaagtatattatatggccacgaatagaccagaagtcctgctttaaatccatgatcactgcaggttttgagcctgtggtgatagaaaatgttttggaaggtgacgagctgcgtacagacctgaaagcagtggaggctaaagtccaggaacttgggcctgattgcattctgtgtattcattctactacatcctgttttgctccaagggtgcctgatagattagaagaactggctgtgatttgtgctaattatgacattccacatatagttaataatgcttatggagtgcagtcttcaaagtgtatgcatctcattcagcagggggctcgagttggtagaatagatgcttttgttcagagcttggacaaaaattttatggttccagtaggtggtgctataattgctggctttaatgattcattcattcaggaaatcagcaagatgtatccaggaagagcttcagcttcaccttctttagatgtccttattactttattgtcacttggatcaaatggctataagaagctactaaaagaaagaaaggaaatgttttcatatttgtccaaccaaataaagaagttgtcagaagcctacaatgaaagactgttgcatacacctcacaatcccatatctttagctatgacacttaaaacactagatgaacaccgtgacaaagctgtcactcagcttggctcgatgctttttaccagacaggtttctggagccagggttgtgcctcttgggtccatgcaaactgtgagtggctatactttcagaggctttatgtcacatacaaataattacccttgtgcttacctcaatgctgcatcagccatcggaatgaagatgcaggatgtggacctgttcataaagagacttgacaggtgtttaaaggcagtaagaaaagaacgaagtaaagagagtgatgacaattatgacaaaactgaagatgtggatattgaagaaatggctttaaaactagataatgtacttcttgacacataccaggatgcttcttcatgacatgcgaagggtttcttcttgatcatttgaaagaaatgataaggctgtagtacaagcaagcagtttaaagataagacttgagatttttgaattgagaatttcatgggaatattcagtcaaggagcagactttggtctgaactagccattgatgattgttaagtttcccattcttagactgcatcaatccttgtgatccttaacaggttataatatacaattagcatttttctaattgttagaatatctgtcaattaagcatcatgactcagataatttttactagtgtaatgacagtaaaattacttcaattctctttgaaatgtagagtgcttcctcctaaccattctttaccgtttctgatcacacagaattgagaaagatctcttaggccactagttactagttgtttgttgagatgtgtaagtcacagtgtgcctgtaaaatgggcattccccaaggaagcagagtcaaggtataaactttcgttttgactcaaaagcagtgggtctcaactggggatgattcgcttatctgaacagcatctgcagacatttttggttgtcacaactggtgggatgctgttaacatctagaggatagaggccagggtgctactcaacatcctacaatgcatgggacaactcccacaacaaagaattatccagcccaaaatgtcattagtgctgaggttgagaaatactcctctaaagtagataaactccttgagtaaagagaagtttaccatagcaactttcagtagtacttcaaagaagatagctgtataaatgtcatcaaactatactatatagagaatcttaagtgataaccagggtcacggattccaaacatgtcattataaattgttttatatggtgctcactggtgcatttttccttttggataagggaaaacattattccacttactgtttttgctttaagcagcctgcatatattggttagtttgttcagatgttgtgcacagacatcatcaaaattagctaacatgggtatttttgaacatatttttgccaggaagatgaaaatcacatagtatgataaacaggtgtattcccctctacttgcccatgtgctcatttttctgagtctgaaattccagacttactggctttaacaataatttttgttgttaatttaagaaatagacttacttaagactattttaagaaatagagatgtcatagcctgaagatttactgaagcttctgaacatgccaccatgccaaagctatgtttctcaaacccagctctgtggatcatgttcctaaaagatgctcatggggagaaaatgtttacagacaaataattttgggagctgcctttgcaaacctgcctgttggcatattgaaggctctaagaattccttcactaaataacccagttttaatatatccttatccaaagagaaactcatttttttaaagtgaaatatttgttaacagcccattgaacatacttttaaaaacactatggtagagaatgctgtgttgccttctgggctgcatttttcttattgatttggaattgtaacctatgtatgagaaagggattttctggtattttggtgacgttgtacattgtcccagactgtttgtaaacatgaggtcagacatgtgtaaggtagacgcctatggccactggcttgaccaccttggaagtcaatgactattttgagatgaagtatttaactatgaatatcatgaaggttatttaaaaatgtatttattttatctttggggttcaaacattaaaaaaatttacataggtgtagtaactcatttcaagggaataaatgctggattaaaaagtgtaaatttttcatgagaatttgggactaaattgctgaaccaataaagctgaagagttgcaacctctagagtcaaaaaagggattgaaatgttgttgcaaatgtaaatgctggcagtgcagcttgctatacatgtaagccaaaattgttttatagaacaagtgatctatattgttgtgatcatcatttagcttaagaaaggccagagctgggagagtagcaaatgttttctcatctgcagtgtatcagcagttcttgggcttcagctgctgaatagataataattctaattgaacataaattacatgaactcacatgtgaatgatagatatgttacaatatttcattcctgatgcagaaaatcagctgtggtttttattattaaccctttctttttcagtggttttggaattctagctctattcctcctggcttaaaatttgagggcatagaattcacaagagtttttgaagagttctgtctattcaggctttcctttgtccccaccctagtgtcattttcactcactcccatttctacacataagtattaaaaaggatgtatttattataattcgctagtactgattggtaagcctcataattggcctttgttatctttgtactgtgacgaaggcagtggatgatacattaccaatcattgccgaagataacctcttctatctttttgacccaactacccttattaaaactatcaggtaaaatattggagttaggtttttaaagtcattgggctgtggcagtgtgcttagaaaagaaaatggtggaacatagaatattcttttggtcactacacaatgtgttacttatacatggcagggaagggaattttaaatcaaactcgcagtttggttcttaggtcctctgctgatgaattctcgctctatcagggaatgatatgtgacgccagccttaggaacctggtgttcaactgtaaatctttctatttagctttttgtattagttgaatgaagttatagaatatgaattattgaatacagttctgttcagccaataggcacttgatatacagaatggtaaatttaaatataaattaaatttttctaatattatgatcagcacttcactgtggttctgtgtctttaaccacctcataataagaactgttattgaggactgggctacagaatgtgcttagactacatctatggcttccatagattttagtaaaatttaaacagataatttgtgtttactgctgatgttactttaatattgaattagtagttcatcctgagagttatatttcacagaggaaaataaccaacagctgaaaacaacaataataaagctctggtgagtctgactcatactcggagaaagtttttggaatacatacacatttggtgcatataagagttgggtttccttttcccactttctgagatgtactaacctctgccagacccttaaatgattttgttatgttttgcatttttgaggccaaccttattttgtaactgaaaaaagtccagttttgcatacacagaaatttggtcattttagaagtctcacaacctgaataatttgataataattgaatatgctattaacagctttttaagaaaaggttctattagtcagttttttccttgtctgtcatattatgttggttaatgtctcttatggccaatcttagtaaacagacctaacactcactgcatccttttgtgccttactttttactttccttttgcccttttggtatgtgcgcatgtaagatggtaagtttaaggctaatgaatatatgtttgtaatttcctactcactactctgcagttaaagctaaggccttaggcaaaatctagaaatgtttatattgttttgttttttatcaagtggtgtcaacttgagaaatacaaagaaaggctatgcttaactgtataaccgtgggggattttagccatgagaatatgaagctgatgtcagcctgctaacctgttttaccaaaaggaaaagatgtttccaaaaatgttttcggtgtagactgtttaaagatgaaaataaattatataatttattatatgaaataaatttttgataagtcactgaaagtacgt

SEQ ID NO: 418023 - DNA, 1770 bp, Homo sapiens
gtgcacgaacgagaagtgttttttttgttttgttttgttttgttttgttttttgtcccaaggcgctgccgtaccgtccaggcggcgagttgcattctggttccgtcgtgtgtctggcgtgtggagctagtgctcccgcttattcgccactgtcgccaccgctgtcatgaaccgcgagagcttcgcggcgggagagcggctggtgtcgccggcttacgtgcggcagggctgtgaggcccgccgctcgcatgagcacctcatacggctgcttctggagaaggggcaagtgtccagagaatggctgggatgaaagtacacttgaactctttttacatgaacttgcaatcatggacagcaacaatttcttaggcaattgtggtgtgggagaaagggaagggagagtggcatccgcactggttgctcgtcgtcattacaggttcattcatggcattggacgatccggtgatatttctgctgtgcaaccaaaagctgcaggctctagccttttgaacaaaattaccaattctttggtcctggacattataaagctggctggtgtccatacagtagccaactgctttgtagttcctatggcaactggtatgagtctaactctgtgtttcttaacattacgacacaaaagaccaaaggcaaagtatattatatggccacgaatagaccagaagtcctgctttaaatccatgatcactgcaggttttgagcctgtggtgatagaaaatgttttggaaggtgacgagctgcgtacagacctgaaagcagtggaggctaaagtccaggaacttgggcctgattgcattctgtgtattcattctactacatcctgttttgctccaagggtgcctgatagattagaagaactggctgtgatttgtgctaattatgacattccacatatagttaataatgcttatggagtgcagtcttcaaagtgtatgcatctcattcagcagggggctcgagttggtagaatagatgcttttgttcagagcttggacaaaaattttatggttccagtaggtggtgctataattgctggctttaatgattcattcattcaggaaatcagcaagatgtatccaggaagagcttcagcttcaccttctttagatgtccttattactttattgtcacttggatcaaatggctataagaagctactaaaagaaagaaaggaaatgttttcatatttgtccaaccaaataaagaagttgtcagaagcctacaatgaaagactgttgcatacacctcacaatcccatatctttagctatgacacttaaaacactagatgaacaccgtgacaaagctgtcactcagcttggctcgatgctttttaccagacaggtttctggagccaggtaagtatgtttaagatagatatgggtttatttgtcttttcaaacttaactccagtaaaatacctttcctcaacaatagtcccccaagtatatcctgaactatacctgcgaattcatcatggagtaaagaatgatgagttagagaatctgtaaggctactgtatgcccacctgtggactgcttatgcctgaaatagtcacaaaaagacatgaatcttgtttgttttcatagatgtacagaaccaaagttttattacctctctacatagatttttttctttatttcctttgttagatgatcttcagcaagtcacattatggtattagagataagccatcttcatcactaaattgaagtgaaagtgttcttaaggaaaagccttcttcctaaact

SEQ ID NO: 418024 - DNA, 1247 bp, Homo sapiens
gtgcacgaacgagaagtgttttttttgttttgttttgttttgttttgttttttgtcccaaggcgctgccgtaccgtccaggcggcgagttgcattctggttccgtcgtgtgtctggcgtgtggagctagtgctcccgcttattcgccactgtcgccaccgctgtcatgaaccgcgagagcttcgcggcgggagagcggctggtgtcgccggcttacgtgcggcagggctgtgaggcccgccgctcgcatgagcacctcatacggctgcttctggagaaggggcaagtgtccagagaatggctgggatgaaagtacacttgaactctttttacatgaacttgcaatcatggacagcaacaatttcttaggcaattgtggtgtgggagaaagggaagggagagtggcatccgcactggttgctcgtcgtcattacaggttcattcatggcattggacgatccggtgatatttctgctgtgcaaccaaaagctgcaggctctagccttttgaacaaaattaccaattctttggtcctggacattataaagctggctggtgtccatacagtagccaactgctttgtagttcctatggcaactggtatgagtctaactctgtgtttcttaacattacgacacaaaagaccaaaggcaaagtatattatatggccacgaatagaccagaagtcctgctttaaatccatgatcactgcaggttttgagcctgtggtgatagaaaatgttttggaaggtgacgagctgcgtacagacctgaaagcagtggaggctaaagtccaggaacttgggcctgattgcattctgtgtattcattctactacatcctgttttgctccaagggtgcctgataggtaaatgatttgtgaatattgtcctttagctgtttatcagtcttttaaataaaatatactaattctcaaatatgcttaaataacacttcacaataaataggtgaatggtctgttctaagagaatagattgaccttgtggagaaatagcattaacagcttgggaaaccaaccatttgaaatataacaaggaaaaacaattagtacagggtggggagctccctttatcacctgagtcgatgcagaccgtctctgttttcttgctctttgtcctgtttctgatctcttagcatgttttttcttattatttaatagaagtttcttttctaagctaaatgttgggtttacttcttttcattgctatcagtattaataaattaaaa

SEQ ID NO: 418025 - DNA, 418 bp, Homo sapiens
gcggccgcctactactactactactgctcgaattcaagcttctaacgatgtacggggacatggcacctcagccaggggtgtagccaagtagacaaatggaatcctgtgctgaacccgaatcttccaaaaaacagcctacaatctgtgaccaccacaagatgtgccctgatggcagctgaagtttgattcagatgggcacttttcttccccttccctgcctagtttccttttgttccttgagtccacgcagaattccattctctggtcagcagacaggcttaagctaaagtattgcctctattctgtaaagttctgtacatagttcccaagcttctgcagggggtgatttttgctcttgtcctgagaaataacagtgctgttttaaaaaacatttgaaataaataccgcacacaaaggc

SEQ ID NO: 418026 - DNA, 3301 bp, Homo sapiens
cttggggtggggaccgggtgaggggcctgacggcagagtcggtccagaactgcccggacagcgacgcacagcgaggagccaaaatggaagagggtgcaagtcccctcctggggccccagacgccccctcctttcttgctgcctggagcaggggcagtgctgttagtggctactcctggtgtgaacagcccatcctggccaccttccacaggaaacctgacctgaaggacagaagaggaaggaagcaggctttgccacaaatgtcagtgcagaactctggctggccccaccaagaagacagccccaagccccaggatccaggtccaccagccaactcagacagtgactcaggccacctgccgggggaggaccctgaggatacccatgctcaggaattcctgtctctgcacctgcttagaacatggggttttgactttaaactcattcacatgagtattcattatctctcctagggggtctgtattgtcaaaccagactctaggggctttggccccaaggcgtgaagggggttaagaagggaaagcataagaagggaagctgttttggggtgtggggcctccccagcctccctcaaggaagaccacacatgcaggcatcagtcagctatccttgcactcagtgaggatctgcaaggaggaccctcccaaatggagggcatgcttagaagctgctctagattggagaagaggtggcaatgatgagggggaaagaaggagaaaggaaagaaaaacctagtttcactcctccccttcttccatgtctcctcagggtcctgcagttctgagcttgggttccctttgcctggacaccaaccaagcccccaactggactggacttcagaccctcctgcagcaactccctccgcaggacattgatgagcgctactgcctggcccttggggaggaggagcgggccgagctgcagctcttctgtgccaggcggaagcaggaagccctgggacagggggtagcccgcctggtacttcccaagcttgaaggacacacctgtgagaagtgtagggagttgctgaagccaggggagtacggagtgtttgcagcccgggcaggggaacagcgctgctggcaccagccttgctttgcctgccaggcctgtggccaggccctgataaacctcatctacttctaccatgatggacaactctactgcggccgtcatcatgcagagttgctgcgcccgcgctgcccggcttgtgaccagctgatcttctcctggcgctgcaccgaggcggagggacagcgctggcatgagaaccacttctgttgccaggactgcgccgggcctctgggcgggggacgttatgccctgcctgggggaagcccctgctgccccagctgcttcgagaaccgctactcggatgcaggctcgagctgggccggggcactggaagggcaggcattccttggagcgcccccaccgcaccccccagacccaagcctcggggcccgcagctctcaccgcgcatccctggccggagcgttccaagggccgcccgaacccaccccgcgccgcggtcggggttgcggcgccagactccctcccaggcgcgggaggcggacgccctctggtggaggcgggggaccctggcgaggactctcggcggcggcggcggcgcgcacggcccaggggctgggcggggcgggaggctgggcctcacccccactagctgcggtgtaggtccagctccgcggctctgagaccagcgtttccgacccggcccggaacaggggagactggactcgaccgaactgaaggaagggaccaaacctcggtgaactctgcaaccctctcccgaacactccttctcgctgctgccggcggttccagcctgcaaactcagagggggctgcctggatccagtccccagcaggagaaccgacctggggacaaagcggaggcacccaaagggcaggagcaatgccgcctggagactattcgtgatcccaaggacacccctttctccacctgctcctcctcctctgactcggaacctgaaggatttttcttaggcgagcgccttccccagtcctggaagacccccggaagcctccaagcagaggacagcaacgcctctaagacgcactgcaccatgtgctagtggcgcagctcagagaggggatgtgagtgggaggaaaggggtctgtaaagcgggagaacaaggctagcctccccctaacaatcctagactgagacgcagtcaggcgcacgcccgcaagaggcggcgaggtgacaagtttggagtgcgcccccttcagtactgcgcgttctaagacttttggcggagactttcttggcaaaacccattccccaaagctacgcttcccctgctgagatagcccctacccccacctccacaggctgggacagccccgtccccaccatcctcctcccaagccaattaaatgatcacagcacgcgtgacagttaccggctggagagccggaggtgggaccgggagcaggggaccgtagaaccgggccgcgctcctcccctcctagagttcgtggaggcgcagcagagggccgtccctcttccggatgtcggactaagcgaacagcgcccccactgccggccggtagcagccggaagtgccagaccggaggtgcgtcattcaccggcgacgccgatacggttcctccaccgaggcccatgcgaagctttccactatggcttccagcactgtcccggtgagcgctgctggctcggctaatgaaactcccgaaataccggacaacgtgggagattggcttcggggcgtctaccgctttgccactgataggaatgacttccggaggaacttgatactaaatttgggactctttgctgcgggagtttggctggccaggaacttgagtgacattgacctcatggcacctcagccaggggtgtagccaagtagttctaatgccacctgtcgtcttatcatctgattgcagacaaatggaatcctgtgctgaacccgaatcttccaaaaaacagcctacaatctgtgaccaccacaagatgtgccctgatggcagctgaagtttgattcagatgggcacttttcttccccttccctgcctagtttccttttgttccttgagtccacgcagaattccattctctggtcagcagacaggcttaagctaaagtattgcctctattctgtaaagttctgtacatagttcccaagcttctgcagggggtgatttttgctcttgtcctgagaaataacagtgctgttttaaaaaacatttgaaataaataccgcacacaaaggc

SEQ ID NO: 418027 - DNA, 712 bp, Homo sapiens
  misc_feature (526)..(526): n is a, c, g, or t
ttacacttttgatagcttctgcccggaacatggcggtaatagaaagtcttagggcagccgtgtatattttctcaacccccggacaacgtgggagattggcttcggggcgtctaccgctttgccactgataggaatgacttccggaggaacttgatactaaatttgggactctttgctgcgggagtttggctggccaggaacttgagtgacattgacctcatggcacctcagccaggggtgtagccaagtagacaaatggaatcctgtgctgaacccgaatcttccaaaaaacagcctacaatctgtgaccaccacaagatgtgccctgatggcagctgaagtttgattcagatgggcacttttcttccccttccctgcctagtttccttttgttccttgagtccacgcagaattccattctctggtcagcagacaggcttaagctaaagtattgcctctattctgtaaagttctgtacatagttcccaagcttctgcagggggtgatttttgctcttgtccggggntgttaacaaccccggacaaaggagattggatgactgggaagcgctggcccggaacagcccctgcaactgtggggcctgcacacagcccttccacagttggcactgcaggtgcaggccaatcctttaaagaataaacaaggaagtcagctctttcactttttacaagtcggcaaaaacagactccgg

SEQ ID NO: 418028 - DNA, 2959 bp, Homo sapiens
gggagggggaagggaattatggaaggaatccagctggcctgttagtaagggtgttccagtgctaggtggaggtggagtttggctgcctttggggagattggaagggtgaggaatagaggcctgatttctgagtgttgtttctgtgttggacaattctatgcaaactagagccaaaatggaagagggtgcaagtcccctcctggggccccagacgccccctcctttcttgctgcctggagcaggggcagtgctgttagtggctactcctggtgtgaacagcccatcctggccaccttccacaggaaacctgacctgaaggacagaagaggaaggaagcaggctttgccacaaatgtcagtgcagaactctggctggccccaccaagaagacagccccaagccccaggatccaggtccaccagccaactcagacagtgactcaggccacctgccgggggaggaccctgaggatacccatgctcagggtcctgcagttctgagcttgggttccctttgcctggacaccaaccaagcccccaactggactggacttcagaccctcctgcagcaactccctccgcaggacattgatgagcgctactgcctggcccttggggaggaggagcgggccgagctgcagctcttctgtgccaggcggaagcaggaagccctgggacagggggtagcccgcctggtacttcccaagcttgaaggacacacctgtgagaagtgtagggagttgctgaagccaggggagtacggagtgtttgcagcccgggcaggggaacagcgctgctggcaccagccttgctttgcctgccaggcctgtggccaggccctgataaacctcatctacttctaccatgatggacaactctactgcggccgtcatcatgcagagttgctgcgcccgcgctgcccggcttgtgaccagctgatcttctcctggcgctgcaccgaggcggagggacagcgctggcatgagaaccacttctgttgccaggactgcgccgggcctctgggcgggggacgttatgccctgcctgggggaagcccctgctgccccagctgcttcgagaaccgctactcggatgcaggctcgagctgggccggggcactggaagggcaggcattccttggagcgcccccaccgcaccccccagacccaagcctcggggcccgcagctctcaccgcgcatccctggccggagcgttccaagggccgcccgaacccaccccgcgccgcggtcggggttgcggcgccagactccctcccaggcgcgggaggcggacgccctctggtggaggcgggggaccctggcgaggactctcggcggcggcggcggcgcgcacggcccaggggctgggcggggcgggaggctgggcctcacccccactagctgcggtgtaggtccagctccgcggctctgagaccagcgtttccgacccggcccggaacaggggagactggactcgaccgaactgaaggaagggaccaaacctcggtgaactctgcaaccctctcccgaacactccttctcgctgctgccggcggttccagcctgcaaactcagagggggctgcctggatccagtccccagcaggagaaccgacctggggacaaagcggaggcacccaaagggcaggagcaatgccgcctggagactattcgtgatcccaaggacacccctttctccacctgctcctcctcctctgactcggaacctgaaggatttttcttaggcgagcgccttccccagtcctggaagacccccggaagcctccaagcagaggacagcaacgcctctaagacgcactgcaccatgtgctagtggcgcagctcagagaggggatgtgagtgggaggaaaggggtctgtaaagcgggagaacaaggctagcctccccctaacaatcctagactgagacgcagtcaggcgcacgcccgcaagaggcggcgaggtgacaagtttggagtgcgcccccttcagtactgcgcgttctaagacttttggcggagactttcttggcaaaacccattccccaaagctacgcttcccctgctgagatagcccctacccccacctccacaggctgggacagccccgtccccaccatcctcctcccaagccaattaaatgatcacagcacgcgtgacagttaccggctggagagccggaggtgggaccgggagcaggggaccgtagaaccgggccgcgctcctcccctcctagagttcgtggaggcgcagcagagggccgtccctcttccggatgtcggactaagcgaacagcgcccccactgccggccggtagcagccggaagtgccagaccggaggtgcgtcattcaccggcgacgccgatacggttcctccaccgaggcccatgcgaagctttccactatggcttccagcactgtcccggtgagcgctgctggctcggctaatgaaactcccgaaataccggacaacgtgggagattggcttcggggcgtctaccgctttgccactgataggaatgacttccggaggaacttgatactaaatttgggactctttgctgcgggagtttggctggccaggaacttgagtgacattgacctcatggcacctcagccaggggtgtagccaagtagacaaatggaatcctgtgctgaacccgaatcttccaaaaaacagcctacaatctgtgaccaccacaagatgtgccctgatggcagctgaagtttgattcagatgggcacttttcttccccttccctgcctagtttccttttgttccttgagtccacgcagaattccattctctggtcagcagacaggcttaagctaaagtattgcctctattctgtaaagttctgtacatagttcccaagcttctgcagggggtgatttttgctcttgtcctgagaaataacagtgctgttttaaaaaacatttgaaataaataccgcacacaaaggc

SEQ ID NO: 418029 - DNA, 3484 bp, Homo sapiens
gggagggggaagggaattatggaaggaatccagctggcctgttagtaagggtgttccagtgctaggtggaggtggagtttggctgcctttggggagattggaagggtgaggaatagaggcctgatttctgagtgttgtttctgtgttggacaattctatgcaaactagagccaaaatggaagagggtgcaagtcccctcctggggccccagacgccccctcctttcttgctgcctggagcaggggcagtgctgttagtggctactcctggtgtgaacagcccatcctggccaccttccacaggaaacctgacctgaaggacagaagaggaaggaagcaggctttgccacaaatgtcagtgcagaactctggctggccccaccaagaagacagccccaagccccaggatccaggtccaccagccaactcagacagtgactcaggccacctgccgggggaggaccctgaggatacccatgctcaggtagtagagtcgtgcccttcctctgagaccaacatgtcctctatcctgtggagtggccacccttttccaccaacccggaggtagtttgacttcgtgcctaatctcttgttgcctttttctcttttcaggaattcctgtctctgcacctgcttagaacatggggttttgactttaaactcattcacatgagtattcattatctctcctagggggtctgtattgtcaaaccagactctaggggctttggccccaaggcgtgaagggggttaagaagggaaagcataagaagggaagctgttttggggtgtggggcctccccagcctccctcaaggaagaccacacatgcaggcatcagtcagctatccttgcactcagtgaggatctgcaaggaggaccctcccaaatggagggcatgcttagaagctgctctagattggagaagaggtggcaatgatgagggggaaagaaggagaaaggaaagaaaaacctagtttcactcctccccttcttccatgtctcctcagggtcctgcagttctgagcttgggttccctttgcctggacaccaaccaagcccccaactggactggacttcagaccctcctgcagcaactccctccgcaggacattgatgagcgctactgcctggcccttggggaggaggagcgggccgagctgcagctcttctgtgccaggcggaagcaggaagccctgggacagggggtagcccgcctggtacttcccaagcttgaaggacacacctgtgagaagtgtagggagttgctgaagccaggggagtacggagtgtttgcagcccgggcaggggaacagcgctgctggcaccagccttgctttgcctgccaggcctgtggccaggccctgataaacctcatctacttctaccatgatggacaactctactgcggccgtcatcatgcagagttgctgcgcccgcgctgcccggcttgtgaccagctgatcttctcctggcgctgcaccgaggcggagggacagcgctggcatgagaaccacttctgttgccaggactgcgccgggcctctgggcgggggacgttatgccctgcctgggggaagcccctgctgccccagctgcttcgagaaccgctactcggatgcaggctcgagctgggccggggcactggaagggcaggcattccttggagcgcccccaccgcaccccccagacccaagcctcggggcccgcagctctcaccgcgcatccctggccggagcgttccaagggccgcccgaacccaccccgcgccgcggtcggggttgcggcgccagactccctcccaggcgcgggaggcggacgccctctggtggaggcgggggaccctggcgaggactctcggcggcggcggcggcgcgcacggcccaggggctgggcggggcgggaggctgggcctcacccccactagctgcggtgtaggtccagctccgcggctctgagaccagcgtttccgacccggcccggaacaggggagactggactcgaccgaactgaaggaagggaccaaacctcggtgaactctgcaaccctctcccgaacactccttctcgctgctgccggcggttccagcctgcaaactcagagggggctgcctggatccagtccccagcaggagaaccgacctggggacaaagcggaggcacccaaagggcaggagcaatgccgcctggagactattcgtgatcccaaggacacccctttctccacctgctcctcctcctctgactcggaacctgaaggatttttcttaggcgagcgccttccccagtcctggaagacccccggaagcctccaagcagaggacagcaacgcctctaagacgcactgcaccatgtgctagtggcgcagctcagagaggggatgtgagtgggaggaaaggggtctgtaaagcgggagaacaaggctagcctccccctaacaatcctagactgagacgcagtcaggcgcacgcccgcaagaggcggcgaggtgacaagtttggagtgcgcccccttcagtactgcgcgttctaagacttttggcggagactttcttggcaaaacccattccccaaagctacgcttcccctgctgagatagcccctacccccacctccacaggctgggacagccccgtccccaccatcctcctcccaagccaattaaatgatcacagcacgcgtgacagttaccggctggagagccggaggtgggaccgggagcaggggaccgtagaaccgggccgcgctcctcccctcctagagttcgtggaggcgcagcagagggccgtccctcttccggatgtcggactaagcgaacagcgcccccactgccggccggtagcagccggaagtgccagaccggaggtgcgtcattcaccggcgacgccgatacggttcctccaccgaggcccatgcgaagctttccactatggcttccagcactgtcccggtgagcgctgctggctcggctaatgaaactcccgaaataccggacaacgtgggagattggcttcggggcgtctaccgctttgccactgataggaatgacttccggaggaacttgatactaaatttgggactctttgctgcgggagtttggctggccaggaacttgagtgacattgacctcatggcacctcagccaggggtgtagccaagtagacaaatggaatcctgtgctgaacccgaatcttccaaaaaacagcctacaatctgtgaccaccacaagatgtgccctgatggcagctgaagtttgattcagatgggcacttttcttccccttccctgcctagtttccttttgttccttgagtccacgcagaattccattctctggtcagcagacaggcttaagctaaagtattgcctctattctgtaaagttctgtacatagttcccaagcttctgcagggggtgatttttgctcttgtcctgagaaataacagtgctgttttaaaaaacatttgaaataaataccgcacacaaaggc

SEQ ID NO: 418030 - DNA, 1772 bp, Homo sapiens
ggctaggtacgaggctgggtgtgaatcggccgagggttgctgcgcccgcgctgccggcttgtgaccagctgatcttctcctggcgctgcaccgaggcggagggacagcgctggcatgagaaccacttctgttgccaggactgcgccgggcctctgggcgggggacgttatgccctgcctgggggaagcccctgctgccccagctgcttcgagaaccgctactcggatgcaggctcgagctgggccggggcactggaagggcaggcattccttggggagactggactcgaccgaactgaaggaagggaccaaacctcggtgaactctgcaaccctctcccgaacactccttctcgctgctgccggcggttccagcctgcaaactcagagggggctgcctggatccagtccccagcaggagaaccgacctggggacaaagcggaggcacccaaagggcaggagcaatgccgcctggagactattcgtgatcccaaggacacccctttctccacctgctcctcctcctctgactcggaacctgaaggatttttcttaggcgagcgccttccccagtcctggaagacccccggaagcctccaagcagaggacagcaacgcctctaagacgcactgcaccatgtgctagtggcgcagctcagagaggggatgtgagtgggaggaaaggggtctgtaaagcgggagaacaaggctagcctccccctaacaatcctagactgagacgcagtcaggcgcacgcccgcaagaggcggcgaggtgacaagtttggagtgcgcccccttcagtactgcgcgttctaagacttttggcggagactttcttggcaaaacccattccccaaagctacgcttcccctgctgagatagcccctacccccacctccacaggctgggacagccccgtccccaccatcctcctcccaagccaattaaatgatcacagcacgcgtgacagttaccggctggagagccggaggtgggaccgggagcaggggaccgtagaaccgggccgcgctcctcccctcctagagttcgtggaggcgcagcagagggccgtccctcttccggatgtcggactaagcgaacagcgcccccactgccggccggtagcagccggaagtgccagaccggaggtgcgtcattcaccggcgacgccgatacggttcctccaccgaggcccatgcgaagctttccactatggcttccagcactgtcccggtgagcgctgctggctcggctaatgaaactcccgaaataccggacaacgtgggagattggcttcggggcgtctaccgctttgccactgataggaatgacttccggaggaacttgatactaaatttgggactctttgctgcgggagtttggctggccaggaacttgagtgacattgacctcatggcacctcagccaggggtgtagccaagtagacaaatggaatcctgtgctgaacccgaatcttccaaaaaacagcctacaatctgtgaccaccacaagatgtgccctgatggcagctgaagtttgattcagatgggcacttttcttccccttccctgcctagtttccttttgttccttgagtccacgcagaattccattctctggtcagcagacaggcttaagctaaagtattgcctctattctgtaaagttctgtacatagttcccaagcttctgcagggggtgatttttgctcttgtcctgagaaataacagtgctgttttaaaaaacatttgaaataaataccgcacacaaaggc

SEQ ID NO: 418031 - DNA, 6301 bp, Homo sapiens
gggagggggaagggaattatggaaggaatccagctggcctgttagtaagggtgttccagtgctaggtggaggtggagtttggctgcctttggggagattggaagggtgaggaatagaggcctgatttctgagtgttgtttctgtgttggacaattctatgcaaactagagccaaaatggaagagggtgcaagtcccctcctggggccccagacgccccctcctttcttgctgcctggagcaggggcagtgctgttagtggctactcctggtgtgaacagcccatcctggccaccttccacaggaaacctgacctgaaggacagaagaggaaggaagcaggctttgccacaaatgtcagtgcagaactctggctggccccaccaagaagacagccccaagccccaggatccaggtccaccagccaactcagacagtgactcaggccacctgccgggggaggaccctgaggatacccatgctcagggtcctgcagttctgagcttgggttccctttgcctggacaccaaccaagcccccaactggactggacttcagaccctcctgcagcaactccctccgcaggacattgatgagcgctactgcctggcccttggggaggaggagcgggccgagctgcagctcttctgtgccaggcggaagcaggaagccctgggacagggggtagcccgcctggtacttcccaagcttgaaggacacacctgtgagaagtgtagggagttgctgaagccaggggagtacggagtgtttgcagcccgggcaggggaacagcgctgctggcaccagccttgctttgcctgccaggcctgtggccaggccctgataaacctcatctacttctaccatgatggacaactctactgcggccgtcatcatgcagagttgctgcgcccgcgctgcccggcttgtgaccagctgatcttctcctggcgctgcaccgaggcggagggacagcgctggcatgagaaccacttctgttgccaggactgcgccgggcctctgggcgggggacgttatgccctgcctgggggaagcccctgctgccccagctgcttcgagaaccgctactcggatgcaggctcgagctgggccggggcactggaagggcaggcattccttggagcgcccccaccgcaccccccagacccaagcctcggggcccgcagctctcaccgcgcatccctggccggagcgttccaagggccgcccgaacccaccccgcgccgcggtcggggttgcggcgccagactccctcccaggcgcgggaggcggacgccctctggtggaggcgggggaccctggcgaggactctcggcggcggcggcggcgcgcacggcccaggggctgggcggggcgggaggctgggcctcacccccactagctgcggtgtaggtccagctccgcggctctgagaccagcgtttccgacccggcccggaacaggggagactggactcgaccgaactgaaggaagggaccaaacctcggtgaactctgcaaccctctcccgaacactccttctcgctgctgccggcggttccagcctgcaaactcagagggggctgcctggatccagtccccagcaggagaaccgacctggggacaaagcggaggcacccaaagggcaggagcaatgccgcctggagactattcgtgatcccaaggacacccctttctccacctgctcctcctcctctgactcggaacctgaaggatttttcttaggcgagcgccttccccagtcctggaagacccccggaagcctccaagcagaggacagcaacgcctctaagacgcactgcaccatgtgctagtggcgcagctcagagaggggatgtgagtgggaggaaaggggtctgtaaagcgggagaacaaggctagcctccccctaacaatcctagactgagacgcagtcaggcgcacgcccgcaagaggcggcgaggtgacaagtttggagtgcgcccccttcagtactgcgcgttctaagacttttggcggagactttcttggcaaaacccattccccaaagctacgcttcccctgctgagatagcccctacccccacctccacaggctgggacagccccgtccccaccatcctcctcccaagccaattaaatgatcacagcacgcgtgacagttaccggctggagagccggaggtgggaccgggagcaggggaccgtagaaccgggccgcgctcctcccctcctagagttcgtggaggcgcagcagagggccgtccctcttccggatgtcggactaagcgaacagcgcccccactgccggccggtagcagccggaagtgccagaccggaggtgcgtcattcaccggcgacgccgatacggttcctccaccgaggcccatgcgaagctttccactatggcttccagcactgtcccggtgagcgctgctggctcggctaatgaaactcccgaaataccggacaacgtgggagattggcttcggggcgtctaccgctttgccactgataggaatgacttccggaggaacttgatactaaatttgggactctttgctgcgggagtttggctggccaggaacttgagtgacattgacctcatggcacctcagccaggggtgtagccaagtagacaaatggaatcctgtgctgaacccgaatcttccaaaaaacagcctacaatctgtgaccaccacaagatgtgccctgatggcagctgaagtttgattcagatgggcacttttcttccccttccctgcctagtttccttttgttccttgagtccacgcagaattccattctctggtcagcagacaggcttaagctaaagtattgcctctattctgtaaagttctgtacatagttcccaagcttctgcagggggtgatttttgctcttgtcctgagaaataacagtgctgttttaaaaaacatttgaaataaataccgcacacaaaggcagtcattttattcttttaataagaaacttttgcttacaaaaacaaggtgtaaaaagatttacaaaaatcataaaaacatgatttatatttcacacttgagagacaaaaacaagccccaaaacatggattttaatggaggtggtttgcttcattttaaaagggaaaaaaaaaaaaggaagctgtaaccatacattgatgttaacctagcatgaagtttattcttgaagaatttacattgttgagcaatattaggggaagaagccatttggtgttgcatagcattttagtgcaccagatgggttttccagacaccagggaggcatcattgctggaatagtgaggtttggtggcagaaagagggcagtgatgtgtagggggaggcaaagtgaagtaagcctgggcagtggtcactaaagtgacactgctgaggcagctgcttccttcagaaggaaatgttttgtgaccctaaaattcatggtagtgctactgtccagggtttgggggctctttggaaatggagtatgtacggaactggcatgtatagacttatatagccatagaaagaggtggatagaaacaggtccaccatggcaatatttttttctggccagtttactaggcattaaaaaaaatactgcttttatgtgccaagtctcttatggaactagtatgggattaaaggacgttaattggaaaggagggtcagtatataaggaccacagtggcctgttaaggatgacagatgtctctagcagtttgttcactactaaagttaaacaggacaaaatagtctttcctgaccttgctggcataaatattaagaaaattgtttgagaattagatttttttagtatgtatataaaaacagcaccattctttgtataaatcagatagatcttatctgatagatgaagctaagaccctttgagtctacactgggttgactctgagaggtttatatcttattgggtattaagataaagaagggtcacatgagagcaaagcttagctttgaagccatcacctcccaaatggtgaccaaggaggaaacttttaagccatagtatagatgctaacccccatttagacctgcatcagatcacttgctaagacaagaaataccagcacctcctgttctttataggaatgaaacttagatccttaaaggctgctacctgatatactcatgactggacagttttgataaaaacttccaaaattgaaaatcaaaatccagcaagaattaagacatggcagcttccaaaagcataattcaaatttcattcaaaatttactgttttggcttcaagtaagtgtttactgttggttgggttttaaagccataattatggttgagtaaggattcatttatttatttattaaatttttatacatttttgaaaagatttcaaatctatgtttcccaggctggtcttgagctcctggcctcaagcaatcctcccaccttggcctcccaaagtgttgggattacaggtgctagccaactgcatccagccaatgtttcatttcaactggcttaaatcttcaaagtggttaagaatttagtaaataaaactacttaatctacaactttcaaaaattgatgagtaatcactaattctgtaaatgaaggagttggacttcactattgccaaagcaacattttccccaaggaaagtcaatttgatatcctgtcacacttttcagccctggctagttaacacagtactatgaaaatctttagctagattttaaacgaaatatgccagcagaagtatggaatgagtccacaaaaatgagtgcctgccacaatgctatagtagctatggtgtatttagtgcagagtgtgggatgaataagtacatagtaattaaagtcatagtcctggcccaacagaacagttactaaatgtaagatacaaactaaactcacagtcatatttagaaggcgcttttcagctttagcactgacttaaaaagtctgaaccaccaggaagatgcgtacttaactggttaaaaaattaagtggccctggaaagttttaccccaaagatacaacttcttcacttatttagttcagtaatgaggctgagggacccaattttcaagtgtgcatttgagtgggaaacttttaaacaccatatgttgaagtttcatgagctcagtggaaaccttaaggtcagagtaaaagaaactggctgtaaacagccctgcagtgaagagactgggtcttagcaccttccacattcactcagcgccatctcagtcagcgcctgccagggaaagggcatggagagctgggacgggtgccttctcttttgcaccactccctttgcatattacacagtgcactggcttgccttacaatctaaggttcacatacagggggttttctatactgcttccggacattttttgcaaaagaacatcagaaccaatgaaggtaccatttcaggaggaatcatttttgtttgacttctgctatatgttgcccagcattagtcattgttttgataaagactaaaaggccttttctcaacatttgtgctctcccaaccacctgggaaagcaacccttccactcacaagaggtaacctcagatagggatatagtattcatttaagaaggggtagcccccccagcctgatttaaaaaggcccaagtcaatgtatggaacatgacaagggaagtgaaaaacaatggagtacacagtctgccttgaaaagcagccatttgatgaacagtcacaaatacaaagaatttggacattgtaacataatttcagaacttgctggtaagaataatttgcattcacacacaagagacatgaaatgctttttaaaagtctgtgataccagatgtcctttaaacactacacagacccatttgccacttgaaatgacaagaagaaatcctttcccttaatcttttcaattccatgcaaaccgtaattgagtacaaggcaccaaattttatgaattgtataaaattagttcacaaagctttatcagtaagtagaacaaactccatttctccctcccggccagcccaccctcctcccacccaccacccgccatccccgaccaagttttcattctgcactactgtcgacctctctagggcttatgctggggcatgccccactgtcagccaatccacctcattggttcttcccttgtacttggatgaagctgtaagcacagccagagtagcaaactcatacaatcattgactctagaagccttgccattaaaaacaaaaataaactctgctattgagtccataggacacattaacacttctacagtttccaattttattcatgacattttaagagacatct

SEQ ID NO: 418032 - DNA, 6338 bp, Homo sapiens
gggagggggaagggaattatggaaggaatccagctggcctgttagtaagggtgttccagtgctaggtggaggtggagtttggctgcctttggggagattggaagggtgaggaatagaggcctgatttctgagtgttgtttctgtgttggacaattctatgcaaactagagccaaaatggaagagggtgcaagtcccctcctggggccccagacgccccctcctttcttgctgcctggagcaggggcagtgctgttagtggctactcctggtgtgaacagcccatcctggccaccttccacaggaaacctgacctgaaggacagaagaggaaggaagcaggctttgccacaaatgtcagtgcagaactctggctggccccaccaagaagacagccccaagccccaggatccaggtccaccagccaactcagacagtgactcaggccacctgccgggggaggaccctgaggatacccatgctcagggtcctgcagttctgagcttgggttccctttgcctggacaccaaccaagcccccaactggactggacttcagaccctcctgcagcaactccctccgcaggacattgatgagcgctactgcctggcccttggggaggaggagcgggccgagctgcagctcttctgtgccaggcggaagcaggaagccctgggacagggggtagcccgcctggtacttcccaagcttgaaggacacacctgtgagaagtgtagggagttgctgaagccaggggagtacggagtgtttgcagcccgggcaggggaacagcgctgctggcaccagccttgctttgcctgccaggcctgtggccaggccctgataaacctcatctacttctaccatgatggacaactctactgcggccgtcatcatgcagagttgctgcgcccgcgctgcccggcttgtgaccagctgatcttctcctggcgctgcaccgaggcggagggacagcgctggcatgagaaccacttctgttgccaggactgcgccgggcctctgggcgggggacgttatgccctgcctgggggaagcccctgctgccccagctgcttcgagaaccgctactcggatgcaggctcgagctgggccggggcactggaagggcaggcattccttggagcgcccccaccgcaccccccagacccaagcctcggggcccgcagctctcaccgcgcatccctggccggagcgttccaagggccgcccgaacccaccccgcgccgcggtcggggttgcggcgccagactccctcccaggcgcgggaggcggacgccctctggtggaggcgggggaccctggcgaggactctcggcggcggcggcggcgcgcacggcccaggggctgggcggggcgggaggctgggcctcacccccactagctgcggtgtaggtccagctccgcggctctgagaccagcgtttccgacccggcccggaacaggggagactggactcgaccgaactgaaggaagggaccaaacctcggtgaactctgcaaccctctcccgaacactccttctcgctgctgccggcggttccagcctgcaaactcagagggggctgcctggatccagtccccagcaggagaaccgacctggggacaaagcggaggcacccaaagggcaggagcaatgccgcctggagactattcgtgatcccaaggacacccctttctccacctgctcctcctcctctgactcggaacctgaaggatttttcttaggcgagcgccttccccagtcctggaagacccccggaagcctccaagcagaggacagcaacgcctctaagacgcactgcaccatgtgctagtggcgcagctcagagaggggatgtgagtgggaggaaaggggtctgtaaagcgggagaacaaggctagcctccccctaacaatcctagactgagacgcagtcaggcgcacgcccgcaagaggcggcgaggtgacaagtttggagtgcgcccccttcagtactgcgcgttctaagacttttggcggagactttcttggcaaaacccattccccaaagctacgcttcccctgctgagatagcccctacccccacctccacaggctgggacagccccgtccccaccatcctcctcccaagccaattaaatgatcacagcacgcgtgacagttaccggctggagagccggaggtgggaccgggagcaggggaccgtagaaccgggccgcgctcctcccctcctagagttcgtggaggcgcagcagagggccgtccctcttccggatgtcggactaagcgaacagcgcccccactgccggccggtagcagccggaagtgccagaccggaggtgcgtcattcaccggcgacgccgatacggttcctccaccgaggcccatgcgaagctttccactatggcttccagcactgtcccggtgagcgctgctggctcggctaatgaaactcccgaaataccggacaacgtgggagattggcttcggggcgtctaccgctttgccactgataggaatgacttccggaggaacttgatactaaatttgggactctttgctgcgggagtttggctggccaggaacttgagtgacattgacctcatggcacctcagccaggggtgtagccaagtagttctaatgccacctgtcgtcttatcatctgattgcagacaaatggaatcctgtgctgaacccgaatcttccaaaaaacagcctacaatctgtgaccaccacaagatgtgccctgatggcagctgaagtttgattcagatgggcacttttcttccccttccctgcctagtttccttttgttccttgagtccacgcagaattccattctctggtcagcagacaggcttaagctaaagtattgcctctattctgtaaagttctgtacatagttcccaagcttctgcagggggtgatttttgctcttgtcctgagaaataacagtgctgttttaaaaaacatttgaaataaataccgcacacaaaggcagtcattttattcttttaataagaaacttttgcttacaaaaacaaggtgtaaaaagatttacaaaaatcataaaaacatgatttatatttcacacttgagagacaaaaacaagccccaaaacatggattttaatggaggtggtttgcttcattttaaaagggaaaaaaaaaaaaggaagctgtaaccatacattgatgttaacctagcatgaagtttattcttgaagaatttacattgttgagcaatattaggggaagaagccatttggtgttgcatagcattttagtgcaccagatgggttttccagacaccagggaggcatcattgctggaatagtgaggtttggtggcagaaagagggcagtgatgtgtagggggaggcaaagtgaagtaagcctgggcagtggtcactaaagtgacactgctgaggcagctgcttccttcagaaggaaatgttttgtgaccctaaaattcatggtagtgctactgtccagggtttgggggctctttggaaatggagtatgtacggaactggcatgtatagacttatatagccatagaaagaggtggatagaaacaggtccaccatggcaatatttttttctggccagtttactaggcattaaaaaaaatactgcttttatgtgccaagtctcttatggaactagtatgggattaaaggacgttaattggaaaggagggtcagtatataaggaccacagtggcctgttaaggatgacagatgtctctagcagtttgttcactactaaagttaaacaggacaaaatagtctttcctgaccttgctggcataaatattaagaaaattgtttgagaattagatttttttagtatgtatataaaaacagcaccattctttgtataaatcagatagatcttatctgatagatgaagctaagaccctttgagtctacactgggttgactctgagaggtttatatcttattgggtattaagataaagaagggtcacatgagagcaaagcttagctttgaagccatcacctcccaaatggtgaccaaggaggaaacttttaagccatagtatagatgctaacccccatttagacctgcatcagatcacttgctaagacaagaaataccagcacctcctgttctttataggaatgaaacttagatccttaaaggctgctacctgatatactcatgactggacagttttgataaaaacttccaaaattgaaaatcaaaatccagcaagaattaagacatggcagcttccaaaagcataattcaaatttcattcaaaatttactgttttggcttcaagtaagtgtttactgttggttgggttttaaagccataattatggttgagtaaggattcatttatttatttattaaatttttatacatttttgaaaagatttcaaatctatgtttcccaggctggtcttgagctcctggcctcaagcaatcctcccaccttggcctcccaaagtgttgggattacaggtgctagccaactgcatccagccaatgtttcatttcaactggcttaaatcttcaaagtggttaagaatttagtaaataaaactacttaatctacaactttcaaaaattgatgagtaatcactaattctgtaaatgaaggagttggacttcactattgccaaagcaacattttccccaaggaaagtcaatttgatatcctgtcacacttttcagccctggctagttaacacagtactatgaaaatctttagctagattttaaacgaaatatgccagcagaagtatggaatgagtccacaaaaatgagtgcctgccacaatgctatagtagctatggtgtatttagtgcagagtgtgggatgaataagtacatagtaattaaagtcatagtcctggcccaacagaacagttactaaatgtaagatacaaactaaactcacagtcatatttagaaggcgcttttcagctttagcactgacttaaaaagtctgaaccaccaggaagatgcgtacttaactggttaaaaaattaagtggccctggaaagttttaccccaaagatacaacttcttcacttatttagttcagtaatgaggctgagggacccaattttcaagtgtgcatttgagtgggaaacttttaaacaccatatgttgaagtttcatgagctcagtggaaaccttaaggtcagagtaaaagaaactggctgtaaacagccctgcagtgaagagactgggtcttagcaccttccacattcactcagcgccatctcagtcagcgcctgccagggaaagggcatggagagctgggacgggtgccttctcttttgcaccactccctttgcatattacacagtgcactggcttgccttacaatctaaggttcacatacagggggttttctatactgcttccggacattttttgcaaaagaacatcagaaccaatgaaggtaccatttcaggaggaatcatttttgtttgacttctgctatatgttgcccagcattagtcattgttttgataaagactaaaaggccttttctcaacatttgtgctctcccaaccacctgggaaagcaacccttccactcacaagaggtaacctcagatagggatatagtattcatttaagaaggggtagcccccccagcctgatttaaaaaggcccaagtcaatgtatggaacatgacaagggaagtgaaaaacaatggagtacacagtctgccttgaaaagcagccatttgatgaacagtcacaaatacaaagaatttggacattgtaacataatttcagaacttgctggtaagaataatttgcattcacacacaagagacatgaaatgctttttaaaagtctgtgataccagatgtcctttaaacactacacagacccatttgccacttgaaatgacaagaagaaatcctttcccttaatcttttcaattccatgcaaaccgtaattgagtacaaggcaccaaattttatgaattgtataaaattagttcacaaagctttatcagtaagtagaacaaactccatttctccctcccggccagcccaccctcctcccacccaccacccgccatccccgaccaagttttcattctgcactactgtcgacctctctagggcttatgctggggcatgccccactgtcagccaatccacctcattggttcttcccttgtacttggatgaagctgtaagcacagccagagtagcaaactcatacaatcattgactctagaagccttgccattaaaaacaaaaataaactctgctattgagtccataggacacattaacacttctacagtttccaattttattcatgacattttaagagacatct

SEQ ID NO: 418033 - DNA, 3135 bp, Homo sapiens
gggagggggaagggaattatggaaggaatccagctggcctgttagtaagggtgttccagtgctaggtggaggtggagtttggctgcctttggggagattggaagggtgaggaatagaggcctgatttctgagtgttgtttctgtgttggacaattctatgcaaactagagccaaaatggaagagggtgcaagtcccctcctggggccccagacgccccctcctttcttgctgcctggagcaggggcagtgctgttagtggctactcctggtgtgaacagcccatcctggccaccttccacaggaaacctgacctgaaggacagaagaggaaggaagcaggctttgccacaaatgtcagtgcagaactctggctggccccaccaagaagacagccccaagccccaggatccaggtccaccagccaactcagacagtgactcaggccacctgccgggggaggaccctgaggatacccatgctcagggtcctgcagttctgagcttgggttccctttgcctggacaccaaccaagcccccaactggactggacttcagaccctcctgcagcaactccctccgcaggacattgatgagcgctactgcctggcccttggggaggaggagcgggccgagctgcagctcttctgtgccaggcggaagcaggaagccctgggacagggggtagcccgcctggtacttcccaagcttgaaggacacacctgtgagaagtgtagggagttgctgaagccaggggagtacggagtgtttgcagcccgggcaggggaacagcgctgctggcaccagccttgctttgcctgccaggcctgtggccaggccctgataaacctcatctacttctaccatgatggacaactctactgcggccgtcatcatgcagagttgctgcgcccgcgctgcccggcttgtgaccagctgatcttctcctggcgctgcaccgaggcggagggacagcgctggcatgagaaccacttctgttgccaggactgcgccgggcctctgggcgggggacgttatgccctgcctgggggaagcccctgctgccccagctgcttcgagaaccgctactcggatgcaggctcgagctgggccggggcactggaagggcaggcattccttggagcgcccccaccgcaccccccagacccaagcctcggggcccgcagctctcaccgcgcatccctggccggagcgttccaagggccgcccgaacccaccccgcgccgcggtcggggttgcggcgccagactccctcccaggcgcgggaggcggacgccctctggtggaggcgggggaccctggcgaggactctcggcggcggcggcggcgcgcacggcccaggggctgggcggggcgggaggctgggcctcacccccactagctgcggtgtaggtccagctccgcggctctgagaccagcgtttccgacccggcccggaacaggggagactggactcgaccgaactgaaggaagggaccaaacctcggtgaactctgcaaccctctcccgaacactccttctcgctgctgccggcggttccagcctgcaaactcagagggggctgcctggatccagtccccagcaggagaaccgacctggggacaaagcggaggcacccaaagggcaggagcaatgccgcctggagactattcgtgatcccaaggacacccctttctccacctgctcctcctcctctgactcggaacctgaaggatttttcttaggcgagcgccttccccagtcctggaagacccccggaagcctccaagcagaggacagcaacgcctctaagacgcactgcaccatgtgctagtggcgcagctcagagaggggatgtgagtgggaggaaaggggtctgtaaagcgggagaacaaggctagcctccccctaacaatcctagactgagacgcagtcaggcgcacgcccgcaagaggcggcgaggtgacaagtttggagtgcgcccccttcagtactgcgcgttctaagacttttggcggagactttcttggcaaaacccattccccaaagctacgcttcccctgctgagatagcccctacccccacctccacaggctgggacagccccgtccccaccatcctcctcccaagccaattaaatgatcacagcacgcgtgacagttaccggctggagagccggaggtgggaccgggagcaggggaccgtagaaccgggccgcgctcctcccctcctagagttcgtggaggcgcagcagagggccgtccctcttccggatgtcggactaagcgaacagcgcccccactgccggccggtagcagccggaagtgccagaccggaggtgcgtcattcaccggcgacgccgatacggttcctccaccgaggcccatgcgaagctttccactatggcttccagcactgtcccggtgagcgctgctggctcggctaatgaaactcccgaaataccggacaacgtgggagattggcttcggggcgtctaccgctttgccactgataggaatgacttccggaggaacttgatactaaatttgggactctttgctgcgggagtttggctggccaggaacttgagtgacattgacctcatggcacctcagccaggggtgtagccaagtagacaaatggaatcctgtgctgaacccgaatcttccaaaaaacagcctacaatctgtgaccaccacaagatgtgccctgatggcagctgaagtttgattcagatgggcacttttcttccccttccctgcctagtttccttttgttccttgagtccacgcagaattccattctctggtcagcagacaggcttaagctaaagtattgcctctattctgtaaagttctgtacatagttcccaagcttctgcagggggtgatttttgctcttgtcctgagaaataacagtgctgttttaaaaaacatttgaaataaataccgcacacaaaggcaaaaaaaaaaaaaaaaaaaacctccggggcttcttttccgggggcgggaaaaggggttcttgaatggcccctgtggccttagttttcctggcccccgttttttgtccagggggaaatcggcgggcccccaaagggggccgttaaattccggaaaggccggtacctgtaaccgccaa

SEQ ID NO: 418034 - DNA, 3083 bp, Homo sapiens
gggagggggaagggaattatggaaggaatccagctggcctgttagtaagggtgttccagtgctaggtggaggtggagtttggctgcctttggggagattggaagggtgaggaatagaggcctgatttctgagtgttgtttctgtgttggacaattctatgcaaactagagccaaaatggaagagggtgcaagtcccctcctggggccccagacgccccctcctttcttgctgcctggagcaggggcagtgctgttagtggctactcctggtgtgaacagcccatcctggccaccttccacaggaaacctgacctgaaggacagaagaggaaggaagcaggctttgccacaaatgtcagtgcagaactctggctggccccaccaagaagacagccccaagccccaggatccaggtccaccagccaactcagacagtgactcaggccacctgccgggggaggaccctgaggatacccatgctcagggtcctgcagttctgagcttgggttccctttgcctggacaccaaccaagcccccaactggactggacttcagaccctcctgcagcaactccctccgcaggacattgatgagcgctactgcctggcccttggggaggaggagcgggccgagctgcagctcttctgtgccaggcggaagcaggaagccctgggacagggggtagcccgcctggtacttcccaagcttgaaggacacacctgtgagaagtgtagggagttgctgaagccaggggagtacggagtgtttgcagcccgggcaggggaacagcgctgctggcaccagccttgctttgcctgccaggcctgtggccaggccctgataaacctcatctacttctaccatgatggacaactctactgcggccgtcatcatgcagagttgctgcgcccgcgctgcccggcttgtgaccagctgatcttctcctggcgctgcaccgaggcggagggacagcgctggcatgagaaccacttctgttgccaggactgcgccgggcctctgggcgggggacgttatgccctgcctgggggaagcccctgctgccccagctgcttcgagaaccgctactcggatgcaggctcgagctgggccggggcactggaagggcaggcattccttggagcgcccccaccgcaccccccagacccaagcctcggggcccgcagctctcaccgcgcatccctggccggagcgttccaagggccgcccgaacccaccccgcgccgcggtcggggttgcggcgccagactccctcccaggcgcgggaggcggacgccctctggtggaggcgggggaccctggcgaggactctcggcggcggcggcggcgcgcacggcccaggggctgggcggggcgggaggctgggcctcacccccactagctgcggtgtaggtccagctccgcggctctgagaccagcgtttccgacccggcccggaacaggggagactggactcgaccgaactgaaggaagggaccaaacctcggtgaactctgcaaccctctcccgaacactccttctcgctgctgccggcggttccagcctgcaaactcagagggggctgcctggatccagtccccagcaggagaaccgacctggggacaaagcggaggcacccaaagggcaggagcaatgccgcctggagactattcgtgatcccaaggacacccctttctccacctgctcctcctcctctgactcggaacctgaaggatttttcttaggcgagcgccttccccagtcctggaagacccccggaagcctccaagcagaggacagcaacgcctctaagacgcactgcaccatgtgctagtggcgcagctcagagaggggatgtgagtgggaggaaaggggtctgtaaagcgggagaacaaggctagcctccccctaacaatcctagactgagacgcagtcaggcgcacgcccgcaagaggcggcgaggtgacaagtttggagtgcgcccccttcagtactgcgcgttctaagacttttggcggagactttcttggcaaaacccattccccaaagctacgcttcccctgctgagatagcccctacccccacctccacaggctgggacagccccgtccccaccatcctcctcccaagccaattaaatgatcacagcacgcgtgacagttaccggctggagagccggaggtgggaccgggagcaggggaccgtagaaccgggccgcgctcctcccctcctagagttcgtggaggcgcagcagagggccgtccctcttccggatgtcggactaagcgaacagcgcccccactgccggccggtagcagccggaagtgccagaccggaggtgcgtcattcaccggcgacgccgatacggttcctccaccgaggcccatgcgaagctttccactatggcttccagcactgtcccggtgagcgctgctggctcggctaatgaaactcccgaaataccggacaacgtgggagattggcttcggggcgtctaccgctttgccactgataggaatgacttccggaggaacttgatactaaatttgggactctttgctgcgggagtttggctggccaggaacttgagtgacattgacctcatggcacctcagccaggggtgtagccaagtagacaaatggaatcctgtgctgaacccgaatcttccaaaaaacagcctacaatctgtgaccaccacaagatgtgccctgatggcagctgaagtttgattcagatgggcacttttcttccccttccctgcctagtttccttttgttccttgagtccacgcagaattccattctctggtcagcagacaggcttaagctaaagtattgcctctattctgtaaagttctgtacatagttcccaagcttctgcagggggtgatttttgctcttgtcctgagaaataacagtgctgttttaaaaaacatttgaaataaataccgcacacaaaggcaaaaatatacgagcaagcttatcatgcggccggatttcggcttacttgcgcaattcgccttatagtgggccgattacaattcactggccgggggtttacaaggtgtgaattgggaaaccctggg

SEQ ID NO: 418035 - DNA, 3093 bp, Homo sapiens
  misc_feature (2907)..(2907): n is a, c, g, or t
gggagggggaagggaattatggaaggaatccagctggcctgttagtaagggtgttccagtgctaggtggaggtggagtttggctgcctttggggagattggaagggtgaggaatagaggcctgatttctgagtgttgtttctgtgttggacaattctatgcaaactagagccaaaatggaagagggtgcaagtcccctcctggggccccagacgccccctcctttcttgctgcctggagcaggggcagtgctgttagtggctactcctggtgtgaacagcccatcctggccaccttccacaggaaacctgacctgaaggacagaagaggaaggaagcaggctttgccacaaatgtcagtgcagaactctggctggccccaccaagaagacagccccaagccccaggatccaggtccaccagccaactcagacagtgactcaggccacctgccgggggaggaccctgaggatacccatgctcagggtcctgcagttctgagcttgggttccctttgcctggacaccaaccaagcccccaactggactggacttcagaccctcctgcagcaactccctccgcaggacattgatgagcgctactgcctggcccttggggaggaggagcgggccgagctgcagctcttctgtgccaggcggaagcaggaagccctgggacagggggtagcccgcctggtacttcccaagcttgaaggacacacctgtgagaagtgtagggagttgctgaagccaggggagtacggagtgtttgcagcccgggcaggggaacagcgctgctggcaccagccttgctttgcctgccaggcctgtggccaggccctgataaacctcatctacttctaccatgatggacaactctactgcggccgtcatcatgcagagttgctgcgcccgcgctgcccggcttgtgaccagctgatcttctcctggcgctgcaccgaggcggagggacagcgctggcatgagaaccacttctgttgccaggactgcgccgggcctctgggcgggggacgttatgccctgcctgggggaagcccctgctgccccagctgcttcgagaaccgctactcggatgcaggctcgagctgggccggggcactggaagggcaggcattccttggagcgcccccaccgcaccccccagacccaagcctcggggcccgcagctctcaccgcgcatccctggccggagcgttccaagggccgcccgaacccaccccgcgccgcggtcggggttgcggcgccagactccctcccaggcgcgggaggcggacgccctctggtggaggcgggggaccctggcgaggactctcggcggcggcggcggcgcgcacggcccaggggctgggcggggcgggaggctgggcctcacccccactagctgcggtgtaggtccagctccgcggctctgagaccagcgtttccgacccggcccggaacaggggagactggactcgaccgaactgaaggaagggaccaaacctcggtgaactctgcaaccctctcccgaacactccttctcgctgctgccggcggttccagcctgcaaactcagagggggctgcctggatccagtccccagcaggagaaccgacctggggacaaagcggaggcacccaaagggcaggagcaatgccgcctggagactattcgtgatcccaaggacacccctttctccacctgctcctcctcctctgactcggaacctgaaggatttttcttaggcgagcgccttccccagtcctggaagacccccggaagcctccaagcagaggacagcaacgcctctaagacgcactgcaccatgtgctagtggcgcagctcagagaggggatgtgagtgggaggaaaggggtctgtaaagcgggagaacaaggctagcctccccctaacaatcctagactgagacgcagtcaggcgcacgcccgcaagaggcggcgaggtgacaagtttggagtgcgcccccttcagtactgcgcgttctaagacttttggcggagactttcttggcaaaacccattccccaaagctacgcttcccctgctgagatagcccctacccccacctccacaggctgggacagccccgtccccaccatcctcctcccaagccaattaaatgatcacagcacgcgtgacagttaccggctggagagccggaggtgggaccgggagcaggggaccgtagaaccgggccgcgctcctcccctcctagagttcgtggaggcgcagcagagggccgtccctcttccggatgtcggactaagcgaacagcgcccccactgccggccggtagcagccggaagtgccagaccggaggtgcgtcattcaccggcgacgccgatacggttcctccaccgaggcccatgcgaagctttccactatggcttccagcactgtcccggtgagcgctgctggctcggctaatgaaactcccgaaataccggacaacgtgggagattggcttcggggcgtctaccgctttgccactgataggaatgacttccggaggaacttgatactaaatttgggactctttgctgcgggagtttggctggccaggaacttgagtgacattgacctcatggcacctcagccaggggtgtagccaagtagacaaatggaatcctgtgctgaacccgaatcttccaaaaaacagcctacaatctgtgaccaccacaagatgtgccctgatggcagctgaagtttgattcagatgggcacttttcttccccttccctgcctagtttccttttgttccttgagtccacgcagaattccattctctggtcagcagacaggcttaagctaaagtattgcctctattctgtaaagttctgtacatagttcccaagcttctgcagggggtgatttttgctcttgtccggggntgttaacaaccccggacaaaggagattggatgactgggaagcgctggcccggaacagcccctgcaactgtggggcctgcacacagcccttccacagttggcactgcaggtgcaggccaatcctttaaagaataaacaaggaagtcagctctttcactttttacaagtcggcaaaaacagactccgg

SEQ ID NO: 418036 - DNA, 6247 bp, Homo sapiens
gggagggggaagggaattatggaaggaatccagctggcctgttagtaagggtgttccagtgctaggtggaggtggagtttggctgcctttggggagattggaagggtgaggaatagaggcctgatttctgagtgttgtttctgtgttggacaattctatgcaaactagagccaaaatggaagagggtgcaagtcccctcctggggccccagacgccccctcctttcttgctgcctggagcaggggcagtgctgttagtggctactcctggtgtgaacagcccatcctggccaccttccacaggaaacctgacctgaaggacagaagaggaaggaagcaggctttgccacaaatgtcagtgcagaactctggctggccccaccaagaagacagccccaagccccaggatccaggtccaccagccaactcagacagtgactcaggccacctgccgggggaggaccctgaggatacccatgctcagggtcctgcagttctgagcttgggttccctttgcctggacaccaaccaagcccccaactggactggacttcagaccctcctgcagcaactccctccgcaggacattgatgagcgctactgcctggcccttggggaggaggagcgggccgagctgcagctcttctgtgccaggcggaagcaggaagccctgggacagggggtagcccgcctggtacttcccaagcttgaaggacacacctgtgagaagtgtagggagttgctgaagccaggggagtacggagtgtttgcagcccgggcaggggaacagcgctgctggcaccagccttgctttgcctgccaggcctgtggccaggccctgataaacctcatctacttctaccatgatggacaactctactgcggccgtcatcatgcagagttgctgcgcccgcgctgcccggcttgtgaccagctgatcttctcctggcgctgcaccgaggcggagggacagcgctggcatgagaaccacttctgttgccaggactgcgccgggcctctgggcgggggacgttatgccctgcctgggggaagcccctgctgccccagctgcttcgagaaccgctactcggatgcaggctcgagctgggccggggcactggaagggcaggcattccttggagcgcccccaccgcaccccccagacccaagcctcggggcccgcagctctcaccgcgcatccctggccggagcgttccaagggccgcccgaacccaccccgcgccgcggtcggggttgcggcgccagactccctcccaggcgcgggaggcggacgccctctggtggaggcgggggaccctggcgaggactctcggcggcggcggcggcgcgcacggcccaggggctgggcggggcgggaggctgggcctcacccccactagctgcggtgtaggtccagctccgcggctctgagaccagcgtttccgacccggcccggaacaggggagactggactcgaccgaactgaaggaagggaccaaacctcggtgaactctgcaaccctctcccgaacactccttctcgctgctgccggcggttccagcctgcaaactcagagggggctgcctggatccagtccccagcaggagaaccgacctggggacaaagcggaggcacccaaagggcaggagcaatgccgcctggagactattcgtgatcccaaggacacccctttctccacctgctcctcctcctctgactcggaacctgaaggatttttcttaggcgagcgccttccccagtcctggaagacccccggaagcctccaagcagaggacagcaacgcctctaagacgcactgcaccatgtgctagtggcgcagctcagagaggggatgtgagtgggaggaaaggggtctgtaaagcgggagaacaaggctagcctccccctaacaatcctagactgagacgcagtcaggcgcacgcccgcaagaggcggcgaggtgacaagtttggagtgcgcccccttcagtactgcgcgttctaagacttttggcggagactttcttggcaaaacccattccccaaagctacgcttcccctgctgagatagcccctacccccacctccacaggctgggacagccccgtccccaccatcctcctcccaagccaattaaatgatcacagcacgcgtgacagttaccggctggagagccggaggtgggaccgggagcaggggaccgtagaaccgggccgcgctcctcccctcctagagttcgtggaggcgcagcagagggccgtccctcttccggatgtcggactaagcgaacagcgcccccactgccggccggtagcagccggaagtgccagaccggaggtgcgtcattcaccggcgacgccgatacggttcctccaccgaggcccatgcgaagctttccactatggcttccagcactgtcccggtgagcgctgctggctcggctaatgaaactcccgaaataccggacaacgtgggagattggcttcggggcgtctaccgctttgccactgataggaatgacttccggaggaacttgatactaaatttgggactctttgctgcgggagtttggctggccaggaacttgagtgacattgacctcatggcacctcagccaggggtgtagccaagtagacaaatggaatcctgtgctgaacccgaatcttccaatttgattcagatgggcacttttcttccccttccctgcctagtttccttttgttccttgagtccacgcagaattccattctctggtcagcagacaggcttaagctaaagtattgcctctattctgtaaagttctgtacatagttcccaagcttctgcagggggtgatttttgctcttgtcctgagaaataacagtgctgttttaaaaaacatttgaaataaataccgcacacaaaggcagtcattttattcttttaataagaaacttttgcttacaaaaacaaggtgtaaaaagatttacaaaaatcataaaaacatgatttatatttcacacttgagagacaaaaacaagccccaaaacatggattttaatggaggtggtttgcttcattttaaaagggaaaaaaaaaaaaggaagctgtaaccatacattgatgttaacctagcatgaagtttattcttgaagaatttacattgttgagcaatattaggggaagaagccatttggtgttgcatagcattttagtgcaccagatgggttttccagacaccagggaggcatcattgctggaatagtgaggtttggtggcagaaagagggcagtgatgtgtagggggaggcaaagtgaagtaagcctgggcagtggtcactaaagtgacactgctgaggcagctgcttccttcagaaggaaatgttttgtgaccctaaaattcatggtagtgctactgtccagggtttgggggctctttggaaatggagtatgtacggaactggcatgtatagacttatatagccatagaaagaggtggatagaaacaggtccaccatggcaatatttttttctggccagtttactaggcattaaaaaaaatactgcttttatgtgccaagtctcttatggaactagtatgggattaaaggacgttaattggaaaggagggtcagtatataaggaccacagtggcctgttaaggatgacagatgtctctagcagtttgttcactactaaagttaaacaggacaaaatagtctttcctgaccttgctggcataaatattaagaaaattgtttgagaattagatttttttagtatgtatataaaaacagcaccattctttgtataaatcagatagatcttatctgatagatgaagctaagaccctttgagtctacactgggttgactctgagaggtttatatcttattgggtattaagataaagaagggtcacatgagagcaaagcttagctttgaagccatcacctcccaaatggtgaccaaggaggaaacttttaagccatagtatagatgctaacccccatttagacctgcatcagatcacttgctaagacaagaaataccagcacctcctgttctttataggaatgaaacttagatccttaaaggctgctacctgatatactcatgactggacagttttgataaaaacttccaaaattgaaaatcaaaatccagcaagaattaagacatggcagcttccaaaagcataattcaaatttcattcaaaatttactgttttggcttcaagtaagtgtttactgttggttgggttttaaagccataattatggttgagtaaggattcatttatttatttattaaatttttatacatttttgaaaagatttcaaatctatgtttcccaggctggtcttgagctcctggcctcaagcaatcctcccaccttggcctcccaaagtgttgggattacaggtgctagccaactgcatccagccaatgtttcatttcaactggcttaaatcttcaaagtggttaagaatttagtaaataaaactacttaatctacaactttcaaaaattgatgagtaatcactaattctgtaaatgaaggagttggacttcactattgccaaagcaacattttccccaaggaaagtcaatttgatatcctgtcacacttttcagccctggctagttaacacagtactatgaaaatctttagctagattttaaacgaaatatgccagcagaagtatggaatgagtccacaaaaatgagtgcctgccacaatgctatagtagctatggtgtatttagtgcagagtgtgggatgaataagtacatagtaattaaagtcatagtcctggcccaacagaacagttactaaatgtaagatacaaactaaactcacagtcatatttagaaggcgcttttcagctttagcactgacttaaaaagtctgaaccaccaggaagatgcgtacttaactggttaaaaaattaagtggccctggaaagttttaccccaaagatacaacttcttcacttatttagttcagtaatgaggctgagggacccaattttcaagtgtgcatttgagtgggaaacttttaaacaccatatgttgaagtttcatgagctcagtggaaaccttaaggtcagagtaaaagaaactggctgtaaacagccctgcagtgaagagactgggtcttagcaccttccacattcactcagcgccatctcagtcagcgcctgccagggaaagggcatggagagctgggacgggtgccttctcttttgcaccactccctttgcatattacacagtgcactggcttgccttacaatctaaggttcacatacagggggttttctatactgcttccggacattttttgcaaaagaacatcagaaccaatgaaggtaccatttcaggaggaatcatttttgtttgacttctgctatatgttgcccagcattagtcattgttttgataaagactaaaaggccttttctcaacatttgtgctctcccaaccacctgggaaagcaacccttccactcacaagaggtaacctcagatagggatatagtattcatttaagaaggggtagcccccccagcctgatttaaaaaggcccaagtcaatgtatggaacatgacaagggaagtgaaaaacaatggagtacacagtctgccttgaaaagcagccatttgatgaacagtcacaaatacaaagaatttggacattgtaacataatttcagaacttgctggtaagaataatttgcattcacacacaagagacatgaaatgctttttaaaagtctgtgataccagatgtcctttaaacactacacagacccatttgccacttgaaatgacaagaagaaatcctttcccttaatcttttcaattccatgcaaaccgtaattgagtacaaggcaccaaattttatgaattgtataaaattagttcacaaagctttatcagtaagtagaacaaactccatttctccctcccggccagcccaccctcctcccacccaccacccgccatccccgaccaagttttcattctgcactactgtcgacctctctagggcttatgctggggcatgccccactgtcagccaatccacctcattggttcttcccttgtacttggatgaagctgtaagcacagccagagtagcaaactcatacaatcattgactctagaagccttgccattaaaaacaaaaataaactctgctattgagtccataggacacattaacacttctacagtttccaattttattcatgacattttaagagacatct

SEQ ID NO: 418037 - DNA, 6233 bp, Homo sapiens
gggagggggaagggaattatggaaggaatccagctggcctgttagtaagggtgttccagtgctaggtggaggtggagtttggctgcctttggggagattggaagggtgaggaatagaggcctgatttctgagtgttgtttctgtgttggacaattctatgcaaactagagccaaaatggaagagggtgcaagtcccctcctggggccccagacgccccctcctttcttgctgcctggagcaggggcagtgctgttagtggctactcctggtgtgaacagcccatcctggccaccttccacaggaaacctgacctgaaggacagaagaggaaggaagcaggctttgccacaaatgtcagtgcagaactctggctggccccaccaagaagacagccccaagccccaggatccaggtccaccagccaactcagacagtgactcaggccacctgccgggggaggaccctgaggatacccatgctcagggtcctgcagttctgagcttgggttccctttgcctggacaccaaccaagcccccaactggactggacttcagaccctcctgcagcaactccctccgcaggacattgatgagcgctactgcctggcccttggggaggaggagcgggccgagctgcagctcttctgtgccaggcggaagcaggaagccctgggacagggggtagcccgcctggtacttcccaagcttgaaggacacacctgtgagaagtgtagggagttgctgaagccaggggagtacggagtgtttgcagcccgggcaggggaacagcgctgctggcaccagccttgctttgcctgccaggcctgtggccaggccctgataaacctcatctacttctaccatgatggacaactctactgcggccgtcatcatgcagagttgctgcgcccgcgctgcccggcttgtgaccagctgatcttctcctggcgctgcaccgaggcggagggacagcgctggcatgagaaccacttctgttgccaggactgcgccgggcctctgggcgggggacgttatgccctgcctgggggaagcccctgctgccccagctgcttcgagaaccgctactcggatgcaggctcgagctgggccggggcactggaagggcaggcattccttggagcgcccccaccgcaccccccagacccaagcctcggggcccgcagctctcaccgcgcatccctggccggagcgttccaagggccgcccgaacccaccccgcgccgcggtcggggttgcggcgccagactccctcccaggcgcgggaggcggacgccctctggtggaggcgggggaccctggcgaggactctcggcggcggcggcggcgcgcacggcccaggggctgggcggggcgggaggctgggcctcacccccactagctgcggtgtaggtccagctccgcggctctgagaccagcgtttccgacccggcccggaacaggggagactggactcgaccgaactgaaggaagggaccaaacctcggtgaactctgcaaccctctcccgaacactccttctcgctgctgccggcggttccagcctgcaaactcagagggggctgcctggatccagtccccagcaggagaaccgacctggggacaaagcggaggcacccaaagggcaggagcaatgccgcctggagactattcgtgatcccaaggacacccctttctccacctgctcctcctcctctgactcggaacctgaaggatttttcttaggcgagcgccttccccagtcctggaagacccccggaagcctccaagcagaggacagcaacgcctctaagacgcactgcaccatgtgctagtggcgcagctcagagaggggatgtgagtgggaggaaaggggtctgtaaagcgggagaacaaggctagcctccccctaacaatcctagactgagacgcagtcaggcgcacgcccgcaagaggcggcgaggtgacaagtttggagtgcgcccccttcagtactgcgcgttctaagacttttggcggagactttcttggcaaaacccattccccaaagctacgcttcccctgctgagatagcccctacccccacctccacaggctgggacagccccgtccccaccatcctcctcccaagccaattaaatgatcacagcacgcgtgacagttaccggctggagagccggaggtgggaccgggagcaggggaccgtagaaccgggccgcgctcctcccctcctagagttcgtggaggcgcagcagagggccgtccctcttccggatgtcggactaagcgaacagcgcccccactgccggccggtagcagccggaagtgccagaccggaggtgcgtcattcaccggcgacgccgatacggttcctccaccgaggcccatgcgaagctttccactatggcttccagcactgtcccggtgagcgctgctggctcggctaatgaaactcccgaaataccggacaacgtgggagattggcttcggggcgtctaccgctttgccactgataggaatgacttccggagttctaatgccacctgtcgtcttatcatctgattgcagacaaatggaatcctgtgctgaacccgaatcttccaaaaaacagcctacaatctgtgaccaccacaagatgtgccctgatggcagctgaagtttgattcagatgggcacttttcttccccttccctgcctagtttccttttgttccttgagtccacgcagaattccattctctggtcagcagacaggcttaagctaaagtattgcctctattctgtaaagttctgtacatagttcccaagcttctgcagggggtgatttttgctcttgtcctgagaaataacagtgctgttttaaaaaacatttgaaataaataccgcacacaaaggcagtcattttattcttttaataagaaacttttgcttacaaaaacaaggtgtaaaaagatttacaaaaatcataaaaacatgatttatatttcacacttgagagacaaaaacaagccccaaaacatggattttaatggaggtggtttgcttcattttaaaagggaaaaaaaaaaaaggaagctgtaaccatacattgatgttaacctagcatgaagtttattcttgaagaatttacattgttgagcaatattaggggaagaagccatttggtgttgcatagcattttagtgcaccagatgggttttccagacaccagggaggcatcattgctggaatagtgaggtttggtggcagaaagagggcagtgatgtgtagggggaggcaaagtgaagtaagcctgggcagtggtcactaaagtgacactgctgaggcagctgcttccttcagaaggaaatgttttgtgaccctaaaattcatggtagtgctactgtccagggtttgggggctctttggaaatggagtatgtacggaactggcatgtatagacttatatagccatagaaagaggtggatagaaacaggtccaccatggcaatatttttttctggccagtttactaggcattaaaaaaaatactgcttttatgtgccaagtctcttatggaactagtatgggattaaaggacgttaattggaaaggagggtcagtatataaggaccacagtggcctgttaaggatgacagatgtctctagcagtttgttcactactaaagttaaacaggacaaaatagtctttcctgaccttgctggcataaatattaagaaaattgtttgagaattagatttttttagtatgtatataaaaacagcaccattctttgtataaatcagatagatcttatctgatagatgaagctaagaccctttgagtctacactgggttgactctgagaggtttatatcttattgggtattaagataaagaagggtcacatgagagcaaagcttagctttgaagccatcacctcccaaatggtgaccaaggaggaaacttttaagccatagtatagatgctaacccccatttagacctgcatcagatcacttgctaagacaagaaataccagcacctcctgttctttataggaatgaaacttagatccttaaaggctgctacctgatatactcatgactggacagttttgataaaaacttccaaaattgaaaatcaaaatccagcaagaattaagacatggcagcttccaaaagcataattcaaatttcattcaaaatttactgttttggcttcaagtaagtgtttactgttggttgggttttaaagccataattatggttgagtaaggattcatttatttatttattaaatttttatacatttttgaaaagatttcaaatctatgtttcccaggctggtcttgagctcctggcctcaagcaatcctcccaccttggcctcccaaagtgttgggattacaggtgctagccaactgcatccagccaatgtttcatttcaactggcttaaatcttcaaagtggttaagaatttagtaaataaaactacttaatctacaactttcaaaaattgatgagtaatcactaattctgtaaatgaaggagttggacttcactattgccaaagcaacattttccccaaggaaagtcaatttgatatcctgtcacacttttcagccctggctagttaacacagtactatgaaaatctttagctagattttaaacgaaatatgccagcagaagtatggaatgagtccacaaaaatgagtgcctgccacaatgctatagtagctatggtgtatttagtgcagagtgtgggatgaataagtacatagtaattaaagtcatagtcctggcccaacagaacagttactaaatgtaagatacaaactaaactcacagtcatatttagaaggcgcttttcagctttagcactgacttaaaaagtctgaaccaccaggaagatgcgtacttaactggttaaaaaattaagtggccctggaaagttttaccccaaagatacaacttcttcacttatttagttcagtaatgaggctgagggacccaattttcaagtgtgcatttgagtgggaaacttttaaacaccatatgttgaagtttcatgagctcagtggaaaccttaaggtcagagtaaaagaaactggctgtaaacagccctgcagtgaagagactgggtcttagcaccttccacattcactcagcgccatctcagtcagcgcctgccagggaaagggcatggagagctgggacgggtgccttctcttttgcaccactccctttgcatattacacagtgcactggcttgccttacaatctaaggttcacatacagggggttttctatactgcttccggacattttttgcaaaagaacatcagaaccaatgaaggtaccatttcaggaggaatcatttttgtttgacttctgctatatgttgcccagcattagtcattgttttgataaagactaaaaggccttttctcaacatttgtgctctcccaaccacctgggaaagcaacccttccactcacaagaggtaacctcagatagggatatagtattcatttaagaaggggtagcccccccagcctgatttaaaaaggcccaagtcaatgtatggaacatgacaagggaagtgaaaaacaatggagtacacagtctgccttgaaaagcagccatttgatgaacagtcacaaatacaaagaatttggacattgtaacataatttcagaacttgctggtaagaataatttgcattcacacacaagagacatgaaatgctttttaaaagtctgtgataccagatgtcctttaaacactacacagacccatttgccacttgaaatgacaagaagaaatcctttcccttaatcttttcaattccatgcaaaccgtaattgagtacaaggcaccaaattttatgaattgtataaaattagttcacaaagctttatcagtaagtagaacaaactccatttctccctcccggccagcccaccctcctcccacccaccacccgccatccccgaccaagttttcattctgcactactgtcgacctctctagggcttatgctggggcatgccccactgtcagccaatccacctcattggttcttcccttgtacttggatgaagctgtaagcacagccagagtagcaaactcatacaatcattgactctagaagccttgccattaaaaacaaaaataaactctgctattgagtccataggacacattaacacttctacagtttccaattttattcatgacattttaagagacatct

SEQ ID NO: 418038 - DNA, 4424 bp, Homo sapiens
ctggccaggagagttcccgtgtggcaaaagcgatctttctgtcatgtggctgtatctgtaatgtcaccctgatcaagggaagaagtgctagcacgtaaacaggctttttcggccctggactagtgctttagctgggctttgcgtttgatcttacatttcttttttgttttttttttttttttgagacggagtctcactctgttgcccaggctggagtgcagtggcgcgatctcggctcactgcaagctccgcctcccgggttcacgccattctcctgcctcagcctccccagtagctgggattacaggcgcgcaccaccacgcccagctaatttttgtatttttagtagagacggggtttcaccatgttggccaggctggtctcgagctcctgacttcgtgatccgcctgccttggccttccaaagtgctgggattacaggcgtgaaccaccgcgcccagcctgaccttacacttactaggcacaaaaatgaactccaaattcccacgtgggtcttgagcaacctgccgtcacaaccacgtatcaacgcctcgggaaggtggtgatggaagcctttccccccagtacatttcgttaactgtacaactgactcagtgaccacagggttaataaaacacattgtttttccaggaacttgatactaaatttgggactctttgctgcgggagtttggctggccaggaacttgagtgacattgacctcatggcacctcagccaggggtgtagccaagtagacaaatggaatcctgtgctgaacccgaatcttccaaaaaacagcctacaatctgtgaccaccacaagatgtgccctgatggcagctgaagtttgattcagatgggcacttttcttccccttccctgcctagtttccttttgttccttgagtccacgcagaattccattctctggtcagcagacaggcttaagctaaagtattgcctctattctgtaaagttctgtacatagttcccaagcttctgcagggggtgatttttgctcttgtcctgagaaataacagtgctgttttaaaaaacatttgaaataaataccgcacacaaaggcagtcattttattcttttaataagaaacttttgcttacaaaaacaaggtgtaaaaagatttacaaaaatcataaaaacatgatttatatttcacacttgagagacaaaaacaagccccaaaacatggattttaatggaggtggtttgcttcattttaaaagggaaaaaaaaaaaaggaagctgtaaccatacattgatgttaacctagcatgaagtttattcttgaagaatttacattgttgagcaatattaggggaagaagccatttggtgttgcatagcattttagtgcaccagatgggttttccagacaccagggaggcatcattgctggaatagtgaggtttggtggcagaaagagggcagtgatgtgtagggggaggcaaagtgaagtaagcctgggcagtggtcactaaagtgacactgctgaggcagctgcttccttcagaaggaaatgttttgtgaccctaaaattcatggtagtgctactgtccagggtttgggggctctttggaaatggagtatgtacggaactggcatgtatagacttatatagccatagaaagaggtggatagaaacaggtccaccatggcaatatttttttctggccagtttactaggcattaaaaaaaatactgcttttatgtgccaagtctcttatggaactagtatgggattaaaggacgttaattggaaaggagggtcagtatataaggaccacagtggcctgttaaggatgacagatgtctctagcagtttgttcactactaaagttaaacaggacaaaatagtctttcctgaccttgctggcataaatattaagaaaattgtttgagaattagatttttttagtatgtatataaaaacagcaccattctttgtataaatcagatagatcttatctgatagatgaagctaagaccctttgagtctacactgggttgactctgagaggtttatatcttattgggtattaagataaagaagggtcacatgagagcaaagcttagctttgaagccatcacctcccaaatggtgaccaaggaggaaacttttaagccatagtatagatgctaacccccatttagacctgcatcagatcacttgctaagacaagaaataccagcacctcctgttctttataggaatgaaacttagatccttaaaggctgctacctgatatactcatgactggacagttttgataaaaacttccaaaattgaaaatcaaaatccagcaagaattaagacatggcagcttccaaaagcataattcaaatttcattcaaaatttactgttttggcttcaagtaagtgtttactgttggttgggttttaaagccataattatggttgagtaaggattcatttatttatttattaaatttttatacatttttgaaaagatttcaaatctatgtttcccaggctggtcttgagctcctggcctcaagcaatcctcccaccttggcctcccaaagtgttgggattacaggtgctagccaactgcatccagccaatgtttcatttcaactggcttaaatcttcaaagtggttaagaatttagtaaataaaactacttaatctacaactttcaaaaattgatgagtaatcactaattctgtaaatgaaggagttggacttcactattgccaaagcaacattttccccaaggaaagtcaatttgatatcctgtcacacttttcagccctggctagttaacacagtactatgaaaatctttagctagattttaaacgaaatatgccagcagaagtatggaatgagtccacaaaaatgagtgcctgccacaatgctatagtagctatggtgtatttagtgcagagtgtgggatgaataagtacatagtaattaaagtcatagtcctggcccaacagaacagttactaaatgtaagatacaaactaaactcacagtcatatttagaaggcgcttttcagctttagcactgacttaaaaagtctgaaccaccaggaagatgcgtacttaactggttaaaaaattaagtggccctggaaagttttaccccaaagatacaacttcttcacttatttagttcagtaatgaggctgagggacccaattttcaagtgtgcatttgagtgggaaacttttaaacaccatatgttgaagtttcatgagctcagtggaaaccttaaggtcagagtaaaagaaactggctgtaaacagccctgcagtgaagagactgggtcttagcaccttccacattcactcagcgccatctcagtcagcgcctgccagggaaagggcatggagagctgggacgggtgccttctcttttgcaccactccctttgcatattacacagtgcactggcttgccttacaatctaaggttcacatacagggggttttctatactgcttccggacattttttgcaaaagaacatcagaaccaatgaaggtaccatttcaggaggaatcatttttgtttgacttctgctatatgttgcccagcattagtcattgttttgataaagactaaaaggccttttctcaacatttgtgctctcccaaccacctgggaaagcaacccttccactcacaagaggtaacctcagatagggatatagtattcatttaagaaggggtagcccccccagcctgatttaaaaaggcccaagtcaatgtatggaacatgacaagggaagtgaaaaacaatggagtacacagtctgccttgaaaagcagccatttgatgaacagtcacaaatacaaagaatttggacattgtaacataatttcagaacttgctggtaagaataatttgcattcacacacaagagacatgaaatgctttttaaaagtctgtgataccagatgtcctttaaacactacacagacccatttgccacttgaaatgacaagaagaaatcctttcccttaatcttttcaattccatgcaaaccgtaattgagtacaaggcaccaaattttatgaattgtataaaattagttcacaaagctttatcagtaagtagaacaaactccatttctccctcccggccagcccaccctcctcccacccaccacccgccatccccgaccaagttttcattctgcactactgtcgacctctctagggcttatgctggggcatgccccactgtcagccaatccacctcattggttcttcccttgtacttggatgaagctgtaagcacagccagagtagcaaactcatacaatcattgactctagaagccttgccattaaaaacaaaaataaactctgctattgagtccataggacacattaacacttctacagtttccaattttattcatgacattttaagagacatct

SEQ ID NO: 418039 - DNA, 4655 bp, Homo sapiens
ctggccaggagagttcccgtgtggcaaaagcgatctttctgtcatgtggctgtatctgtaatgtcaccctgatcaagggaagaagtgctagcacgtaaacaggctttttcggccctggactagtgctttagctgggctttgcgtttgatcttacatttcttttttgttttttttttttttttgagacggagtctcactctgttgcccaggctggagtgcagtggcgcgatctcggctcactgcaagctccgcctcccgggttcacgccattctcctgcctcagcctccccagtagctgggattacaggcgcgcaccaccacgcccagctaatttttgtatttttagtagagacggggtttcaccatgttggccaggctggtctcgagctcctgacttcgtgatccgcctgccttggccttccaaagtgctgggattacaggcgtgaaccaccgcgcccagcctgaccttacacttactaggcacaaaaatgaactccaaattcccacgtgggtcttgagcaacctgccgtcacaaccacgtatcaacgcctcgggaaggtggtgatggaagcctttccccccagtacatttcgttaactgtacaactgactcagtgaccacagggttaataaaacacattgtttttccaggaacttgatactaaatttgggactctttgctgcgggagtttggctggccaggaacttgagtgacattgacctcatggcacctcagccaggggtgtagccaagtaggtaagcactgaactacacccatgcgtgtcttaggagacctagagactgggtgaagcaatgttttctgtcaagtattcatgaaatgtacaaaagaatgtgatgtaaaacccttaactattcctagttaaatgtgttttcagatgttgaaagggatttaagtatctcttaccagtttccctcccatacttttacagttctaatgccacctgtcgtcttatcatctgattgcagacaaatggaatcctgtgctgaacccgaatcttccaaaaaacagcctacaatctgtgaccaccacaagatgtgccctgatggcagctgaagtttgattcagatgggcacttttcttccccttccctgcctagtttccttttgttccttgagtccacgcagaattccattctctggtcagcagacaggcttaagctaaagtattgcctctattctgtaaagttctgtacatagttcccaagcttctgcagggggtgatttttgctcttgtcctgagaaataacagtgctgttttaaaaaacatttgaaataaataccgcacacaaaggcagtcattttattcttttaataagaaacttttgcttacaaaaacaaggtgtaaaaagatttacaaaaatcataaaaacatgatttatatttcacacttgagagacaaaaacaagccccaaaacatggattttaatggaggtggtttgcttcattttaaaagggaaaaaaaaaaaaggaagctgtaaccatacattgatgttaacctagcatgaagtttattcttgaagaatttacattgttgagcaatattaggggaagaagccatttggtgttgcatagcattttagtgcaccagatgggttttccagacaccagggaggcatcattgctggaatagtgaggtttggtggcagaaagagggcagtgatgtgtagggggaggcaaagtgaagtaagcctgggcagtggtcactaaagtgacactgctgaggcagctgcttccttcagaaggaaatgttttgtgaccctaaaattcatggtagtgctactgtccagggtttgggggctctttggaaatggagtatgtacggaactggcatgtatagacttatatagccatagaaagaggtggatagaaacaggtccaccatggcaatatttttttctggccagtttactaggcattaaaaaaaatactgcttttatgtgccaagtctcttatggaactagtatgggattaaaggacgttaattggaaaggagggtcagtatataaggaccacagtggcctgttaaggatgacagatgtctctagcagtttgttcactactaaagttaaacaggacaaaatagtctttcctgaccttgctggcataaatattaagaaaattgtttgagaattagatttttttagtatgtatataaaaacagcaccattctttgtataaatcagatagatcttatctgatagatgaagctaagaccctttgagtctacactgggttgactctgagaggtttatatcttattgggtattaagataaagaagggtcacatgagagcaaagcttagctttgaagccatcacctcccaaatggtgaccaaggaggaaacttttaagccatagtatagatgctaacccccatttagacctgcatcagatcacttgctaagacaagaaataccagcacctcctgttctttataggaatgaaacttagatccttaaaggctgctacctgatatactcatgactggacagttttgataaaaacttccaaaattgaaaatcaaaatccagcaagaattaagacatggcagcttccaaaagcataattcaaatttcattcaaaatttactgttttggcttcaagtaagtgtttactgttggttgggttttaaagccataattatggttgagtaaggattcatttatttatttattaaatttttatacatttttgaaaagatttcaaatctatgtttcccaggctggtcttgagctcctggcctcaagcaatcctcccaccttggcctcccaaagtgttgggattacaggtgctagccaactgcatccagccaatgtttcatttcaactggcttaaatcttcaaagtggttaagaatttagtaaataaaactacttaatctacaactttcaaaaattgatgagtaatcactaattctgtaaatgaaggagttggacttcactattgccaaagcaacattttccccaaggaaagtcaatttgatatcctgtcacacttttcagccctggctagttaacacagtactatgaaaatctttagctagattttaaacgaaatatgccagcagaagtatggaatgagtccacaaaaatgagtgcctgccacaatgctatagtagctatggtgtatttagtgcagagtgtgggatgaataagtacatagtaattaaagtcatagtcctggcccaacagaacagttactaaatgtaagatacaaactaaactcacagtcatatttagaaggcgcttttcagctttagcactgacttaaaaagtctgaaccaccaggaagatgcgtacttaactggttaaaaaattaagtggccctggaaagttttaccccaaagatacaacttcttcacttatttagttcagtaatgaggctgagggacccaattttcaagtgtgcatttgagtgggaaacttttaaacaccatatgttgaagtttcatgagctcagtggaaaccttaaggtcagagtaaaagaaactggctgtaaacagccctgcagtgaagagactgggtcttagcaccttccacattcactcagcgccatctcagtcagcgcctgccagggaaagggcatggagagctgggacgggtgccttctcttttgcaccactccctttgcatattacacagtgcactggcttgccttacaatctaaggttcacatacagggggttttctatactgcttccggacattttttgcaaaagaacatcagaaccaatgaaggtaccatttcaggaggaatcatttttgtttgacttctgctatatgttgcccagcattagtcattgttttgataaagactaaaaggccttttctcaacatttgtgctctcccaaccacctgggaaagcaacccttccactcacaagaggtaacctcagatagggatatagtattcatttaagaaggggtagcccccccagcctgatttaaaaaggcccaagtcaatgtatggaacatgacaagggaagtgaaaaacaatggagtacacagtctgccttgaaaagcagccatttgatgaacagtcacaaatacaaagaatttggacattgtaacataatttcagaacttgctggtaagaataatttgcattcacacacaagagacatgaaatgctttttaaaagtctgtgataccagatgtcctttaaacactacacagacccatttgccacttgaaatgacaagaagaaatcctttcccttaatcttttcaattccatgcaaaccgtaattgagtacaaggcaccaaattttatgaattgtataaaattagttcacaaagctttatcagtaagtagaacaaactccatttctccctcccggccagcccaccctcctcccacccaccacccgccatccccgaccaagttttcattctgcactactgtcgacctctctagggcttatgctggggcatgccccactgtcagccaatccacctcattggttcttcccttgtacttggatgaagctgtaagcacagccagagtagcaaactcatacaatcattgactctagaagccttgccattaaaaacaaaaataaactctgctattgagtccataggacacattaacacttctacagtttccaattttattcatgacattttaagagacatct

SEQ ID NO: 418040 - DNA, 3760 bp, Homo sapiens
gcggccgcctactactactactactgctcgaattcaagcttctaacgatgtacggggacatggcacctcagccaggggtgtagccaagtagacaaatggaatcctgtgctgaacccgaatcttccaaaaaacagcctacaatctgtgaccaccacaagatgtgccctgatggcagctgaagtttgattcagatgggcacttttcttccccttccctgcctagtttccttttgttccttgagtccacgcagaattccattctctggtcagcagacaggcttaagctaaagtattgcctctattctgtaaagttctgtacatagttcccaagcttctgcagggggtgatttttgctcttgtcctgagaaataacagtgctgttttaaaaaacatttgaaataaataccgcacacaaaggcagtcattttattcttttaataagaaacttttgcttacaaaaacaaggtgtaaaaagatttacaaaaatcataaaaacatgatttatatttcacacttgagagacaaaaacaagccccaaaacatggattttaatggaggtggtttgcttcattttaaaagggaaaaaaaaaaaaggaagctgtaaccatacattgatgttaacctagcatgaagtttattcttgaagaatttacattgttgagcaatattaggggaagaagccatttggtgttgcatagcattttagtgcaccagatgggttttccagacaccagggaggcatcattgctggaatagtgaggtttggtggcagaaagagggcagtgatgtgtagggggaggcaaagtgaagtaagcctgggcagtggtcactaaagtgacactgctgaggcagctgcttccttcagaaggaaatgttttgtgaccctaaaattcatggtagtgctactgtccagggtttgggggctctttggaaatggagtatgtacggaactggcatgtatagacttatatagccatagaaagaggtggatagaaacaggtccaccatggcaatatttttttctggccagtttactaggcattaaaaaaaatactgcttttatgtgccaagtctcttatggaactagtatgggattaaaggacgttaattggaaaggagggtcagtatataaggaccacagtggcctgttaaggatgacagatgtctctagcagtttgttcactactaaagttaaacaggacaaaatagtctttcctgaccttgctggcataaatattaagaaaattgtttgagaattagatttttttagtatgtatataaaaacagcaccattctttgtataaatcagatagatcttatctgatagatgaagctaagaccctttgagtctacactgggttgactctgagaggtttatatcttattgggtattaagataaagaagggtcacatgagagcaaagcttagctttgaagccatcacctcccaaatggtgaccaaggaggaaacttttaagccatagtatagatgctaacccccatttagacctgcatcagatcacttgctaagacaagaaataccagcacctcctgttctttataggaatgaaacttagatccttaaaggctgctacctgatatactcatgactggacagttttgataaaaacttccaaaattgaaaatcaaaatccagcaagaattaagacatggcagcttccaaaagcataattcaaatttcattcaaaatttactgttttggcttcaagtaagtgtttactgttggttgggttttaaagccataattatggttgagtaaggattcatttatttatttattaaatttttatacatttttgaaaagatttcaaatctatgtttcccaggctggtcttgagctcctggcctcaagcaatcctcccaccttggcctcccaaagtgttgggattacaggtgctagccaactgcatccagccaatgtttcatttcaactggcttaaatcttcaaagtggttaagaatttagtaaataaaactacttaatctacaactttcaaaaattgatgagtaatcactaattctgtaaatgaaggagttggacttcactattgccaaagcaacattttccccaaggaaagtcaatttgatatcctgtcacacttttcagccctggctagttaacacagtactatgaaaatctttagctagattttaaacgaaatatgccagcagaagtatggaatgagtccacaaaaatgagtgcctgccacaatgctatagtagctatggtgtatttagtgcagagtgtgggatgaataagtacatagtaattaaagtcatagtcctggcccaacagaacagttactaaatgtaagatacaaactaaactcacagtcatatttagaaggcgcttttcagctttagcactgacttaaaaagtctgaaccaccaggaagatgcgtacttaactggttaaaaaattaagtggccctggaaagttttaccccaaagatacaacttcttcacttatttagttcagtaatgaggctgagggacccaattttcaagtgtgcatttgagtgggaaacttttaaacaccatatgttgaagtttcatgagctcagtggaaaccttaaggtcagagtaaaagaaactggctgtaaacagccctgcagtgaagagactgggtcttagcaccttccacattcactcagcgccatctcagtcagcgcctgccagggaaagggcatggagagctgggacgggtgccttctcttttgcaccactccctttgcatattacacagtgcactggcttgccttacaatctaaggttcacatacagggggttttctatactgcttccggacattttttgcaaaagaacatcagaaccaatgaaggtaccatttcaggaggaatcatttttgtttgacttctgctatatgttgcccagcattagtcattgttttgataaagactaaaaggccttttctcaacatttgtgctctcccaaccacctgggaaagcaacccttccactcacaagaggtaacctcagatagggatatagtattcatttaagaaggggtagcccccccagcctgatttaaaaaggcccaagtcaatgtatggaacatgacaagggaagtgaaaaacaatggagtacacagtctgccttgaaaagcagccatttgatgaacagtcacaaatacaaagaatttggacattgtaacataatttcagaacttgctggtaagaataatttgcattcacacacaagagacatgaaatgctttttaaaagtctgtgataccagatgtcctttaaacactacacagacccatttgccacttgaaatgacaagaagaaatcctttcccttaatcttttcaattccatgcaaaccgtaattgagtacaaggcaccaaattttatgaattgtataaaattagttcacaaagctttatcagtaagtagaacaaactccatttctccctcccggccagcccaccctcctcccacccaccacccgccatccccgaccaagttttcattctgcactactgtcgacctctctagggcttatgctggggcatgccccactgtcagccaatccacctcattggttcttcccttgtacttggatgaagctgtaagcacagccagagtagcaaactcatacaatcattgactctagaagccttgccattaaaaacaaaaataaactctgctattgagtccataggacacattaacacttctacagtttccaattttattcatgacattttaagagacatct

SEQ ID NO: 418041 - DNA, 3190 bp, Homo sapiens
gggagggggaagggaattatggaaggaatccagctggcctgttagtaagggtgttccagtgctaggtggaggtggagtttggctgcctttggggagattggaagggtgaggaatagaggcctgatttctgagtgttgtttctgtgttggacaattctatgcaaactagagccaaaatggaagagggtgcaagtcccctcctggggccccagacgccccctcctttcttgctgcctggagcaggggcagtgctgttagtggctactcctggtgtgaacagcccatcctggccaccttccacaggaaacctgacctgaaggacagaagaggaaggaagcaggctttgccacaaatgtcagtgcagaactctggctggccccaccaagaagacagccccaagccccaggatccaggtccaccagccaactcagacagtgactcaggccacctgccgggggaggaccctgaggatacccatgctcagggtcctgcagttctgagcttgggttccctttgcctggacaccaaccaagcccccaactggactggacttcagaccctcctgcagcaactccctccgcaggacattgatgagcgctactgcctggcccttggggaggaggagcgggccgagctgcagctcttctgtgccaggcggaagcaggaagccctgggacagggggtagcccgcctggtacttcccaagcttgaaggacacacctgtgagaagtgtagggagttgctgaagccaggggagtacggagtgtttgcagcccgggcaggggaacagcgctgctggcaccagccttgctttgcctgccaggcctgtggccaggccctgataaacctcatctacttctaccatgatggacaactctactgcggccgtcatcatgcagagttgctgcgcccgcgctgcccggcttgtgaccagctgatcttctcctggcgctgcaccgaggcggagggacagcgctggcatgagaaccacttctgttgccaggactgcgccgggcctctgggcgggggacgttatgccctgcctgggggaagcccctgctgccccagctgcttcgagaaccgctactcggatgcaggctcgagctgggccggggcactggaagggcaggcattccttggagcgcccccaccgcaccccccagacccaagcctcggggcccgcagctctcaccgcgcatccctggccggagcgttccaagggccgcccgaacccaccccgcgccgcggtcggggttgcggcgccagactccctcccaggcgcgggaggcggacgccctctggtggaggcgggggaccctggcgaggactctcggcggcggcggcggcgcgcacggcccaggggctgggcggggcgggaggctgggcctcacccccactagctgcggtgtaggtccagctccgcggctctgagaccagcgtttccgacccggcccggaacaggggagactggactcgaccgaactgaaggaagggaccaaacctcggtgaactctgcaaccctctcccgaacactccttctcgctgctgccggcggttccagcctgcaaactcagagggggctgcctggatccagtccccagcaggagaaccgacctggggacaaagcggaggcacccaaagggcaggagcaatgccgcctggagactattcgtgatcccaaggacacccctttctccacctgctcctcctcctctgactcggaacctgaaggatttttcttaggcgagcgccttccccagtcctggaagacccccggaagcctccaagcagaggacagcaacgcctctaagacgcactgcaccatgtgctagtggcgcagctcagagaggggatgtgagtgggaggaaaggggtctgtaaagcgggagaacaaggctagcctccccctaacaatcctagactgagacgcagtcaggcgcacgcccgcaagaggcggcgaggtgacaagtttggagtgcgcccccttcagtactgcgcgttctaagacttttggcggagactttcttggcaaaacccattccccaaagctacgcttcccctgctgagatagcccctacccccacctccacaggctgggacagccccgtccccaccatcctcctcccaagccaattaaatgatcacagcacgcgtgacagttaccggctggagagccggaggtgggaccgggagcaggggaccgtagaaccgggccgcgctcctcccctcctagagttcgtggaggcgcagcagagggccgtccctcttccggatgtcggactaagcgaacagcgcccccactgccggccggtagcagccggaagtgccagaccggaggtgcgtcattcaccggcgacgccgatacggttcctccaccgaggcccatgcgaagctttccactatggcttccagcactgtcccggtgagcgctgctggctcggctaatgaaactcccgaaataccggacaacgtgggagattggcttcggggcgtctaccgctttgccactgataggaatgacttccggaggaacttgatactaaatttgggactctttgctgcgggagtttggctggccaggaacttgagtgacattgacctcatggcacctcagccaggggtgtagccaagtaggtaagcactgaactacacccatgcgtgtcttaggagacctagagactgggtgaagcaatgttttctgtcaagtattcatgaaatgtacaaaagaatgtgatgtaaaacccttaactattcctagttaaatgtgttttcagatgttgaaagggatttaagtatctcttaccagtttccctcccatacttttacagttctaatgccacctgtcgtcttatcatctgattgcagacaaatggaatcctgtgctgaacccgaatcttccaaaaaacagcctacaatctgtgaccaccacaagatgtgccctgatggcagctgaagtttgattcagatgggcacttttcttccccttccctgcctagtttccttttgttccttgagtccacgcagaattccattctctggtcagcagacaggcttaagctaaagtattgcctctattctgtaaagttctgtacatagttcccaagcttctgcagggggtgatttttgctcttgtcctgagaaataacagtgctgttttaaaaaacatttgaaataaataccgcacacaaaggc

SEQ ID NO: 418042 - DNA, 2917 bp, Homo sapiens
gggagggggaagggaattatggaaggaatccagctggcctgttagtaagggtgttccagtgctaggtggaggtggagtttggctgcctttggggagattggaagggtgaggaatagaggcctgatttctgagtgttgtttctgtgttggacaattctatgcaaactagagccaaaatggaagagggtgcaagtcccctcctggggccccagacgccccctcctttcttgctgcctggagcaggggcagtgctgttagtggctactcctggtgtgaacagcccatcctggccaccttccacaggaaacctgacctgaaggacagaagaggaaggaagcaggctttgccacaaatgtcagtgcagaactctggctggccccaccaagaagacagccccaagccccaggatccaggtccaccagccaactcagacagtgactcaggccacctgccgggggaggaccctgaggatacccatgctcagggtcctgcagttctgagcttgggttccctttgcctggacaccaaccaagcccccaactggactggacttcagaccctcctgcagcaactccctccgcaggacattgatgagcgctactgcctggcccttggggaggaggagcgggccgagctgcagctcttctgtgccaggcggaagcaggaagccctgggacagggggtagcccgcctggtacttcccaagcttgaaggacacacctgtgagaagtgtagggagttgctgaagccaggggagtacggagtgtttgcagcccgggcaggggaacagcgctgctggcaccagccttgctttgcctgccaggcctgtggccaggccctgataaacctcatctacttctaccatgatggacaactctactgcggccgtcatcatgcagagttgctgcgcccgcgctgcccggcttgtgaccagctgatcttctcctggcgctgcaccgaggcggagggacagcgctggcatgagaaccacttctgttgccaggactgcgccgggcctctgggcgggggacgttatgccctgcctgggggaagcccctgctgccccagctgcttcgagaaccgctactcggatgcaggctcgagctgggccggggcactggaagggcaggcattccttggagcgcccccaccgcaccccccagacccaagcctcggggcccgcagctctcaccgcgcatccctggccggagcgttccaagggccgcccgaacccaccccgcgccgcggtcggggttgcggcgccagactccctcccaggcgcgggaggcggacgccctctggtggaggcgggggaccctggcgaggactctcggcggcggcggcggcgcgcacggcccaggggctgggcggggcgggaggctgggcctcacccccactagctgcggtgtaggtccagctccgcggctctgagaccagcgtttccgacccggcccggaacaggggagactggactcgaccgaactgaaggaagggaccaaacctcggtgaactctgcaaccctctcccgaacactccttctcgctgctgccggcggttccagcctgcaaactcagagggggctgcctggatccagtccccagcaggagaaccgacctggggacaaagcggaggcacccaaagggcaggagcaatgccgcctggagactattcgtgatcccaaggacacccctttctccacctgctcctcctcctctgactcggaacctgaaggatttttcttaggcgagcgccttccccagtcctggaagacccccggaagcctccaagcagaggacagcaacgcctctaagacgcactgcaccatgtgctagtggcgcagctcagagaggggatgtgagtgggaggaaaggggtctgtaaagcgggagaacaaggctagcctccccctaacaatcctagactgagacgcagtcaggcgcacgcccgcaagaggcggcgaggtgacaagtttggagtgcgcccccttcagtactgcgcgttctaagacttttggcggagactttcttggcaaaacccattccccaaagctacgcttcccctgctgagatagcccctacccccacctccacaggctgggacagccccgtccccaccatcctcctcccaagccaattaaatgatcacagcacgcgtgacagttaccggctggagagccggaggtgggaccgggagcaggggaccgtagaaccgggccgcgctcctcccctcctagagttcgtggaggcgcagcagagggccgtccctcttccggatgtcggactaagcgaacagcgcccccactgccggccggtagcagccggaagtgccagaccggaggtgcgtcattcaccggcgacgccgatacggttcctccaccgaggcccatgcgaagctttccactatggcttccagcactgtcccggtgagcgctgctggctcggctaatgaaactcccgaaataccggacaacgtgggagattggcttcggggcgtctaccgctttgccactgataggaatgacttccggaggaacttgatactaaatttgggactctttgctgcgggagtttggctggccaggaacttgagtgacattgacctcatggcacctcagccaggggtgtagccaagtagttctaatgccacctgtcgtcttatcatctgattgcagacaaatggaatcctgtgctgaacccgaatcttccaaaaaacagcctacaatctgtgaccaccacaagatgtgccctgatggcagctgaagtttgattcagatgggcacttttcttccccttccctgcctagtttccttttgttccttgagtccactgattcattcttacccctttacatcctcgtagcaaagaccccaaaagagcaaagaccccaaaagagcaaagaccccaaaaggggtaccgagct

SEQ ID NO: 418043 - DNA, 485 bp, Homo sapiens
gcggaagcaggaagccctgggacagggggtagcccgcctggtacttcccaagcttgaaggacacacctgtgagaaggtatgtagcacccctccccccaaattccccttcctctattctttgccctctcatttctgcagaaggggctgggctagcttctgggattctggttgggaaacaggaaaaacagaaaccaagtttgcaagctcttggtataggttgcagtggatgtgggcttgctagggtatggcgagaacaggttgggatcggattgcaagagcaaggagggaagttaggatggtagtgcttactccgaccacctcagcacctcccctctgacagtgtagggagttgctgaagccaggggagtacggagtgtttgcagcccgggcaggggaacagcgctgctggcaccagccttgctttgcctgccaggcctgtggccaggccctgataaacctcatctacttctaccatgatggacaac

SEQ ID NO: 418044 - DNA, 2777 bp, Homo sapiens
atggttgttacgtatttattgagggtctacatgtgtccagcctaaaggcttacaattcaattggggaggcaagacaggagtatatgaaataatttgaggaaatgcaagaatgggaagtgatactgagctcttagctcattgggaacaaggacctaatggtgacagggctaagtgctgtgggcctgtcaggacctgattgatgacattcctagtggggcagggtgagactgaggtggctttcttgagctcctttccttttccatttcctcttctatgccattatctctggcatctccctgaggttctacaacctttctctgacccagcagccaagccctttttcctccaaccaatgctcaatgttttctgctggagctctcccagtaattgtagaggactgtttctgcaggagcgctactgcctggcccttggggaggaggagcgggccgagctgcagctcttctgtgccaggcggaagcaggaagccctgggacagggggtagcccgcctggtacttcccaagcttgaaggacacacctgtgagaagtgtagggagttgctgaagccaggggagtacggagtgtttgcagcccgggcaggggaacagcgctgctggcaccagccttgctttgcctgccaggcctgtggccaggccctgataaacctcatctacttctaccatgatggacaactctactgcggccgtcatcatgcagagttgctgcgcccgcgctgcccggcttgtgaccagctgatcttctcctggcgctgcaccgaggcggagggacagcgctggcatgagaaccacttctgttgccaggactgcgccgggcctctgggcgggggacgttatgccctgcctgggggaagcccctgctgccccagctgcttcgagaaccgctactcggatgcaggctcgagctgggccggggcactggaagggcaggcattccttggagcgcccccaccgcaccccccagacccaagcctcggggcccgcagctctcaccgcgcatccctggccggagcgttccaagggccgcccgaacccaccccgcgccgcggtcggggttgcggcgccagactccctcccaggcgcgggaggcggacgccctctggtggaggcgggggaccctggcgaggactctcggcggcggcggcggcgcgcacggcccaggggctgggcggggcgggaggctgggcctcacccccactagctgcggtgtaggtccagctccgcggctctgagaccagcgtttccgacccggcccggaacaggggagactggactcgaccgaactgaaggaagggaccaaacctcggtgaactctgcaaccctctcccgaacactccttctcgctgctgccggcggttccagcctgcaaactcagagggggctgcctggatccagtccccagcaggagaaccgacctggggacaaagcggaggcacccaaagggcaggagcaatgccgcctggagactattcgtgatcccaaggacacccctttctccacctgctcctcctcctctgactcggaacctgaaggatttttcttaggcgagcgccttccccagtcctggaagacccccggaagcctccaagcagaggacagcaacgcctctaagacgcactgcaccatgtgctagtggcgcagctcagagaggggatgtgagtgggaggaaaggggtctgtaaagcgggagaacaaggctagcctccccctaacaatcctagactgagacgcagtcaggcgcacgcccgcaagaggcggcgaggtgacaagtttggagtgcgcccccttcagtactgcgcgttctaagacttttggcggagactttcttggcaaaacccattccccaaagctacgcttcccctgctgagatagcccctacccccacctccacaggctgggacagccccgtccccaccatcctcctcccaagccaattaaatgatcacagcacgcgtgacagttaccggctggagagccggaggtgggaccgggagcaggggaccgtagaaccgggccgcgctcctcccctcctagagttcgtggaggcgcagcagagggccgtccctcttccggatgtcggactaagcgaacagcgcccccactgccggccggtagcagccggaagtgccagaccggaggtgcgtcattcaccggcgacgccgatacggttcctccaccgaggcccatgcgaagctttccactatggcttccagcactgtcccggtgagcgctgctggctcggctaatgaaactcccgaaataccggacaacgtgggagattggcttcggggcgtctaccgctttgccactgataggaatgacttccggaggaacttgatactaaatttgggactctttgctgcgggagtttggctggccaggaacttgagtgacattgacctcatggcacctcagccaggggtgtagccaagtagacaaatggaatcctgtgctgaacccgaatcttccaaaaaacagcctacaatctgtgaccaccacaagatgtgccctgatggcagctgaagtttgattcagatgggcacttttcttccccttccctgcctagtttccttttgttccttgagtccacgcagaattccattctctggtcagcagacaggcttaagctaaagtattgcctctattctgtaaagttctgtacatagttcccaagcttctgcagggggtgatttttgctcttgtcctgagaaataacagtgctgttttaaaaaacatttgaaataaataccgcacacaaaggc

SEQ ID NO: 418045 - DNA, 2776 bp, Homo sapiens
gggagggggaagggaattatggaaggaatccagctggcctgttagtaagggtgttccagtgctaggtggaggtggagtttggctgcctttggggagattggaagggtgaggaatagaggcctgatttctgagtgttgtttctgtgttggacaattctatgcaaactagagccaaaatggaagagggtgcaagtcccctcctggggccccagacgccccctcctttcttgctgcctggagcaggggcagtgctgttagtggctactcctggtgtgaacagcccatcctggccaccttccacaggaaacctgacctgaaggacagaagaggaaggaagcaggctttgccacaaatgtcagtgcagaactctggctggccccaccaagaagacagccccaagccccaggatccaggtccaccagccaactcagacagtgactcaggccacctgccgggggaggaccctgaggatacccatgctcagggtcctgcagttctgagcttgggttccctttgcctggacaccaaccaagcccccaactggactggacttcagaccctcctgcagcaactccctccgcaggacattgatgagcgctactgcctggcccttggggaggaggagcgggccgagctgcagctcttctgtgccaggcggaagcaggaagccctgggacagggggtagcccgcctggtacttcccaagcttgaaggacacacctgtgagaagtgtagggagttgctgaagccaggggagtacggagtgtttgcagcccgggcaggggaacagcgctgctggcaccagccttgctttgcctgccaggcctgtggccaggccctgataaacctcatctacttctaccatgatggacaactctactgcggccgtcatcatgcagagttgctgcgcccgcgctgcccggcttgtgaccagctgatcttctcctggcgctgcaccgaggcggagggacagcgctggcatgagaaccacttctgttgccaggactgcgccgggcctctgggcgggggacgttatgccctgcctgggggaagcccctgctgccccagctgcttcgagaaccgctactcggatgcaggctcgagctgggccggggcactggaagggcaggcattccttggagcgcccccaccgcaccccccagacccaagcctcggggcccgcagctctcaccgcgcatccctggccggagcgttccaagggccgcccgaacccaccccgcgccgcggtcggggttgcggcgccagactccctcccaggcgcgggaggcggacgccctctggtggaggcgggggaccctggcgaggactctcggcggcggcggcggcgcgcacggcccaggggctgggcggggcgggaggctgggcctcacccccactagctgcggtgtaggtccagctccgcggctctgagaccagcgtttccgacccggcccggaacaggggagactggactcgaccgaactgaaggaagggaccaaacctcggtgaactctgcaaccctctcccgaacactccttctcgctgctgccggcggttccagcctgcaaactcagagggggctgcctggatccagtccccagcaggagaaccgacctggggacaaagcggaggcacccaaagggcaggagcaatgccgcctggagactattcgtgatcccaaggacacccctttctccacctgctcctcctcctctgactcggaacctgaaggatttttcttaggcgagcgccttccccagtcctggaagacccccggaagcctccaagcagaggacagcaacgcctctaagacgcactgcaccatgtgctagtggcgcagctcagagaggggatgtgagtgggaggaaaggggtctgtaaagcgggagaacaaggctagcctccccctaacaatcctagactgagacgcagtcaggcgcacgcccgcaagaggcggcgaggtgacaagtttggagtgcgcccccttcagtactgcgcgttctaagacttttggcggagactttcttggcaaaacccattcccctcctagagttcgtggaggcgcagcagagggccgtccctcttccggatgtcggactaagcgaacagcgcccccactgccggccggtagcagccggaagtgccagaccggaggtgcgtcattcaccggcgacgccgatacggttcctccaccgaggcccatgcgaagctttccactatggcttccagcactgtcccggtgagcgctgctggctcggctaatgaaactcccgaaataccggacaacgtgggagattggcttcggggcgtctaccgctttgccactgataggaatgacttccggaggaacttgatactaaatttgggactctttgctgcgggagtttggctggccaggaacttgagtgacattgacctcatggcacctcagccaggggtgtagccaagtagacaaatggaatcctgtgctgaacccgaatcttccaaaaaacagcctacaatctgtgaccaccacaagatgtgccctgatggcagctgaagtttgattcagatgggcacttttcttccccttccctgcctagtttccttttgttccttgagtccacgcagaattccattctctggtcagcagacaggcttaagctaaagtattgcctctattctgtaaagttctgtacatagttcccaagcttctgcagggggtgatttttgctcttgtcctgagaaataacagtgctgttttaaaaaacatttgaaataaataccgcacacaaaggc

SEQ ID NO: 418046 - DNA, 4253 bp, Homo sapiens
acccccatttgtgtgactggattgggacacattacctgaatgagcaggtgaaagccatcaaagaattgggtgaccacgtgaccaacttgcgcaagatgggagcgcccgaatctggcttggcggaatatctctttgacaagcacaccctgggagacagtgataatgaaagctaagccgtggggctaatttccccatagccgtggggtgacttccctggtcaccaaggcagtgcatgcatgttggggtttcctttaccttttctataagttgtaccaaaacatccacttaagttctttgatttgtaccattccttcaaataaagaaatttggtacccaaaaaaaaaaaaaaaaaaaaaaaacagcactgtcccggtgagcgctgctggctcggctaatgaaactcccgaaataccggacaacgtgggagattggcttcggggcgtctaccgctttgccactgataggaatgacttccggaggaacttgatactaaatttgggactctttgctgcgggagtttggctggccaggaacttgagtgacattgacctcatggcacctcagccaggggtgtagccaagtagacaaatggaatcctgtgctgaacccgaatcttccaaaaaacagcctacaatctgtgaccaccacaagatgtgccctgatggcagctgaagtttgattcagatgggcacttttcttccccttccctgcctagtttccttttgttccttgagtccacgcagaattccattctctggtcagcagacaggcttaagctaaagtattgcctctattctgtaaagttctgtacatagttcccaagcttctgcagggggtgatttttgctcttgtcctgagaaataacagtgctgttttaaaaaacatttgaaataaataccgcacacaaaggcagtcattttattcttttaataagaaacttttgcttacaaaaacaaggtgtaaaaagatttacaaaaatcataaaaacatgatttatatttcacacttgagagacaaaaacaagccccaaaacatggattttaatggaggtggtttgcttcattttaaaagggaaaaaaaaaaaaggaagctgtaaccatacattgatgttaacctagcatgaagtttattcttgaagaatttacattgttgagcaatattaggggaagaagccatttggtgttgcatagcattttagtgcaccagatgggttttccagacaccagggaggcatcattgctggaatagtgaggtttggtggcagaaagagggcagtgatgtgtagggggaggcaaagtgaagtaagcctgggcagtggtcactaaagtgacactgctgaggcagctgcttccttcagaaggaaatgttttgtgaccctaaaattcatggtagtgctactgtccagggtttgggggctctttggaaatggagtatgtacggaactggcatgtatagacttatatagccatagaaagaggtggatagaaacaggtccaccatggcaatatttttttctggccagtttactaggcattaaaaaaaatactgcttttatgtgccaagtctcttatggaactagtatgggattaaaggacgttaattggaaaggagggtcagtatataaggaccacagtggcctgttaaggatgacagatgtctctagcagtttgttcactactaaagttaaacaggacaaaatagtctttcctgaccttgctggcataaatattaagaaaattgtttgagaattagatttttttagtatgtatataaaaacagcaccattctttgtataaatcagatagatcttatctgatagatgaagctaagaccctttgagtctacactgggttgactctgagaggtttatatcttattgggtattaagataaagaagggtcacatgagagcaaagcttagctttgaagccatcacctcccaaatggtgaccaaggaggaaacttttaagccatagtatagatgctaacccccatttagacctgcatcagatcacttgctaagacaagaaataccagcacctcctgttctttataggaatgaaacttagatccttaaaggctgctacctgatatactcatgactggacagttttgataaaaacttccaaaattgaaaatcaaaatccagcaagaattaagacatggcagcttccaaaagcataattcaaatttcattcaaaatttactgttttggcttcaagtaagtgtttactgttggttgggttttaaagccataattatggttgagtaaggattcatttatttatttattaaatttttatacatttttgaaaagatttcaaatctatgtttcccaggctggtcttgagctcctggcctcaagcaatcctcccaccttggcctcccaaagtgttgggattacaggtgctagccaactgcatccagccaatgtttcatttcaactggcttaaatcttcaaagtggttaagaatttagtaaataaaactacttaatctacaactttcaaaaattgatgagtaatcactaattctgtaaatgaaggagttggacttcactattgccaaagcaacattttccccaaggaaagtcaatttgatatcctgtcacacttttcagccctggctagttaacacagtactatgaaaatctttagctagattttaaacgaaatatgccagcagaagtatggaatgagtccacaaaaatgagtgcctgccacaatgctatagtagctatggtgtatttagtgcagagtgtgggatgaataagtacatagtaattaaagtcatagtcctggcccaacagaacagttactaaatgtaagatacaaactaaactcacagtcatatttagaaggcgcttttcagctttagcactgacttaaaaagtctgaaccaccaggaagatgcgtacttaactggttaaaaaattaagtggccctggaaagttttaccccaaagatacaacttcttcacttatttagttcagtaatgaggctgagggacccaattttcaagtgtgcatttgagtgggaaacttttaaacaccatatgttgaagtttcatgagctcagtggaaaccttaaggtcagagtaaaagaaactggctgtaaacagccctgcagtgaagagactgggtcttagcaccttccacattcactcagcgccatctcagtcagcgcctgccagggaaagggcatggagagctgggacgggtgccttctcttttgcaccactccctttgcatattacacagtgcactggcttgccttacaatctaaggttcacatacagggggttttctatactgcttccggacattttttgcaaaagaacatcagaaccaatgaaggtaccatttcaggaggaatcatttttgtttgacttctgctatatgttgcccagcattagtcattgttttgataaagactaaaaggccttttctcaacatttgtgctctcccaaccacctgggaaagcaacccttccactcacaagaggtaacctcagatagggatatagtattcatttaagaaggggtagcccccccagcctgatttaaaaaggcccaagtcaatgtatggaacatgacaagggaagtgaaaaacaatggagtacacagtctgccttgaaaagcagccatttgatgaacagtcacaaatacaaagaatttggacattgtaacataatttcagaacttgctggtaagaataatttgcattcacacacaagagacatgaaatgctttttaaaagtctgtgataccagatgtcctttaaacactacacagacccatttgccacttgaaatgacaagaagaaatcctttcccttaatcttttcaattccatgcaaaccgtaattgagtacaaggcaccaaattttatgaattgtataaaattagttcacaaagctttatcagtaagtagaacaaactccatttctccctcccggccagcccaccctcctcccacccaccacccgccatccccgaccaagttttcattctgcactactgtcgacctctctagggcttatgctggggcatgccccactgtcagccaatccacctcattggttcttcccttgtacttggatgaagctgtaagcacagccagagtagcaaactcatacaatcattgactctagaagccttgccattaaaaacaaaaataaactctgctattgagtccataggacacattaacacttctacagtttccaattttattcatgacattttaagagacatct

SEQ ID NO: 418047 - DNA, 3482 bp, Homo sapiens
gggagggggaagggaattatggaaggaatccagctggcctgttagtaagggtgttccagtgctaggtggaggtggagtttggctgcctttggggagattggaagggtgaggaatagaggcctgatttctgagtgttgtttctgtgttggacaattctatgcaaactagagccaaaatggaagagggtgcaagtcccctcctggggccccagacgccccctcctttcttgctgcctggagcaggggcagtgctgttagtggctactcctggtgtgaacagcccatcctggccaccttccacaggaaacctgacctgaaggacagaagaggaaggaagcaggctttgccacaaatgtcagtgcagaactctggctggccccaccaagaagacagccccaagccccaggatccaggtccaccagccaactcagacagtgactcaggccacctgccgggggaggaccctgaggatacccatgctcagggtcctgcagttctgagcttgggttccctttgcctggacaccaaccaagcccccaactggactggacttcagaccctcctgcagcaactccctccgcaggacattgatgagcgctactgcctggcccttggggaggaggagcgggccgagctgcagctcttctgtgccaggcggaagcaggaagccctgggacagggggtagcccgcctggtacttcccaagcttgaaggacacacctgtgagaagtgtagggagttgctgaagccaggggagtacggagtgtttgcagcccgggcaggggaacagcgctgctggcaccagccttgctttgcctgccaggcctgtggccaggccctgataaacctcatctacttctaccatgatggacaactctactgcggccgtcatcatgcagagttgctgcgcccgcgctgcccggcttgtgaccagctgatcttctcctggcgctgcaccgaggcggagggacagcgctggcatgagaaccacttctgttgccaggactgcgccgggcctctgggcgggggacgttatgccctgcctgggggaagcccctgctgccccagctgcttcgagaaccgctactcggatgcaggctcgagctgggccggggcactggaagggcaggcattccttggagcgcccccaccgcaccccccagacccaagcctcggggcccgcagctctcaccgcgcatccctggccggagcgttccaagggccgcccgaacccaccccgcgccgcggtcggggttgcggcgccagactccctcccaggcgcgggaggcggacgccctctggtggaggcgggggaccctggcgaggactctcggcggcggcggcggcgcgcacggcccaggggctgggcggggcgggaggctgggcctcacccccactagctgcggtgtaggtccagctccgcggctctgagaccagcgtttccgacccggcccggaacaggggagactggactcgaccgaactgaaggaagggaccaaacctcggtgaactctgcaaccctctcccgaacactccttctcgctgctgccggcggttccagcctgcaaactcagagggggctgcctggatccagtccccagcaggagaaccgacctggggacaaagcggaggcacccaaagggcaggagcaatgccgcctggagactattcgtgatcccaaggacacccctttctccacctgctcctcctcctctgactcggaacctgaaggatttttcttaggcgagcgccttccccagtcctggaagacccccggaagcctccaagcagaggacagcaacgcctctaagacgcactgcaccatgtgctagtggcgcagctcagagaggggatgtgagtgggaggaaaggggtctgtaaagcgggagaacaaggctagcctccccctaacaatcctagactgagacgcagtcaggcgcacgcccgcaagaggcggcgaggtgacaagtttggagtgcgcccccttcagtactgcgcgttctaagacttttggcggagactttcttggcaaaacccattccccaaagctacgcttcccctgctgagatagcccctacccccacctccacaggctgggacagccccgtccccaccatcctcctcccaagccaattaaatgatcacagcacgcgtgacagttaccggctggagagccggaggtgggaccgggagcaggggaccgtagaaccgggccgcgctcctcccctcctagagttcgtggaggcgcagcagagggccgtccctcttccggatgtcggactaagcgaacagcgcccccactgccggccggtagcagccggaagtgccagaccggaggtgcgtcattcaccggcgacgccgatacggttcctccaccgaggcccatgcgaagctttccactatggcttccagcactgtcccggtgagcgctgctggctcggctaatgaaactcccgaaataccggacaacgtgggagattggcttcggggcgtctaccgctttgccactgataggaatgacttccggaggaacttgatactaaatttgggactctttgctgcgggagtttggctggccaggaacttgagtgacattgacctcatggcacctcagccaggggtgtagccaagtagacaaatggaatcctgtgctgaacccgaatcttccaaaaaacagcctacaatctgtgaccaccacaagatgtgccctgatggcagctgaagtttgattcagatgggcacttttcttccccttccctgcctagtttccttttgttccttgagtccacgcagaattccattctctggtcagcagacaggcttaagctaaagtattgcctctattctgtaaagttctgtacatagttcccaagcttctgcagggggtgatttttgctcttgtcctgagaaataacagtgctgttttaaaaaacatttgaaataaataccgcacacaaaggcaaaaaaaaaaaaaaaaaaaaaaaaaaaaaaaaaaaaaaaaaaaaaaaaaaaaaaaaaaaaaaaaaaaaaaaaaaaaaaaaaaaaaaaaaaaaaaaaaaaaaaaaaaaaacaaaaaaaagaggggggggggggggcgacaatcccggcagggcgcgcacacacggacccatgggagcccaggcggcgcaccgagggaggagcataattaatacggcagaggagcgagcgacacgagaaagcaggaggaggggggggaggaccacgagcgagaagaaacaataaaaagagaaccaaccaccacacagaggcgtgaggaccacagctgagtcgggagtacaagcacaaaggagaggataaggacagtccgcgcagagccactaatacaccgtcgaagagaaggagagaggggggcaaaaaagacacagccattgatgcgcaaggatgcgaagaatgagaagccgcggacgaagaagaagaaagacgcaactcaagagagggcataagagcaggaaacgaccaggta

SEQ ID NO: 418048 - DNA, 3367 bp, Homo sapiens
  misc_feature (3331)..(3331): n is a, c, g, or t
  misc_feature (3344)..(3344): n is a, c, g, or t
gggagggggaagggaattatggaaggaatccagctggcctgttagtaagggtgttccagtgctaggtggaggtggagtttggctgcctttggggagattggaagggtgaggaatagaggcctgatttctgagtgttgtttctgtgttggacaattctatgcaaactagagccaaaatggaagagggtgcaagtcccctcctggggccccagacgccccctcctttcttgctgcctggagcaggggcagtgctgttagtggctactcctggtgtgaacagcccatcctggccaccttccacaggaaacctgacctgaaggacagaagaggaaggaagcaggctttgccacaaatgtcagtgcagaactctggctggccccaccaagaagacagccccaagccccaggatccaggtccaccagccaactcagacagtgactcaggccacctgccgggggaggaccctgaggatacccatgctcagggtcctgcagttctgagcttgggttccctttgcctggacaccaaccaagcccccaactggactggacttcagaccctcctgcagcaactccctccgcaggacattgatgagcgctactgcctggcccttggggaggaggagcgggccgagctgcagctcttctgtgccaggcggaagcaggaagccctgggacagggggtagcccgcctggtacttcccaagcttgaaggacacacctgtgagaagtgtagggagttgctgaagccaggggagtacggagtgtttgcagcccgggcaggggaacagcgctgctggcaccagccttgctttgcctgccaggcctgtggccaggccctgataaacctcatctacttctaccatgatggacaactctactgcggccgtcatcatgcagagttgctgcgcccgcgctgcccggcttgtgaccagctgatcttctcctggcgctgcaccgaggcggagggacagcgctggcatgagaaccacttctgttgccaggactgcgccgggcctctgggcgggggacgttatgccctgcctgggggaagcccctgctgccccagctgcttcgagaaccgctactcggatgcaggctcgagctgggccggggcactggaagggcaggcattccttggagcgcccccaccgcaccccccagacccaagcctcggggcccgcagctctcaccgcgcatccctggccggagcgttccaagggccgcccgaacccaccccgcgccgcggtcggggttgcggcgccagactccctcccaggcgcgggaggcggacgccctctggtggaggcgggggaccctggcgaggactctcggcggcggcggcggcgcgcacggcccaggggctgggcggggcgggaggctgggcctcacccccactagctgcggtgtaggtccagctccgcggctctgagaccagcgtttccgacccggcccggaacaggggagactggactcgaccgaactgaaggaagggaccaaacctcggtgaactctgcaaccctctcccgaacactccttctcgctgctgccggcggttccagcctgcaaactcagagggggctgcctggatccagtccccagcaggagaaccgacctggggacaaagcggaggcacccaaagggcaggagcaatgccgcctggagactattcgtgatcccaaggacacccctttctccacctgctcctcctcctctgactcggaacctgaaggatttttcttaggcgagcgccttccccagtcctggaagacccccggaagcctccaagcagaggacagcaacgcctctaagacgcactgcaccatgtgctagtggcgcagctcagagaggggatgtgagtgggaggaaaggggtctgtaaagcgggagaacaaggctagcctccccctaacaatcctagactgagacgcagtcaggcgcacgcccgcaagaggcggcgaggtgacaagtttggagtgcgcccccttcagtactgcgcgttctaagacttttggcggagactttcttggcaaaacccattccccaaagctacgcttcccctgctgagatagcccctacccccacctccacaggctgggacagccccgtccccaccatcctcctcccaagccaattaaatgatcacagcacgcgtgacagttaccggctggagagccggaggtgggaccgggagcaggggaccgtagaaccgggccgcgctcctcccctcctagagttcgtggaggcgcagcagagggccgtccctcttccggatgtcggactaagcgaacagcgcccccactgccggccggtagcagccggaagtgccagaccggaggtgcgtcattcaccggcgacgccgatacggttcctccaccgaggcccatgcgaagctttccactatggcttccagcactgtcccggtgagcgctgctggctcggctaatgaaactcccgaaataccggacaacgtgggagattggcttcggggcgtctaccgctttgccactgataggaatgacttccggaggaacttgatactaaatttgggactctttgctgcgggagtttggctggccaggaacttgagtgacattgacctcatggcacctcagccaggggtgtagccaagtagacaaatggaatcctgtgctgaacccgaatcttccaaaaaacagcctacaatctgtgaccaccacaagatgtgccctgatggcagctgaagtttgattcagatgggcacttttcttccccttccctgcctagtttccttttgttccttgagtccacgcagaattccattctctggtcagcagacaggcttaagctaaagtattgcctctattctgtaaagttctgtacatagttcccaagcttctgcagggggtgatttttgctcttgtcctgagaaataacagtgctgttttaaaaaacatttgaaataaataccgcacacaaaggcaaaaaaaaaacccgaggtttttttattggggggccccttggggaaaattttggggggggggggcccctcacagggggctcgggggccaggaagcgcgggaaaacacaaaccttgtgaaacaaaacgtaccgcgggagctgtcagggacgcgcatgacgcgcaaacccccgcggcgcggggggcgcgcggggcgtaacaacgtgccccaggggctagggacgtggaccacgggtgtgtacataggccgcagaccacgcggcattctgggggcggtcagcgccaagaaggcgcgggggcgcaccaccaaggcggaggagatgcaacgcgacggcagggtttcgccaacaggcagccgggcgggtcactctggcnacgaagcaaggcngacccggtggctccacacagggc

SEQ ID NO: 418049 - DNA, 6532 bp, Homo sapiens
gggagggggaagggaattatggaaggaatccagctggcctgttagtaagggtgttccagtgctaggtggaggtggagtttggctgcctttggggagattggaagggtgaggaatagaggcctgatttctgagtgttgtttctgtgttggacaattctatgcaaactagagccaaaatggaagagggtgcaagtcccctcctggggccccagacgccccctcctttcttgctgcctggagcaggggcagtgctgttagtggctactcctggtgtgaacagcccatcctggccaccttccacaggaaacctgacctgaaggacagaagaggaaggaagcaggctttgccacaaatgtcagtgcagaactctggctggccccaccaagaagacagccccaagccccaggatccaggtccaccagccaactcagacagtgactcaggccacctgccgggggaggaccctgaggatacccatgctcagggtcctgcagttctgagcttgggttccctttgcctggacaccaaccaagcccccaactggactggacttcagaccctcctgcagcaactccctccgcaggacattgatgagcgctactgcctggcccttggggaggaggagcgggccgagctgcagctcttctgtgccaggcggaagcaggaagccctgggacagggggtagcccgcctggtacttcccaagcttgaaggacacacctgtgagaagtgtagggagttgctgaagccaggggagtacggagtgtttgcagcccgggcaggggaacagcgctgctggcaccagccttgctttgcctgccaggcctgtggccaggccctgataaacctcatctacttctaccatgatggacaactctactgcggccgtcatcatgcagagttgctgcgcccgcgctgcccggcttgtgaccagctgatcttctcctggcgctgcaccgaggcggagggacagcgctggcatgagaaccacttctgttgccaggactgcgccgggcctctgggcgggggacgttatgccctgcctgggggaagcccctgctgccccagctgcttcgagaaccgctactcggatgcaggctcgagctgggccggggcactggaagggcaggcattccttggagcgcccccaccgcaccccccagacccaagcctcggggcccgcagctctcaccgcgcatccctggccggagcgttccaagggccgcccgaacccaccccgcgccgcggtcggggttgcggcgccagactccctcccaggcgcgggaggcggacgccctctggtggaggcgggggaccctggcgaggactctcggcggcggcggcggcgcgcacggcccaggggctgggcggggcgggaggctgggcctcacccccactagctgcggtgtaggtccagctccgcggctctgagaccagcgtttccgacccggcccggaacaggggagactggactcgaccgaactgaaggaagggaccaaacctcggtgaactctgcaaccctctcccgaacactccttctcgctgctgccggcggttccagcctgcaaactcagagggggctgcctggatccagtccccagcaggagaaccgacctggggacaaagcggaggcacccaaagggcaggagcaatgccgcctggagactattcgtgatcccaaggacacccctttctccacctgctcctcctcctctgactcggaacctgaaggatttttcttaggcgagcgccttccccagtcctggaagacccccggaagcctccaagcagaggacagcaacgcctctaagacgcactgcaccatgtgctagtggcgcagctcagagaggggatgtgagtgggaggaaaggggtctgtaaagcgggagaacaaggctagcctccccctaacaatcctagactgagacgcagtcaggcgcacgcccgcaagaggcggcgaggtgacaagtttggagtgcgcccccttcagtactgcgcgttctaagacttttggcggagactttcttggcaaaacccattccccaaagctacgcttcccctgctgagatagcccctacccccacctccacaggctgggacagccccgtccccaccatcctcctcccaagccaattaaatgatcacagcacgcgtgacagttaccggctggagagccggaggtgggaccgggagcaggggaccgtagaaccgggccgcgctcctcccctcctagagttcgtggaggcgcagcagagggccgtccctcttccggatgtcggactaagcgaacagcgcccccactgccggccggtagcagccggaagtgccagaccggaggtgcgtcattcaccggcgacgccgatacggttcctccaccgaggcccatgcgaagctttccactatggcttccagcactgtcccggtgagcgctgctggctcggctaatgaaactcccgaaataccggacaacgtgggagattggcttcggggcgtctaccgctttgccactgataggaatgacttccggaggaacttgatactaaatttgggactctttgctgcgggagtttggctggccaggaacttgagtgacattgacctcatggcacctcagccaggggtgtagccaagtaggtaagcactgaactacacccatgcgtgtcttaggagacctagagactgggtgaagcaatgttttctgtcaagtattcatgaaatgtacaaaagaatgtgatgtaaaacccttaactattcctagttaaatgtgttttcagatgttgaaagggatttaagtatctcttaccagtttccctcccatacttttacagttctaatgccacctgtcgtcttatcatctgattgcagacaaatggaatcctgtgctgaacccgaatcttccaaaaaacagcctacaatctgtgaccaccacaagatgtgccctgatggcagctgaagtttgattcagatgggcacttttcttccccttccctgcctagtttccttttgttccttgagtccacgcagaattccattctctggtcagcagacaggcttaagctaaagtattgcctctattctgtaaagttctgtacatagttcccaagcttctgcagggggtgatttttgctcttgtcctgagaaataacagtgctgttttaaaaaacatttgaaataaataccgcacacaaaggcagtcattttattcttttaataagaaacttttgcttacaaaaacaaggtgtaaaaagatttacaaaaatcataaaaacatgatttatatttcacacttgagagacaaaaacaagccccaaaacatggattttaatggaggtggtttgcttcattttaaaagggaaaaaaaaaaaaggaagctgtaaccatacattgatgttaacctagcatgaagtttattcttgaagaatttacattgttgagcaatattaggggaagaagccatttggtgttgcatagcattttagtgcaccagatgggttttccagacaccagggaggcatcattgctggaatagtgaggtttggtggcagaaagagggcagtgatgtgtagggggaggcaaagtgaagtaagcctgggcagtggtcactaaagtgacactgctgaggcagctgcttccttcagaaggaaatgttttgtgaccctaaaattcatggtagtgctactgtccagggtttgggggctctttggaaatggagtatgtacggaactggcatgtatagacttatatagccatagaaagaggtggatagaaacaggtccaccatggcaatatttttttctggccagtttactaggcattaaaaaaaatactgcttttatgtgccaagtctcttatggaactagtatgggattaaaggacgttaattggaaaggagggtcagtatataaggaccacagtggcctgttaaggatgacagatgtctctagcagtttgttcactactaaagttaaacaggacaaaatagtctttcctgaccttgctggcataaatattaagaaaattgtttgagaattagatttttttagtatgtatataaaaacagcaccattctttgtataaatcagatagatcttatctgatagatgaagctaagaccctttgagtctacactgggttgactctgagaggtttatatcttattgggtattaagataaagaagggtcacatgagagcaaagcttagctttgaagccatcacctcccaaatggtgaccaaggaggaaacttttaagccatagtatagatgctaacccccatttagacctgcatcagatcacttgctaagacaagaaataccagcacctcctgttctttataggaatgaaacttagatccttaaaggctgctacctgatatactcatgactggacagttttgataaaaacttccaaaattgaaaatcaaaatccagcaagaattaagacatggcagcttccaaaagcataattcaaatttcattcaaaatttactgttttggcttcaagtaagtgtttactgttggttgggttttaaagccataattatggttgagtaaggattcatttatttatttattaaatttttatacatttttgaaaagatttcaaatctatgtttcccaggctggtcttgagctcctggcctcaagcaatcctcccaccttggcctcccaaagtgttgggattacaggtgctagccaactgcatccagccaatgtttcatttcaactggcttaaatcttcaaagtggttaagaatttagtaaataaaactacttaatctacaactttcaaaaattgatgagtaatcactaattctgtaaatgaaggagttggacttcactattgccaaagcaacattttccccaaggaaagtcaatttgatatcctgtcacacttttcagccctggctagttaacacagtactatgaaaatctttagctagattttaaacgaaatatgccagcagaagtatggaatgagtccacaaaaatgagtgcctgccacaatgctatagtagctatggtgtatttagtgcagagtgtgggatgaataagtacatagtaattaaagtcatagtcctggcccaacagaacagttactaaatgtaagatacaaactaaactcacagtcatatttagaaggcgcttttcagctttagcactgacttaaaaagtctgaaccaccaggaagatgcgtacttaactggttaaaaaattaagtggccctggaaagttttaccccaaagatacaacttcttcacttatttagttcagtaatgaggctgagggacccaattttcaagtgtgcatttgagtgggaaacttttaaacaccatatgttgaagtttcatgagctcagtggaaaccttaaggtcagagtaaaagaaactggctgtaaacagccctgcagtgaagagactgggtcttagcaccttccacattcactcagcgccatctcagtcagcgcctgccagggaaagggcatggagagctgggacgggtgccttctcttttgcaccactccctttgcatattacacagtgcactggcttgccttacaatctaaggttcacatacagggggttttctatactgcttccggacattttttgcaaaagaacatcagaaccaatgaaggtaccatttcaggaggaatcatttttgtttgacttctgctatatgttgcccagcattagtcattgttttgataaagactaaaaggccttttctcaacatttgtgctctcccaaccacctgggaaagcaacccttccactcacaagaggtaacctcagatagggatatagtattcatttaagaaggggtagcccccccagcctgatttaaaaaggcccaagtcaatgtatggaacatgacaagggaagtgaaaaacaatggagtacacagtctgccttgaaaagcagccatttgatgaacagtcacaaatacaaagaatttggacattgtaacataatttcagaacttgctggtaagaataatttgcattcacacacaagagacatgaaatgctttttaaaagtctgtgataccagatgtcctttaaacactacacagacccatttgccacttgaaatgacaagaagaaatcctttcccttaatcttttcaattccatgcaaaccgtaattgagtacaaggcaccaaattttatgaattgtataaaattagttcacaaagctttatcagtaagtagaacaaactccatttctccctcccggccagcccaccctcctcccacccaccacccgccatccccgaccaagttttcattctgcactactgtcgacctctctagggcttatgctggggcatgccccactgtcagccaatccacctcattggttcttcccttgtacttggatgaagctgtaagcacagccagagtagcaaactcatacaatcattgactctagaagccttgccattaaaaacaaaaataaactctgctattgagtccataggacacattaacacttctacagtttccaattttattcatgacattttaagagacatct

SEQ ID NO: 418050 - DNA, 6284 bp, Homo sapiens
gggagggggaagggaattatggaaggaatccagctggcctgttagtaagggtgttccagtgctaggtggaggtggagtttggctgcctttggggagattggaagggtgaggaatagaggcctgatttctgagtgttgtttctgtgttggacaattctatgcaaactagagccaaaatggaagagggtgcaagtcccctcctggggccccagacgccccctcctttcttgctgcctggagcaggggcagtgctgttagtggctactcctggtgtgaacagcccatcctggccaccttccacaggaaacctgacctgaaggacagaagaggaaggaagcaggctttgccacaaatgtcagtgcagaactctggctggccccaccaagaagacagccccaagccccaggatccaggtccaccagccaactcagacagtgactcaggccacctgccgggggaggaccctgaggatacccatgctcagggtcctgcagttctgagcttgggttccctttgcctggacaccaaccaagcccccaactggactggacttcagaccctcctgcagcaactccctccgcaggacattgatgagcgctactgcctggcccttggggaggaggagcgggccgagctgcagctcttctgtgccaggcggaagcaggaagccctgggacagggggtagcccgcctggtacttcccaagcttgaaggacacacctgtgagaagtgtagggagttgctgaagccaggggagtacggagtgtttgcagcccgggcaggggaacagcgctgctggcaccagccttgctttgcctgccaggcctgtggccaggccctgataaacctcatctacttctaccatgatggacaactctactgcggccgtcatcatgcagagttgctgcgcccgcgctgcccggcttgtgaccagctgatcttctcctggcgctgcaccgaggcggagggacagcgctggcatgagaaccacttctgttgccaggactgcgccgggcctctgggcgggggacgttatgccctgcctgggggaagcccctgctgccccagctgcttcgagaaccgctactcggatgcaggctcgagctgggccggggcactggaagggcaggcattccttggagcgcccccaccgcaccccccagacccaagcctcggggcccgcagctctcaccgcgcatccctggccggagcgttccaagggccgcccgaacccaccccgcgccgcggtcggggttgcggcgccagactccctcccaggcgcgggaggcggacgccctctggtggaggcgggggaccctggcgaggactctcggcggcggcggcggcgcgcacggcccaggggctgggcggggcgggaggctgggcctcacccccactagctgcggtgtaggtccagctccgcggctctgagaccagcgtttccgacccggcccggaacaggggagactggactcgaccgaactgaaggaagggaccaaacctcggtgaactctgcaaccctctcccgaacactccttctcgctgctgccggcggttccagcctgcaaactcagagggggctgcctggatccagtccccagcaggagaaccgacctggggacaaagcggaggcacccaaagggcaggagcaatgccgcctggagactattcgtgatcccaaggacacccctttctccacctgctcctcctcctctgactcggaacctgaaggatttttcttaggcgagcgccttccccagtcctggaagacccccggaagcctccaagcagaggacagcaacgcctctaagacgcactgcaccatgtgctagtggcgcagctcagagaggggatgtgagtgggaggaaaggggtctgtaaagcgggagaacaaggctagcctccccctaacaatcctagactgagacgcagtcaggcgcacgcccgcaagaggcggcgaggtgacaagtttggagtgcgcccccttcagtactgcgcgttctaagacttttggcggagactttcttggcaaaacccattccccaaagctacgcttcccctgctgagatagcccctacccccacctccacaggctgggacagccccgtccccaccatcctcctcccaagccaattaaatgatcacagcacgcgtgacagttaccggctggagagccggaggtgggaccgggagcaggggaccgtagaaccgggccgcgctcctcccctcctagagttcgtggaggcgcagcagagggccgtccctcttccggatgtcggactaagcgaacagcgcccccactgccggccggtagcagccggaagtgccagaccggaggtgcgtcattcaccggcgacgccgatacggttcctccaccgaggcccatgcgaagctttccactatggcttccagcactgtcccggtgagcgctgctggctcggctaatgaaactcccgaaataccggacaacgtgggagattggcttcggggcgtctaccgctttgccactgataggaatgacttccggaggaacttgatactaaatttgggactctttgctgcgggagtttggctggccaggaacttgagtgacattgacctcatggcacctcagccaggggtgtagccaagtagttctaatgccacctgtcgtcttatcatctgattgcagacaaatggaatcctgtgctgaacccgaatcttccaatttgattcagatgggcacttttcttccccttccctgcctagtttccttttgttccttgagtccacgcagaattccattctctggtcagcagacaggcttaagctaaagtattgcctctattctgtaaagttctgtacatagttcccaagcttctgcagggggtgatttttgctcttgtcctgagaaataacagtgctgttttaaaaaacatttgaaataaataccgcacacaaaggcagtcattttattcttttaataagaaacttttgcttacaaaaacaaggtgtaaaaagatttacaaaaatcataaaaacatgatttatatttcacacttgagagacaaaaacaagccccaaaacatggattttaatggaggtggtttgcttcattttaaaagggaaaaaaaaaaaaggaagctgtaaccatacattgatgttaacctagcatgaagtttattcttgaagaatttacattgttgagcaatattaggggaagaagccatttggtgttgcatagcattttagtgcaccagatgggttttccagacaccagggaggcatcattgctggaatagtgaggtttggtggcagaaagagggcagtgatgtgtagggggaggcaaagtgaagtaagcctgggcagtggtcactaaagtgacactgctgaggcagctgcttccttcagaaggaaatgttttgtgaccctaaaattcatggtagtgctactgtccagggtttgggggctctttggaaatggagtatgtacggaactggcatgtatagacttatatagccatagaaagaggtggatagaaacaggtccaccatggcaatatttttttctggccagtttactaggcattaaaaaaaatactgcttttatgtgccaagtctcttatggaactagtatgggattaaaggacgttaattggaaaggagggtcagtatataaggaccacagtggcctgttaaggatgacagatgtctctagcagtttgttcactactaaagttaaacaggacaaaatagtctttcctgaccttgctggcataaatattaagaaaattgtttgagaattagatttttttagtatgtatataaaaacagcaccattctttgtataaatcagatagatcttatctgatagatgaagctaagaccctttgagtctacactgggttgactctgagaggtttatatcttattgggtattaagataaagaagggtcacatgagagcaaagcttagctttgaagccatcacctcccaaatggtgaccaaggaggaaacttttaagccatagtatagatgctaacccccatttagacctgcatcagatcacttgctaagacaagaaataccagcacctcctgttctttataggaatgaaacttagatccttaaaggctgctacctgatatactcatgactggacagttttgataaaaacttccaaaattgaaaatcaaaatccagcaagaattaagacatggcagcttccaaaagcataattcaaatttcattcaaaatttactgttttggcttcaagtaagtgtttactgttggttgggttttaaagccataattatggttgagtaaggattcatttatttatttattaaatttttatacatttttgaaaagatttcaaatctatgtttcccaggctggtcttgagctcctggcctcaagcaatcctcccaccttggcctcccaaagtgttgggattacaggtgctagccaactgcatccagccaatgtttcatttcaactggcttaaatcttcaaagtggttaagaatttagtaaataaaactacttaatctacaactttcaaaaattgatgagtaatcactaattctgtaaatgaaggagttggacttcactattgccaaagcaacattttccccaaggaaagtcaatttgatatcctgtcacacttttcagccctggctagttaacacagtactatgaaaatctttagctagattttaaacgaaatatgccagcagaagtatggaatgagtccacaaaaatgagtgcctgccacaatgctatagtagctatggtgtatttagtgcagagtgtgggatgaataagtacatagtaattaaagtcatagtcctggcccaacagaacagttactaaatgtaagatacaaactaaactcacagtcatatttagaaggcgcttttcagctttagcactgacttaaaaagtctgaaccaccaggaagatgcgtacttaactggttaaaaaattaagtggccctggaaagttttaccccaaagatacaacttcttcacttatttagttcagtaatgaggctgagggacccaattttcaagtgtgcatttgagtgggaaacttttaaacaccatatgttgaagtttcatgagctcagtggaaaccttaaggtcagagtaaaagaaactggctgtaaacagccctgcagtgaagagactgggtcttagcaccttccacattcactcagcgccatctcagtcagcgcctgccagggaaagggcatggagagctgggacgggtgccttctcttttgcaccactccctttgcatattacacagtgcactggcttgccttacaatctaaggttcacatacagggggttttctatactgcttccggacattttttgcaaaagaacatcagaaccaatgaaggtaccatttcaggaggaatcatttttgtttgacttctgctatatgttgcccagcattagtcattgttttgataaagactaaaaggccttttctcaacatttgtgctctcccaaccacctgggaaagcaacccttccactcacaagaggtaacctcagatagggatatagtattcatttaagaaggggtagcccccccagcctgatttaaaaaggcccaagtcaatgtatggaacatgacaagggaagtgaaaaacaatggagtacacagtctgccttgaaaagcagccatttgatgaacagtcacaaatacaaagaatttggacattgtaacataatttcagaacttgctggtaagaataatttgcattcacacacaagagacatgaaatgctttttaaaagtctgtgataccagatgtcctttaaacactacacagacccatttgccacttgaaatgacaagaagaaatcctttcccttaatcttttcaattccatgcaaaccgtaattgagtacaaggcaccaaattttatgaattgtataaaattagttcacaaagctttatcagtaagtagaacaaactccatttctccctcccggccagcccaccctcctcccacccaccacccgccatccccgaccaagttttcattctgcactactgtcgacctctctagggcttatgctggggcatgccccactgtcagccaatccacctcattggttcttcccttgtacttggatgaagctgtaagcacagccagagtagcaaactcatacaatcattgactctagaagccttgccattaaaaacaaaaataaactctgctattgagtccataggacacattaacacttctacagtttccaattttattcatgacattttaagagacatct

SEQ ID NO: 418051 - DNA, 3125 bp, Homo sapiens
gggagggggaagggaattatggaaggaatccagctggcctgttagtaagggtgttccagtgctaggtggaggtggagtttggctgcctttggggagattggaagggtgaggaatagaggcctgatttctgagtgttgtttctgtgttggacaattctatgcaaactagagccaaaatggaagagggtgcaagtcccctcctggggccccagacgccccctcctttcttgctgcctggagcaggggcagtgctgttagtggctactcctggtgtgaacagcccatcctggccaccttccacaggaaacctgacctgaaggacagaagaggaaggaagcaggctttgccacaaatgtcagtgcagaactctggctggccccaccaagaagacagccccaagccccaggatccaggtccaccagccaactcagacagtgactcaggccacctgccgggggaggaccctgaggatacccatgctcagggtcctgcagttctgagcttgggttccctttgcctggacaccaaccaagcccccaactggactggacttcagaccctcctgcagcaactccctccgcaggacattgatgagcgctactgcctggcccttggggaggaggagcgggccgagctgcagctcttctgtgccaggcggaagcaggaagccctgggacagggggtagcccgcctggtacttcccaagcttgaaggacacacctgtgagaagtgtagggagttgctgaagccaggggagtacggagtgtttgcagcccgggcaggggaacagcgctgctggcaccagccttgctttgcctgccaggcctgtggccaggccctgataaacctcatctacttctaccatgatggacaactctactgcggccgtcatcatgcagagttgctgcgcccgcgctgcccggcttgtgaccagctgatcttctcctggcgctgcaccgaggcggagggacagcgctggcatgagaaccacttctgttgccaggactgcgccgggcctctgggcgggggacgttatgccctgcctgggggaagcccctgctgccccagctgcttcgagaaccgctactcggatgcaggctcgagctgggccggggcactggaagggcaggcattccttggagcgcccccaccgcaccccccagacccaagcctcggggcccgcagctctcaccgcgcatccctggccggagcgttccaagggccgcccgaacccaccccgcgccgcggtcggggttgcggcgccagactccctcccaggcgcgggaggcggacgccctctggtggaggcgggggaccctggcgaggactctcggcggcggcggcggcgcgcacggcccaggggctgggcggggcgggaggctgggcctcacccccactagctgcggtgtaggtccagctccgcggctctgagaccagcgtttccgacccggcccggaacaggggagactggactcgaccgaactgaaggaagggaccaaacctcggtgaactctgcaaccctctcccgaacactccttctcgctgctgccggcggttccagcctgcaaactcagagggggctgcctggatccagtccccagcaggagaaccgacctggggacaaagcggaggcacccaaagggcaggagcaatgccgcctggagactattcgtgatcccaaggacacccctttctccacctgctcctcctcctctgactcggaacctgaaggatttttcttaggcgagcgccttccccagtcctggaagacccccggaagcctccaagcagaggacagcaacgcctctaagacgcactgcaccatgtgctagtggcgcagctcagagaggggatgtgagtgggaggaaaggggtctgtaaagcgggagaacaaggctagcctccccctaacaatcctagactgagacgcagtcaggcgcacgcccgcaagaggcggcgaggtgacaagtttggagtgcgcccccttcagtactgcgcgttctaagacttttggcggagactttcttggcaaaacccattccccaaagctacgcttcccctgctgagatagcccctacccccacctccacaggctgggacagccccgtccccaccatcctcctcccaagccaattaaatgatcacagcacgcgtgacagttaccggctggagagccggaggtgggaccgggagcaggggaccgtagaaccgggccgcgctcctcccctcctagagttcgtggaggcgcagcagagggccgtccctcttccggatgtcggactaagcgaacagcgcccccactgccggccggtagcagccggaagtgccagaccggaggtgcgtcattcaccggcgacgccgatacggttcctccaccgaggcccatgcgaagctttccactatggcttccagcactgtcccggtgagcgctgctggctcggctaatgaaactcccgaaataccggacaacgtgggagattggcttcggggcgtctaccgctttgccactgataggaatgacttccggaggaacttgatactaaatttgggactctttgctgcgggagtttggctggccaggaacttgagtgacattgacctcatggcacctcagccaggggtgtagccaagtagttctaatgccacctgtcgtcttatcatctgattgcagacaaatggaatcctgtgctgaacccgaatcttccaaaaaacagcctacaatctgtgaccaccacaagatgtgccctgatggcagctgaagtttgattcagatgggcacttttcttccccttccctgcctagtttccttttgttccttgagtccacgcagaattccattctctggtcagcagacaggcttaagctaaagtattgcctctattctgtaaagttctgtacatagttcccaagcttctgcagggggtgatttttgctcttgtcctgagaaataacagtgctgttttaaaaaacatttgaaataaataccgcacacaaaggcaaaaaaaaaaaaaaaaaacgccgaattgagctactttggcatcgccctatatggaggggattacaataatgggccgcggttaaaacccggggatgggcccgggggtcccacttgcttggggccctttgc

SEQ ID NO: 418052 - DNA, 2905 bp, Homo sapiens
gggagggggaagggaattatggaaggaatccagctggcctgttagtaagggtgttccagtgctaggtggaggtggagtttggctgcctttggggagattggaagggtgaggaatagaggcctgatttctgagtgttgtttctgtgttggacaattctatgcaaactagagccaaaatggaagagggtgcaagtcccctcctggggccccagacgccccctcctttcttgctgcctggagcaggggcagtgctgttagtggctactcctggtgtgaacagcccatcctggccaccttccacaggaaacctgacctgaaggacagaagaggaaggaagcaggctttgccacaaatgtcagtgcagaactctggctggccccaccaagaagacagccccaagccccaggatccaggtccaccagccaactcagacagtgactcaggccacctgccgggggaggaccctgaggatacccatgctcagggtcctgcagttctgagcttgggttccctttgcctggacaccaaccaagcccccaactggactggacttcagaccctcctgcagcaactccctccgcaggacattgatgagcgctactgcctggcccttggggaggaggagcgggccgagctgcagctcttctgtgccaggcggaagcaggaagccctgggacagggggtagcccgcctggtacttcccaagcttgaaggacacacctgtgagaagtgtagggagttgctgaagccaggggagtacggagtgtttgcagcccgggcaggggaacagcgctgctggcaccagccttgctttgcctgccaggcctgtggccaggccctgataaacctcatctacttctaccatgatggacaactctactgcggccgtcatcatgcagagttgctgcgcccgcgctgcccggcttgtgaccagctgatcttctcctggcgctgcaccgaggcggagggacagcgctggcatgagaaccacttctgttgccaggactgcgccgggcctctgggcgggggacgttatgccctgcctgggggaagcccctgctgccccagctgcttcgagaaccgctactcggatgcaggctcgagctgggccggggcactggaagggcaggcattccttggagcgcccccaccgcaccccccagacccaagcctcggggcccgcagctctcaccgcgcatccctggccggagcgttccaagggccgcccgaacccaccccgcgccgcggtcggggttgcggcgccagactccctcccaggcgcgggaggcggacgccctctggtggaggcgggggaccctggcgaggactctcggcggcggcggcggcgcgcacggcccaggggctgggcggggcgggaggctgggcctcacccccactagctgcggtgtaggtccagctccgcggctctgagaccagcgtttccgacccggcccggaacaggggagactggactcgaccgaactgaaggaagggaccaaacctcggtgaactctgcaaccctctcccgaacactccttctcgctgctgccggcggttccagcctgcaaactcagagggggctgcctggatccagtccccagcaggagaaccgacctggggacaaagcggaggcacccaaagggcaggagcaatgccgcctggagactattcgtgatcccaaggacacccctttctccacctgctcctcctcctctgactcggaacctgaaggatttttcttaggcgagcgccttccccagtcctggaagacccccggaagcctccaagcagaggacagcaacgcctctaagacgcactgcaccatgtgctagtggcgcagctcagagaggggatgtgagtgggaggaaaggggtctgtaaagcgggagaacaaggctagcctccccctaacaatcctagactgagacgcagtcaggcgcacgcccgcaagaggcggcgaggtgacaagtttggagtgcgcccccttcagtactgcgcgttctaagacttttggcggagactttcttggcaaaacccattccccaaagctacgcttcccctgctgagatagcccctacccccacctccacaggctgggacagccccgtccccaccatcctcctcccaagccaattaaatgatcacagcacgcgtgacagttaccggctggagagccggaggtgggaccgggagcaggggaccgtagaaccgggccgcgctcctcccctcctagagttcgtggaggcgcagcagagggccgtccctcttccggatgtcggactaagcgaacagcgcccccactgccggccggtagcagccggaagtgccagaccggaggtgcgtcattcaccggcgacgccgatacggttcctccaccgaggcccatgcgaagctttccactatggcttccagcactgtcccggtgagcgctgctggctcggctaatgaaactcccgaaataccggacaacgtgggagattggcttcggggcgtctaccgctttgccactgataggaatgacttccggaggaacttgatactaaatttgggactctttgctgcgggagtttggctggccaggaacttgagtgacattgacctcatggcacctcagccaggggtgtagccaagtagacaaatggaatcctgtgctgaacccgaatcttccaatttgattcagatgggcacttttcttccccttccctgcctagtttccttttgttccttgagtccacgcagaattccattctctggtcagcagacaggcttaagctaaagtattgcctctattctgtaaagttctgtacatagttcccaagcttctgcagggggtgatttttgctcttgtcctgagaaataacagtgctgttttaaaaaacatttgaaataaataccgcacacaaaggc

SEQ ID NO: 418053 - DNA, 3603 bp, Homo sapiens
  misc_feature (222)..(222): n is a, c, g, or t
agcccagtcgagtcctgcccggctagaagccggctgtcggtctccgtgtcgccgccgccgcccggcatcgtggagctggggcccccttttgcctgggagttttgtagtcgcctagggtcagcggtgacatcccaaagggcaggcccggcagccgccatggtggccaaggattaccccttctacctcacggtcaagagagcgaactgcagcctggagctaccnccggccagcggtccggccaaggacgctgaggagcctagtaataaacgggtcaaacccctttcccgagtcacgtcgctagcaaacctcatcccgcccgtgaaggccacgccattaaagcgcttcagtcaaaccctgcagcgctccattagcttccgcagtgagagccgccctgacatcctcgccccccgaccctggtccagaaatgccgccccctcgagcacgaaacggagagatagcaagctgtggagtgagaccttcgatgtgtgcgtcaatcagatgcttacatccaaggaaatcaaacgtcaggaggcgatctttgagctttcccaaggagaagaagacttgatagaagacttgaaattagcaaaaaaggcctatcatgaccccatgctgaaactctccataatgacagaacaagagttgaatcaaatttttggaacactggactctctaattcctctacatgaagagctccttagtcagcttcgagatgttaggaagcctgatggctcgactgaacatgttggtcccatcctcgtgggctggctcccttgcctcagctcctatgatagctactgcagcaatcaagtagccgccaaagctctgctggaccacaaaaagcaagatcaccgagtccaggatttcctacagcgatgtttagaatccccctttagccgcaaactagatctctggaatttcctcgatattccaagaagccgcctggtaaaataccctctgcttctccgagaaatcttgaggcacacaccaaatgataatccagatcagcagcacttggaagaagctataaatatcattcagggaattgtggcagaaatcaacaccaagactggtgaatctgaatgccgctattataaagagcggcttctttacttggaagaaggccagaaagactccctgatcgacagctctcgagtcttgtgttgtcatggtgaactgaagaacaatcggggcgtgaaactgcatgttttcctgttccaagaagtgcttgtgatcactcgagccgtcacccacaatgagcagctttgctaccagctgtaccgtcagccaatccccgtgaaagacctcctgctggaagacctccaggatggagaagtgaggctgggtggctccctgcgaggggcattcagcaacaatgagagaattaaaaacttcttcagagtcagtttcaaaaatggatcccaaagtcagacccactcgctacaagccaatgacactttcaacaaacagcagtggcttaactgtattcgtcaagccaaagaaacagttttgtgtgctgccgggcaagctggggtgcttgactccgagggatcgttcctaaatcccaccaccgggagcagagagctacagggagaaacaaaacttgagcagatggaccaatcggacagtgagtcagactgtagtatggacacgagtgaggtcagcctcgactgtgagcgcatggaacagacagactcttcctgtggaaacagcaggcacggtgaaagtaacgtctgacagaagcatgtgcacttcgggaagcaggcctgcatcttacctgtacagtatttgcattccacagatggaacggtttggagaagcactttttcatacttttgtgaaagtatacatgttggcccagtctctcgtatctgtacctttgtccctagtactgtaactgccaatctgtctgtgtaagctggaatctgtggcaactattaccctgtgttgtatttcccaagtgtctggatggatggagaggtactcaaacaagttactttcagttgtcctgctggattttaaaaaaatagaaaaagaatctcaaaactactgttttacatagattgtttgaagagtccttcctcttgtgcttctgtaccactttcccagctcttagatgtggtagctaaaggcacggaatttagacggccttgtaaatagggcatgaggaactcatctgtgtattgggatggtattagagagagaatcaggaaagaccaactcatgaagtgaacttggtttgatcttactcaactagaaagcttgaaaacatccctggggattctgaaggcttaattttgcaaaggaggatgcattgtctgaactttgcaacttcatccagtgcaagtttgatgcaagaatgtattaggacataaaatagaggctgaccttaaaagggccaggacagaagcggctgccagctctgaatctttaactgaaatgcacatggcaccaggaggtgtctctcatagttggttgctagcctaaaacatcagaatagaacccaaagggcttaggaaggcctgccaggataacaagaaggccctgtattcattgtgtttcatctgcctaggcctactcattattttagagaatgaatgaagcaacaaggaagagagaccatgactctatcgatgacactgtttatagaaacacaggagaggaagaatttggaatgaaaagcacttcgtcagaaccttctgtgggagccattgagagaaaagcatggtccagtgccttctgagaaaggccagagctttgggctttcctgctctgcttttgggtcgtcaatttgccatctctggttctgtgctataatcagaattgtaattatgttctccagaggccaatttcattaactctgattaattagaatcagctagccagattagtaacctctttgtccagccttgatttacagtgcagggtaaagtgcagaccttaaaaacagctaagtacctagaagagctccctgcaagtgtaaatattaaggatgacctgtgcaaaattatacccacaccagcactagtggtaattattctaaattattgccaaaaagttttttttaatctgtctttcaagtttacagaaaagaaagcagtaaatgcattgatgtcattttattatgtacatatatcatgtgcattcaagctgtgtgacaagatatatcaatataaaaacaaggtatatactttattattttttgaaaacaaggatattgtgatcaattttaccctgtaaaacatatttctgtatttataggtcttaaacatgatgaattttttctattacaagtttatttaaaactgctttctcaagtcgttattgatacagcaagtgaacctgctgcagacagaagcagaggaaagccaagaacagcctttattggtgaagaaaagaatgaatgattctttgtaggcgccatcagccacttttagaagccatcagccagtgtgttgggaaaagaggtttgtcaagtgttggcctatgggaaggtggtcaatgaatgttttgatgaaatgaatgtttttgtataatggccttaaacttttctggaagtatttcaaataaattacattattaagtcatcctccatgtgtacag

SEQ ID NO: 418054 - DNA, 801 bp, Homo sapiens
agcgggttttttccagcctggagaggccgaaccagcgcgggggtcgaggagacctgagcctgccatactgagtctatggacagttccacagcaatgaatcaatgcagctgtagaggaatggaagaaaacaaggaaaggcctaaacggcagcggcaaaacaactttcccatgtttccctctcctaaagcctggaatttcagagggcgaaaacggaaacagagcacccaagatgaagatgctgttagcctttgcagtctcgacataagtgagcctagtaataaacgggtcaaacccctttcccgagtcacgtcgctagcaaacctcatcccgcccgtgaaggccacgccattaaagcgcttcagtcaaaccctgcagcgctccattagcttccgcagtgagagccgccctgacatcctcgccccccgaccctggtccagaaatgccgccccctcgagcacgaaacggagagatagcaagctgtggagtgagaccttcgatgtgtgcgtcaatcagatgcttacatccaaggaaatcaaacgtcaggaggcgatctttgagctttcccaaggagaagaagacttgatagaagacttgaaattagcaaaaaaggcctatcatgaccccatgctgaaactctccataatgacagaacaagagttgaatcaaatttttggaacactggactctctaattcctctacatgaagagctccttagtcagcttcgagatgttaggaagcctgatggctcgactgaacatgttggtcccatcctcgtgggctgggtaagaaagttctctggt

SEQ ID NO: 418055 - DNA, 451 bp, Homo sapiens
  misc_feature (222)..(222): n is a, c, g, or t
agcccagtcgagtcctgcccggctagaagccggctgtcggtctccgtgtcgccgccgccgcccggcatcgtggagctggggcccccttttgcctgggagttttgtagtcgcctagggtcagcggtgacatcccaaagggcaggcccggcagccgccatggtggccaaggattaccccttctacctcacggtcaagagagcgaactgcagcctggagctaccnccggccagcggtccggccaaggacgctgaggtagggccgcgccctgcacctggacctctatgggtcatctgcctgtctcgtctgcctccatctcccattctcggcgcccgtccagtgtcactgtctctgtttccatctctcactctccgtgtgtgccactttctctctctacatctctcccacagtcttctttgtgtctccccgtcgccatctctcaccctgtctcctt

SEQ ID NO: 418056 - DNA, 3791 bp, Homo sapiens
accatagtaacaatgggggagaaggggcagtttctagaaggagaaggaggcactggagcagatacaaataattcctgcctacaaaattcttccctatctgtcctcctatcataaaagtgtcagctttcatgactgacgatgcatctacaaggactggagttgaacttcaagcaagagactcacagacaaaggcgccctgggccagtggcacacactagctttatcaaagagactcagggacaagtacgcctggtctgtactgcggtttgccaattagctggatgaacagctggctaatttctgttttatctcttgggcagaagacacatgaggctagaataggttatcttcaacggggagccgagctaaggcctcatcgaaaacggaaacagagcacccaagatgaagatgctgttagcctttgcagtctcgacataagtgagcctagtaataaacgggtcaaacccctttcccgagtcacgtcgctagcaaacctcatcccgcccgtgaaggccacgccattaaagcgcttcagtcaaaccctgcagcgctccattagcttccgcagtgagagccgccctgacatcctcgccccccgaccctggtccagaaatgccgccccctcgagcacgaaacggagagatagcaagctgtggagtgagaccttcgatgtgtgcgtcaatcagatgcttacatccaaggaaatcaaacgtcaggaggcgatctttgagctttcccaaggagaagaagacttgatagaagacttgaaattagcaaaaaaggcctatcatgaccccatgctgaaactctccataatgacagaacaagagttgaatcaaatttttggaacactggactctctaattcctctacatgaagagctccttagtcagcttcgagatgttaggaagcctgatggctcgactgaacatgttggtcccatcctcgtgggctggctcccttgcctcagctcctatgatagctactgcagcaatcaagtagccgccaaagctctgctggaccacaaaaagcaagatcaccgagtccaggatttcctacagcgatgtttagaatccccctttagccgcaaactagatctctggaatttcctcgatattccaagaagccgcctggtaaaataccctctgcttctccgagaaatcttgaggcacacaccaaatgataatccagatcagcagcacttggaagaagctataaatatcattcagggaattgtggcagaaatcaacaccaagactggtgaatctgaatgccgctattataaagagcggcttctttacttggaagaaggccagaaagactccctgatcgacagctctcgagtcttgtgttgtcatggtgaactgaagaacaatcggggcgtgaaactgcatgttttcctgttccaagaagtgcttgtgatcactcgagccgtcacccacaatgagcagctttgctaccagctgtaccgtcagccaatccccgtgaaagacctcctgctggaagacctccaggatggagaagtgaggctgggtggctccctgcgaggggcattcagcaacaatgagagaattaaaaacttcttcagagtcagtttcaaaaatggatcccaaagtcagacccactcgctacaagccaatgacactttcaacaaacagcagtggcttaactgtattcgtcaagccaaagaaacagttttgtgtgctgccgggcaagctggggtgcttgactccgagggatcgttcctaaatcccaccaccgggagcagagagctacagggagaaacaaaacttgagcagatggaccaatcggacagtgagtcagactgtagtatggacacgagtgaggtcagcctcgactgtgagcgcatggaacagacagactcttcctgtggaaacagcaggcacggtgaaagtaacgtctgacagaagcatgtgcacttcgggaagcaggcctgcatcttacctgtacagtatttgcattccacagatggaacggtttggagaagcactttttcatacttttgtgaaagtatacatgttggcccagtctctcgtatctgtacctttgtccctagtactgtaactgccaatctgtctgtgtaagctggaatctgtggcaactattaccctgtgttgtatttcccaagtgtctggatggatggagaggtactcaaacaagttactttcagttgtcctgctggattttaaaaaaatagaaaaagaatctcaaaactactgttttacatagattgtttgaagagtccttcctcttgtgcttctgtaccactttcccagctcttagatgtggtagctaaaggcacggaatttagacggccttgtaaatagggcatgaggaactcatctgtgtattgggatggtattagagagagaatcaggaaagaccaactcatgaagtgaacttggtttgatcttactcaactagaaagcttgaaaacatccctggggattctgaaggcttaattttgcaaaggaggatgcattgtctgaactttgcaacttcatccagtgcaagtttgatgcaagaatgtattaggacataaaatagaggctgaccttaaaagggccaggacagaagcggctgccagctctgaatctttaactgaaatgcacatggcaccaggaggtgtctctcatagttggttgctagcctaaaacatcagaatagaacccaaagggcttaggaaggcctgccaggataacaagaaggccctgtattcattgtgtttcatctgcctaggcctactcattattttagagaatgaatgaagcaacaaggaagagagaccatgactctatcgatgacactgtttatagaaacacaggagaggaagaatttggaatgaaaagcacttcgtcagaaccttctgtgggagccattgagagaaaagcatggtccagtgccttctgagaaaggccagagctttgggctttcctgctctgcttttgggtcgtcaatttgccatctctggttctgtgctataatcagaattgtaattatgttctccagaggccaatttcattaactctgattaattagaatcagctagccagattagtaacctctttgtccagccttgatttacagtgcagggtaaagtgcagaccttaaaaacagctaagtacctagaagagctccctgcaagtgtaaatattaaggatgacctgtgcaaaattatacccacaccagcactagtggtaattattctaaattattgccaaaaagttttttttaatctgtctttcaagtttacagaaaagaaagcagtaaatgcattgatgtcattttattatgtacatatatcatgtgcattcaagctgtgtgacaagatatatcaatataaaaacaaggtatatactttattattttttgaaaacaaggatattgtgatcaattttaccctgtaaaacatatttctgtatttataggtcttaaacatgatgaattttttctattacaagtttatttaaaactgctttctcaagtcgttattgatacagcaagtgaacctgctgcagacagaagcagaggaaagccaagaacagcctttattggtgaagaaaagaatgaatgattctttgtaggcgccatcagccacttttagaagccatcagccagtgtgttgggaaaagaggtttgtcaagtgttggcctatgggaaggtggtcaatgaatgttttgatgaaatgaatgtttttgtataatggccttaaacttttctggaagtatttcaaataaattacattattaagtcatcctccatgtgtacag

SEQ ID NO: 418057 - DNA, 3725 bp, Homo sapiens
cacccgaggtcagcgtcgcgtcgggcgctgctggtggcggctcacagggccgcgggtcacttcgcggcgggggagccgggctcagggcgctccgggcggcgggcgccgtcccagcctgcatgaggcccttgtcccggcggctgcatcttgtaaaccgagcagccagaaaatcccgagataggacaccagggtggaggacgccaaggggttaaggtcagcgtgggtgcctcgcagccagagacgggcctaaacggcagcggcaaaacaactttcccatgtttccctctcctaaagcctggaatttcagagggcgaaaacggaaacagagcacccaagatgaagatgctgttagcctttgcagtctcgacataagtgagcctagtaataaacgggtcaaacccctttcccgagtcacgtcgctagcaaacctcatcccgcccgtgaaggccacgccattaaagcgcttcagtcaaaccctgcagcgctccattagcttccgcagtgagagccgccctgacatcctcgccccccgaccctggtccagaaatgccgccccctcgagcacgaaacggagagatagcaagctgtggagtgagaccttcgatgtgtgcgtcaatcagatgcttacatccaaggaaatcaaacgtcaggaggcgatctttgagctttcccaaggagaagaagacttgatagaagacttgaaattagcaaaaaaggcctatcatgaccccatgctgaaactctccataatgacagaacaagagttgaatcaaatttttggaacactggactctctaattcctctacatgaagagctccttagtcagcttcgagatgttaggaagcctgatggctcgactgaacatgttggtcccatcctcgtgggctggctcccttgcctcagctcctatgatagctactgcagcaatcaagtagccgccaaagctctgctggaccacaaaaagcaagatcaccgagtccaggatttcctacagcgatgtttagaatccccctttagccgcaaactagatctctggaatttcctcgatattccaagaagccgcctggtaaaataccctctgcttctccgagaaatcttgaggcacacaccaaatgataatccagatcagcagcacttggaagaagctataaatatcattcagggaattgtggcagaaatcaacaccaagactggtgaatctgaatgccgctattataaagagcggcttctttacttggaagaaggccagaaagactccctgatcgacagctctcgagtcttgtgttgtcatggtgaactgaagaacaatcggggcgtgaaactgcatgttttcctgttccaagaagtgcttgtgatcactcgagccgtcacccacaatgagcagctttgctaccagctgtaccgtcagccaatccccgtgaaagacctcctgctggaagacctccaggatggagaagtgaggctgggtggctccctgcgaggggcattcagcaacaatgagagaattaaaaacttcttcagagtcagtttcaaaaatggatcccaaagtcagacccactcgctacaagccaatgacactttcaacaaacagcagtggcttaactgtattcgtcaagccaaagaaacagttttgtgtgctgccgggcaagctggggtgcttgactccgagggatcgttcctaaatcccaccaccgggagcagagagctacagggagaaacaaaacttgagcagatggaccaatcggacagtgagtcagactgtagtatggacacgagtgaggtcagcctcgactgtgagcgcatggaacagacagactcttcctgtggaaacagcaggcacggtgaaagtaacgtctgacagaagcatgtgcacttcgggaagcaggcctgcatcttacctgtacagtatttgcattccacagatggaacggtttggagaagcactttttcatacttttgtgaaagtatacatgttggcccagtctctcgtatctgtacctttgtccctagtactgtaactgccaatctgtctgtgtaagctggaatctgtggcaactattaccctgtgttgtatttcccaagtgtctggatggatggagaggtactcaaacaagttactttcagttgtcctgctggattttaaaaaaatagaaaaagaatctcaaaactactgttttacatagattgtttgaagagtccttcctcttgtgcttctgtaccactttcccagctcttagatgtggtagctaaaggcacggaatttagacggccttgtaaatagggcatgaggaactcatctgtgtattgggatggtattagagagagaatcaggaaagaccaactcatgaagtgaacttggtttgatcttactcaactagaaagcttgaaaacatccctggggattctgaaggcttaattttgcaaaggaggatgcattgtctgaactttgcaacttcatccagtgcaagtttgatgcaagaatgtattaggacataaaatagaggctgaccttaaaagggccaggacagaagcggctgccagctctgaatctttaactgaaatgcacatggcaccaggaggtgtctctcatagttggttgctagcctaaaacatcagaatagaacccaaagggcttaggaaggcctgccaggataacaagaaggccctgtattcattgtgtttcatctgcctaggcctactcattattttagagaatgaatgaagcaacaaggaagagagaccatgactctatcgatgacactgtttatagaaacacaggagaggaagaatttggaatgaaaagcacttcgtcagaaccttctgtgggagccattgagagaaaagcatggtccagtgccttctgagaaaggccagagctttgggctttcctgctctgcttttgggtcgtcaatttgccatctctggttctgtgctataatcagaattgtaattatgttctccagaggccaatttcattaactctgattaattagaatcagctagccagattagtaacctctttgtccagccttgatttacagtgcagggtaaagtgcagaccttaaaaacagctaagtacctagaagagctccctgcaagtgtaaatattaaggatgacctgtgcaaaattatacccacaccagcactagtggtaattattctaaattattgccaaaaagttttttttaatctgtctttcaagtttacagaaaagaaagcagtaaatgcattgatgtcattttattatgtacatatatcatgtgcattcaagctgtgtgacaagatatatcaatataaaaacaaggtatatactttattattttttgaaaacaaggatattgtgatcaattttaccctgtaaaacatatttctgtatttataggtcttaaacatgatgaattttttctattacaagtttatttaaaactgctttctcaagtcgttattgatacagcaagtgaacctgctgcagacagaagcagaggaaagccaagaacagcctttattggtgaagaaaagaatgaatgattctttgtaggcgccatcagccacttttagaagccatcagccagtgtgttgggaaaagaggtttgtcaagtgttggcctatgggaaggtggtcaatgaatgttttgatgaaatgaatgtttttgtataatggccttaaacttttctggaagtatttcaaataaattacattattaagtcatcctccatgtgtacag

SEQ ID NO: 418058 - DNA, 3618 bp, Homo sapiens
agcgggttttttccagcctggagaggccgaaccagcgcgggggtcgaggagacctgagcctgccatactgagtctatggacagttccacagcaatgaatcaatgcagctgtagaggaatggaagaaaacaaggaaaggcctaaacggcagcggcaaaacaactttcccatgtttccctctcctaaagcctggaatttcagagggcgaaaacggaaacagagcacccaagatgaagatgctgttagcctttgcagtctcgacataagtgagcctagtaataaacgggtcaaacccctttcccgagtcacgtcgctagcaaacctcatcccgcccgtgaaggccacgccattaaagcgcttcagtcaaaccctgcagcgctccattagcttccgcagtgagagccgccctgacatcctcgccccccgaccctggtccagaaatgccgccccctcgagcacgaaacggagagatagcaagctgtggagtgagaccttcgatgtgtgcgtcaatcagatgcttacatccaaggaaatcaaacgtcaggaggcgatctttgagctttcccaaggagaagaagacttgatagaagacttgaaattagcaaaaaaggcctatcatgaccccatgctgaaactctccataatgacagaacaagagttgaatcaaatttttggaacactggactctctaattcctctacatgaagagctccttagtcagcttcgagatgttaggaagcctgatggctcgactgaacatgttggtcccatcctcgtgggctggctcccttgcctcagctcctatgatagctactgcagcaatcaagtagccgccaaagctctgctggaccacaaaaagcaagatcaccgagtccaggatttcctacagcgatgtttagaatccccctttagccgcaaactagatctctggaatttcctcgatattccaagaagccgcctggtaaaataccctctgcttctccgagaaatcttgaggcacacaccaaatgataatccagatcagcagcacttggaagaagctataaatatcattcagggaattgtggcagaaatcaacaccaagactggtgaatctgaatgccgctattataaagagcggcttctttacttggaagaaggccagaaagactccctgatcgacagctctcgagtcttgtgttgtcatggtgaactgaagaacaatcggggcgtgaaactgcatgttttcctgttccaagaagtgcttgtgatcactcgagccgtcacccacaatgagcagctttgctaccagctgtaccgtcagccaatccccgtgaaagacctcctgctggaagacctccaggatggagaagtgaggctgggtggctccctgcgaggggcattcagcaacaatgagagaattaaaaacttcttcagagtcagtttcaaaaatggatcccaaagtcagacccactcgctacaagccaatgacactttcaacaaacagcagtggcttaactgtattcgtcaagccaaagaaacagttttgtgtgctgccgggcaagctggggtgcttgactccgagggatcgttcctaaatcccaccaccgggagcagagagctacagggagaaacaaaacttgagcagatggaccaatcggacagtgagtcagactgtagtatggacacgagtgaggtcagcctcgactgtgagcgcatggaacagacagactcttcctgtggaaacagcaggcacggtgaaagtaacgtctgacagaagcatgtgcacttcgggaagcaggcctgcatcttacctgtacagtatttgcattccacagatggaacggtttggagaagcactttttcatacttttgtgaaagtatacatgttggcccagtctctcgtatctgtacctttgtccctagtactgtaactgccaatctgtctgtgtaagctggaatctgtggcaactattaccctgtgttgtatttcccaagtgtctggatggatggagaggtactcaaacaagttactttcagttgtcctgctggattttaaaaaaatagaaaaagaatctcaaaactactgttttacatagattgtttgaagagtccttcctcttgtgcttctgtaccactttcccagctcttagatgtggtagctaaaggcacggaatttagacggccttgtaaatagggcatgaggaactcatctgtgtattgggatggtattagagagagaatcaggaaagaccaactcatgaagtgaacttggtttgatcttactcaactagaaagcttgaaaacatccctggggattctgaaggcttaattttgcaaaggaggatgcattgtctgaactttgcaacttcatccagtgcaagtttgatgcaagaatgtattaggacataaaatagaggctgaccttaaaagggccaggacagaagcggctgccagctctgaatctttaactgaaatgcacatggcaccaggaggtgtctctcatagttggttgctagcctaaaacatcagaatagaacccaaagggcttaggaaggcctgccaggataacaagaaggccctgtattcattgtgtttcatctgcctaggcctactcattattttagagaatgaatgaagcaacaaggaagagagaccatgactctatcgatgacactgtttatagaaacacaggagaggaagaatttggaatgaaaagcacttcgtcagaaccttctgtgggagccattgagagaaaagcatggtccagtgccttctgagaaaggccagagctttgggctttcctgctctgcttttgggtcgtcaatttgccatctctggttctgtgctataatcagaattgtaattatgttctccagaggccaatttcattaactctgattaattagaatcagctagccagattagtaacctctttgtccagccttgatttacagtgcagggtaaagtgcagaccttaaaaacagctaagtacctagaagagctccctgcaagtgtaaatattaaggatgacctgtgcaaaattatacccacaccagcactagtggtaattattctaaattattgccaaaaagttttttttaatctgtctttcaagtttacagaaaagaaagcagtaaatgcattgatgtcattttattatgtacatatatcatgtgcattcaagctgtgtgacaagatatatcaatataaaaacaaggtatatactttattattttttgaaaacaaggatattgtgatcaattttaccctgtaaaacatatttctgtatttataggtcttaaacatgatgaattttttctattacaagtttatttaaaactgctttctcaagtcgttattgatacagcaagtgaacctgctgcagacagaagcagaggaaagccaagaacagcctttattggtgaagaaaagaatgaatgattctttgtaggcgccatcagccacttttagaagccatcagccagtgtgttgggaaaagaggtttgtcaagtgttggcctatgggaaggtggtcaatgaatgttttgatgaaatgaatgtttttgtataatggccttaaacttttctggaagtatttcaaataaattacattattaagtcatcctccatgtgtacag

SEQ ID NO: 418059 - DNA, 3531 bp, Homo sapiens
accatagtaacaatgggggagaaggggcagtttctagaaggagaaggaggcactggagcagatacaaataattcctgcctacaaaattcttccctatctgtcctcctatcataaaagcgaaaacggaaacagagcacccaagatgaagatgctgttagcctttgcagtctcgacataagtgagcctagtaataaacgggtcaaacccctttcccgagtcacgtcgctagcaaacctcatcccgcccgtgaaggccacgccattaaagcgcttcagtcaaaccctgcagcgctccattagcttccgcagtgagagccgccctgacatcctcgccccccgaccctggtccagaaatgccgccccctcgagcacgaaacggagagatagcaagctgtggagtgagaccttcgatgtgtgcgtcaatcagatgcttacatccaaggaaatcaaacgtcaggaggcgatctttgagctttcccaaggagaagaagacttgatagaagacttgaaattagcaaaaaaggcctatcatgaccccatgctgaaactctccataatgacagaacaagagttgaatcaaatttttggaacactggactctctaattcctctacatgaagagctccttagtcagcttcgagatgttaggaagcctgatggctcgactgaacatgttggtcccatcctcgtgggctggctcccttgcctcagctcctatgatagctactgcagcaatcaagtagccgccaaagctctgctggaccacaaaaagcaagatcaccgagtccaggatttcctacagcgatgtttagaatccccctttagccgcaaactagatctctggaatttcctcgatattccaagaagccgcctggtaaaataccctctgcttctccgagaaatcttgaggcacacaccaaatgataatccagatcagcagcacttggaagaagctataaatatcattcagggaattgtggcagaaatcaacaccaagactggtgaatctgaatgccgctattataaagagcggcttctttacttggaagaaggccagaaagactccctgatcgacagctctcgagtcttgtgttgtcatggtgaactgaagaacaatcggggcgtgaaactgcatgttttcctgttccaagaagtgcttgtgatcactcgagccgtcacccacaatgagcagctttgctaccagctgtaccgtcagccaatccccgtgaaagacctcctgctggaagacctccaggatggagaagtgaggctgggtggctccctgcgaggggcattcagcaacaatgagagaattaaaaacttcttcagagtcagtttcaaaaatggatcccaaagtcagacccactcgctacaagccaatgacactttcaacaaacagcagtggcttaactgtattcgtcaagccaaagaaacagttttgtgtgctgccgggcaagctggggtgcttgactccgagggatcgttcctaaatcccaccaccgggagcagagagctacagggagaaacaaaacttgagcagatggaccaatcggacagtgagtcagactgtagtatggacacgagtgaggtcagcctcgactgtgagcgcatggaacagacagactcttcctgtggaaacagcaggcacggtgaaagtaacgtctgacagaagcatgtgcacttcgggaagcaggcctgcatcttacctgtacagtatttgcattccacagatggaacggtttggagaagcactttttcatacttttgtgaaagtatacatgttggcccagtctctcgtatctgtacctttgtccctagtactgtaactgccaatctgtctgtgtaagctggaatctgtggcaactattaccctgtgttgtatttcccaagtgtctggatggatggagaggtactcaaacaagttactttcagttgtcctgctggattttaaaaaaatagaaaaagaatctcaaaactactgttttacatagattgtttgaagagtccttcctcttgtgcttctgtaccactttcccagctcttagatgtggtagctaaaggcacggaatttagacggccttgtaaatagggcatgaggaactcatctgtgtattgggatggtattagagagagaatcaggaaagaccaactcatgaagtgaacttggtttgatcttactcaactagaaagcttgaaaacatccctggggattctgaaggcttaattttgcaaaggaggatgcattgtctgaactttgcaacttcatccagtgcaagtttgatgcaagaatgtattaggacataaaatagaggctgaccttaaaagggccaggacagaagcggctgccagctctgaatctttaactgaaatgcacatggcaccaggaggtgtctctcatagttggttgctagcctaaaacatcagaatagaacccaaagggcttaggaaggcctgccaggataacaagaaggccctgtattcattgtgtttcatctgcctaggcctactcattattttagagaatgaatgaagcaacaaggaagagagaccatgactctatcgatgacactgtttatagaaacacaggagaggaagaatttggaatgaaaagcacttcgtcagaaccttctgtgggagccattgagagaaaagcatggtccagtgccttctgagaaaggccagagctttgggctttcctgctctgcttttgggtcgtcaatttgccatctctggttctgtgctataatcagaattgtaattatgttctccagaggccaatttcattaactctgattaattagaatcagctagccagattagtaacctctttgtccagccttgatttacagtgcagggtaaagtgcagaccttaaaaacagctaagtacctagaagagctccctgcaagtgtaaatattaaggatgacctgtgcaaaattatacccacaccagcactagtggtaattattctaaattattgccaaaaagttttttttaatctgtctttcaagtttacagaaaagaaagcagtaaatgcattgatgtcattttattatgtacatatatcatgtgcattcaagctgtgtgacaagatatatcaatataaaaacaaggtatatactttattattttttgaaaacaaggatattgtgatcaattttaccctgtaaaacatatttctgtatttataggtcttaaacatgatgaattttttctattacaagtttatttaaaactgctttctcaagtcgttattgatacagcaagtgaacctgctgcagacagaagcagaggaaagccaagaacagcctttattggtgaagaaaagaatgaatgattctttgtaggcgccatcagccacttttagaagccatcagccagtgtgttgggaaaagaggtttgtcaagtgttggcctatgggaaggtggtcaatgaatgttttgatgaaatgaatgtttttgtataatggccttaaacttttctggaagtatttcaaataaattacattattaagtcatcctccatgtgtacag

SEQ ID NO: 418060 - DNA, 3586 bp, Homo sapiens
agcggaggaacccatctggtgagctgagagttagtgaggggcccaagagaatggggcttgctctgccctgtgctttagatggaccatgtttgatagaaatatttggcctaaacggcagcggcaaaacaactttcccatgtttccctctcctaaagcctggaatttcagagggcgaaaacggaaacagagcacccaagatgaagatgctgttagcctttgcagtctcgacataagtgagcctagtaataaacgggtcaaacccctttcccgagtcacgtcgctagcaaacctcatcccgcccgtgaaggccacgccattaaagcgcttcagtcaaaccctgcagcgctccattagcttccgcagtgagagccgccctgacatcctcgccccccgaccctggtccagaaatgccgccccctcgagcacgaaacggagagatagcaagctgtggagtgagaccttcgatgtgtgcgtcaatcagatgcttacatccaaggaaatcaaacgtcaggaggcgatctttgagctttcccaaggagaagaagacttgatagaagacttgaaattagcaaaaaaggcctatcatgaccccatgctgaaactctccataatgacagaacaagagttgaatcaaatttttggaacactggactctctaattcctctacatgaagagctccttagtcagcttcgagatgttaggaagcctgatggctcgactgaacatgttggtcccatcctcgtgggctggctcccttgcctcagctcctatgatagctactgcagcaatcaagtagccgccaaagctctgctggaccacaaaaagcaagatcaccgagtccaggatttcctacagcgatgtttagaatccccctttagccgcaaactagatctctggaatttcctcgatattccaagaagccgcctggtaaaataccctctgcttctccgagaaatcttgaggcacacaccaaatgataatccagatcagcagcacttggaagaagctataaatatcattcagggaattgtggcagaaatcaacaccaagactggtgaatctgaatgccgctattataaagagcggcttctttacttggaagaaggccagaaagactccctgatcgacagctctcgagtcttgtgttgtcatggtgaactgaagaacaatcggggcgtgaaactgcatgttttcctgttccaagaagtgcttgtgatcactcgagccgtcacccacaatgagcagctttgctaccagctgtaccgtcagccaatccccgtgaaagacctcctgctggaagacctccaggatggagaagtgaggctgggtggctccctgcgaggggcattcagcaacaatgagagaattaaaaacttcttcagagtcagtttcaaaaatggatcccaaagtcagacccactcgctacaagccaatgacactttcaacaaacagcagtggcttaactgtattcgtcaagccaaagaaacagttttgtgtgctgccgggcaagctggggtgcttgactccgagggatcgttcctaaatcccaccaccgggagcagagagctacagggagaaacaaaacttgagcagatggaccaatcggacagtgagtcagactgtagtatggacacgagtgaggtcagcctcgactgtgagcgcatggaacagacagactcttcctgtggaaacagcaggcacggtgaaagtaacgtctgacagaagcatgtgcacttcgggaagcaggcctgcatcttacctgtacagtatttgcattccacagatggaacggtttggagaagcactttttcatacttttgtgaaagtatacatgttggcccagtctctcgtatctgtacctttgtccctagtactgtaactgccaatctgtctgtgtaagctggaatctgtggcaactattaccctgtgttgtatttcccaagtgtctggatggatggagaggtactcaaacaagttactttcagttgtcctgctggattttaaaaaaatagaaaaagaatctcaaaactactgttttacatagattgtttgaagagtccttcctcttgtgcttctgtaccactttcccagctcttagatgtggtagctaaaggcacggaatttagacggccttgtaaatagggcatgaggaactcatctgtgtattgggatggtattagagagagaatcaggaaagaccaactcatgaagtgaacttggtttgatcttactcaactagaaagcttgaaaacatccctggggattctgaaggcttaattttgcaaaggaggatgcattgtctgaactttgcaacttcatccagtgcaagtttgatgcaagaatgtattaggacataaaatagaggctgaccttaaaagggccaggacagaagcggctgccagctctgaatctttaactgaaatgcacatggcaccaggaggtgtctctcatagttggttgctagcctaaaacatcagaatagaacccaaagggcttaggaaggcctgccaggataacaagaaggccctgtattcattgtgtttcatctgcctaggcctactcattattttagagaatgaatgaagcaacaaggaagagagaccatgactctatcgatgacactgtttatagaaacacaggagaggaagaatttggaatgaaaagcacttcgtcagaaccttctgtgggagccattgagagaaaagcatggtccagtgccttctgagaaaggccagagctttgggctttcctgctctgcttttgggtcgtcaatttgccatctctggttctgtgctataatcagaattgtaattatgttctccagaggccaatttcattaactctgattaattagaatcagctagccagattagtaacctctttgtccagccttgatttacagtgcagggtaaagtgcagaccttaaaaacagctaagtacctagaagagctccctgcaagtgtaaatattaaggatgacctgtgcaaaattatacccacaccagcactagtggtaattattctaaattattgccaaaaagttttttttaatctgtctttcaagtttacagaaaagaaagcagtaaatgcattgatgtcattttattatgtacatatatcatgtgcattcaagctgtgtgacaagatatatcaatataaaaacaaggtatatactttattattttttgaaaacaaggatattgtgatcaattttaccctgtaaaacatatttctgtatttataggtcttaaacatgatgaattttttctattacaagtttatttaaaactgctttctcaagtcgttattgatacagcaagtgaacctgctgcagacagaagcagaggaaagccaagaacagcctttattggtgaagaaaagaatgaatgattctttgtaggcgccatcagccacttttagaagccatcagccagtgtgttgggaaaagaggtttgtcaagtgttggcctatgggaaggtggtcaatgaatgttttgatgaaatgaatgtttttgtataatggccttaaacttttctggaagtatttcaaataaattacattattaagtcatcctccatgtgtacag

SEQ ID NO: 418061 - DNA, 3609 bp, Homo sapiens
  misc_feature (222)..(222): n is a, c, g, or t
agcccagtcgagtcctgcccggctagaagccggctgtcggtctccgtgtcgccgccgccgcccggcatcgtggagctggggcccccttttgcctgggagttttgtagtcgcctagggtcagcggtgacatcccaaagggcaggcccggcagccgccatggtggccaaggattaccccttctacctcacggtcaagagagcgaactgcagcctggagctaccnccggccagcggtccggccaaggacgctgaggagcctagtaataaacgggtcaaacccctttcccgagtcacgtcgctagcaaacctcatcccgcccgtgaaggccacgccattaaagcgcttcagtcaaaccctgcagcgctccattagcttccgcagtgagagccgccctgacatcctcgccccccgaccctggtccagaaatgccgccccctcgagcacgaaacggagagatagcaagctgtggagtgagaccttcgatgtgtgcgtcaatcagatgcttacatccaaggaaatcaaacgtcaggaggcgatctttgagctttcccaaggagaagaagacttgatagaagacttgaaattagcaaaaaaggcctatcatgaccccatgctgaaactctccataatgacagaacaagagttgaatcaaatttttggaacactggactctctaattcctctacatgaagagctccttagtcagcttcgagatgttaggaagcctgatggctcgactgaacatgttggtcccatcctcgtgggctggctcccttgcctcagctcctatgatagctactgcagcaatcaagtagccgccaaagctctgctggaccacaaaaagcaagatcaccgagtccaggatttcctacagcgatgtttagaatccccctttagccgcaaactagatctctggaatttcctcgatattccaagaagccgcctggtaaaataccctctgcttctccgagaaatcttgaggcacacaccaaatgataatccagatcagcagcacttggaagaagctataaatatcattcagggaattgtggcagaaatcaacaccaagactggtgaatctgaatgccgctattataaagagcggcttctttacttggaagaaggccagaaagactccctgatcgacagctctcgagtcttgtgttgtcatggtgaactgaagaacaatcggggcgtgaaactgcatgttttcctgttccaagaagtgcttgtgatcactcgagccgtcacccacaatgagcagctttgctaccagctgtaccgtcagccaatccccgtgaaagacctcctgctggaagacctccaggatggagaagtgaggctgggtggctccctgcgaggggcattcagcaacaatgagagaattaaaaacttcttcagagtcagtttcaaaaatggatcccaaagtcagacccactcgctacaagccaatgacactttcaacaaacagcagtggcttaactgtattcgtcaagccaaagaaacagttttgtgtgctgccgggcaagctggggtgcttgactccgagggatcgttcctaaatcccaccaccgggagcagagagctacagggagaaacaaaacttgagcagatggaccaatcggacagtgagtcagactgtagtatggacacgagtgaggtcagcctcgactgtgagcgcatggaacagacagactcttcctgtggaaacagcaggcacggtgaaagtaacgtctgacagaagcatgtgcacttcgggaagcaggcctgcatcttacctgtacagtatttgcattccacagatggaacggtttggagaagcactttttcatacttttgtgaaagtatacatgttggcccagtctctcgtatctgtacctttgtccctagtactgtaactgccaatctgtctgtgtaagctggaatctgtggcaactattaccctgtgttgtatttcccaagtgtctggatggatggagaggtactcaaacaagttactttcagttgtcctgctggattttaaaaaaatagaaaaagaatctcaaaactactgttttacatagattgtttgaagagtccttcctcttgtgcttctgtaccactttcccagctcttagatgtggtagctaaaggcacggaatttagacggccttgtaaatagggcatgaggaactcatctgtgtattgggatggtattagagagagaatcaggaaagaccaactcatgaagtgaacttggtttgatcttactcaactagaaagcttgaaaacatccctggggattctgaaggcttaattttgcaaaggaggatgcattgtctgaactttgcaacttcatccagtgcaagtttgatgcaagaatgtattaggacataaaatagaggctgaccttaaaagggccaggacagaagcggctgccagctctgaatctttaactgaaatgcacatggcaccaggaggtgtctctcatagttggttgctagcctaaaacatcagaatagaacccaaagggcttaggaaggcctgccaggataacaagaaggccctgtattcattgtgtttcatctgcctaggcctactcattattttagagaatgaatgaagcaacaaggaagagagaccatgactctatcgatgacactgtttatagaaacacaggagaggaagaatttggaatgaaaagcacttcgtcagaaccttctgtgggagccattgagagaaaagcatggtccagtgccttctgagaaaggccagagctttgggctttcctgctctgcttttgggtcgtcaatttgccatctctggttctgtgctataatcagaattgtaattatgttctccagaggccaatttcattaactctgattaattagaatcagctagccagattagtaacctctttgtccagccttgatttacagtgcagggtaaagtgcagaccttaaaaacagctaagtacctagaagagctccctgcaagtgtaaatattaaggatgacctgtgcaaaattatacccacaccagcactagtggtaattattctaaattattgccaaaaagttttttttaatctgtctttcaagtttacagaaaagaaagcagtaaatgcattgatgtcattttattatgtacatatatcatgtgcattcaagctgtgtgacaagatatatcaatataaaaacaaggtatatactttattattttttgaaaacaaggatattgtgatcaattttaccctgtaaaacatatttctgtatttataggtcttaaacatgatgaattttttctattacaagtttatttaaaactgctttctcaagtcgttattgatacagcaagtgaacctgctgcagacagaagcagaggaaagccaagaacagcctttattggtgaagaaaagaatgaatgattctttgtaggcgccatcagccacttttagaagccatcagccagtgtgttgggaaaagaggtttgtcaagtgttggcctatgggaaggtggtcaatgaatgttttgatgaaatgaatgtttttgtagatcggccgggccagtgtccctccccatgtccctgttcccaccatgagtacatcaaaacaaaaaaaagaaaagcat

SEQ ID NO: 418062 - DNA, 3632 bp, Homo sapiens
  misc_feature (222)..(222): n is a, c, g, or t
agcccagtcgagtcctgcccggctagaagccggctgtcggtctccgtgtcgccgccgccgcccggcatcgtggagctggggcccccttttgcctgggagttttgtagtcgcctagggtcagcggtgacatcccaaagggcaggcccggcagccgccatggtggccaaggattaccccttctacctcacggtcaagagagcgaactgcagcctggagctaccnccggccagcggtccggccaaggacgctgaggagcctagtaataaacgggtcaaacccctttcccgagtcacgtcgctagcaaacctcatcccgcccgtgaaggccacgccattaaagcgcttcagtcaaaccctgcagcgctccattagcttccgcagtgagagccgccctgacatcctcgccccccgaccctggtccagaaatgccgccccctcgagcacgaaacggagagatagcaagctgtggagtgagaccttcgatgtgtgcgtcaatcagatgcttacatccaaggaaatcaaacgtcaggaggcgatctttgagctttcccaaggagaagaagacttgatagaagacttgaaattagcaaaaaaggcctatcatgaccccatgctgaaactctccataatgacagaacaagagttgaatcaaatttttggaacactggactctctaattcctctacatgaagagctccttagtcagcttcgagatgttaggaagcctgatggctcgactgaacatgttggtcccatcctcgtgggctggctcccttgcctcagctcctatgatagctactgcagcaatcaagtagccgccaaagctctgctggaccacaaaaagcaagatcaccgagtccaggatttcctacagcgatgtttagaatccccctttagccgcaaactagatctctggaatttcctcgatattccaagaagccgcctggtaaaataccctctgcttctccgagaaatcttgaggcacacaccaaatgataatccagatcagcagcacttggaagaagctataaatatcattcagggaattgtggcagaaatcaacaccaagactggtgaatctgaatgccgctattataaagagcggcttctttacttggaagaaggccagaaagactccctgatcgacagctctcgagtcttgtgttgtcatggtgaactgaagaacaatcggggcgtgaaactgcatgttttcctgttccaagaagtgcttgtgatcactcgagccgtcacccacaatgagcagctttgctaccagctgtaccgtcagccaatccccgtgaaagacctcctgctggaagacctccaggatggagaagtgaggctgggtggctccctgcgaggggcattcagcaacaatgagagaattaaaaacttcttcagagtcagtttcaaaaatggatcccaaagtcagacccactcgctacaagccaatgacactttcaacaaacagcagtggcttaactgtattcgtcaagccaaagaaacagttttgtgtgctgccgggcaagctggggtgcttgactccgagggatcgttcctaaatcccaccaccgggagcagagagctacagggagaaacaaaacttgagcagatggaccaatcggacagtgagtcagactgtagtatggacacgagtgaggtcagcctcgactgtgagcgcatggaacagacagactcttcctgtggaaacagcaggcacggtgaaagtaacgtctgacagaagcatgtgcacttcgggaagcaggcctgcatcttacctgtacagtatttgcattccacagatggaacggtttggagaagcactttttcatacttttgtgaaagtatacatgttggcccagtctctcgtatctgtacctttgtccctagtactgtaactgccaatctgtctgtgtaagctggaatctgtggcaactattaccctgtgttgtatttcccaagtgtctggatggatggagaggtactcaaacaagttactttcagttgtcctgctggattttaaaaaaatagaaaaagaatctcaaaactactgttttacatagattgtttgaagagtccttcctcttgtgcttctgtaccactttcccagctcttagatgtggtagctaaaggcacggaatttagacggccttgtaaatagggcatgaggaactcatctgtgtattgggatggtattagagagagaatcaggaaagaccaactcatgaagtgaacttggtttgatcttactcaactagaaagcttgaaaacatccctggggattctgaaggcttaattttgcaaaggaggatgcattgtctgaactttgcaacttcatccagtgcaagtttgatgcaagaatgtattaggacataaaatagaggctgaccttaaaagggccaggacagaagcggctgccagctctgaatctttaactgaaatgcacatggcaccaggaggtgtctctcatagttggttgctagcctaaaacatcagaatagaacccaaagggcttaggaaggcctgccaggataacaagaaggccctgtattcattgtgtttcatctgcctaggcctactcattattttagagaatgaatgaagcaacaaggaagagagaccatgactctatcgatgacactgtttatagaaacacaggagaggaagaatttggaatgaaaagcacttcgtcagaaccttctgtgggagccattgagagaaaagcatggtccagtgccttctgagaaaggccagagctttgggctttcctgctctgcttttgggtcgtcaatttgccatctctggttctgtgctataatcagaattgtaattatgttctccagaggccaatttcattaactctgattaattagaatcagctagccagattagtaacctctttgtccagccttgatttacagtgcagggtaaagtgcagaccttaaaaacagctaagtacctagaagagctccctgcaagtgtaaatattaaggatgacctgtgcaaaattatacccacaccagcactagtggtaattattctaaattattgccaaaaagttttttttaatctgtctttcaagtttacagaaaagaaagcagtaaatgcattgatgtcattttattatgtacatatatcatgtgcattcaagctgtgtgacaagatatatcaatataaaaacaaggtatatactttattattttttgaaaacaaggatattgtgatcaattttaccctgtaaaacatatttctgtatttataggtcttaaacatgatgaattttttctattacaagtttatttaaaactgctttctcaagtcgttattgatacagcaagtgaacctgctgcagacagaagcagaggaaagccaagaacagcctttattggtgaagaaaagaatgaatgattctttgtgtatgttatcgcccaacacaagtgatctttaattgctttgacagacccagggtgtcaacagcgttagtctacagggctacccttaccctttcctcctctgcagctgaggcaatgggcagtcccatcgctaagaacctgttcttagaaattcactggtctcttgctctgaacagatgctgagctaatgatgggtcacatatttaacagctagcttaaa

SEQ ID NO: 418063 - DNA, 420 bp, Homo sapiens
actaaattcaaggccgctcagacaaacaaggatattgtgatcaattttaccctgtaaaacatatttctgtatttataggtcttaaacatgatgaattttttctattacaagtttatttaaaactgctttctcaagtcgttattgatacagcaagtgaacctgctgcagacagaagcagaggaaagccaagaacagcctttattggtgaagaaaagaatgaatgattctttgtaggcgccatcagccacttttagaagccatcagccagtgtgttgggaaaagaggtttgtcaagtgttggcctatgggaaggtggtcaatgaatgttttgatgaaatgaatgtttttgtataatggccttaaacttttctggaagtatttcaaataaattacattattaagtcatcctccatgtgtacag

SEQ ID NO: 418064 - DNA, 983 bp, Homo sapiens
accatagtaacaatgggggagaaggggcagtttctagaaggagaaggaggcactggagcagatacaaataattcctgcctacaaaattcttccctatctgtcctcctatcataaaagtgtcagctttcatgactgacgatgcatctacaaggactggagttgaacttcaagcaagagactcacagacaaaggcgccctgggccagtggcacacactagctttatcaaagagactcagggacaagtacgcctggtctgtactgcggtttgccaattagctggatgaacagctggctaatttctgttttatctcttgggcagaagacacatgaggctagaataggttatcttcaacggggagccgagctaaggcctcatcgaaaacggaaacagagcacccaagatgaagatgctgttagcctttgcagtctcgacataagtgagcctagtaataaacgggtcaaacccctttcccgagtcacgtcgctagcaaacctcatcccgcccgtgaaggccacgccattaaagcgcttcagtcaaaccctgcagcgctccattagcttccgcagtgagagccgccctgacatcctcgccccccgaccctggtccagaaatgccgccccctcgagcacgaaacggagagatagcaagctgtggagtgagaccttcgatgtgtgcgtcaatcagatgcttacatccaaggaaatcaaacgtcaggaggcgatctttgagctttcccaaggagaagaagacttgatagaagacttgaaattagcaaaaaaggcctatcatgaccccatgctgaaactctccataatgacagaacaagagttgaatcaaatttttggaacactggactctctaattcctctacatgaagagctccttagtcagcttcgagatgttaggaagcctgatggctcgactgaacatgttggtcccatcctcgtgggctgggaaagagccagagtacatggaagcaaa

SEQ ID NO: 418065 - DNA, 500 bp, Homo sapiens
gtaaatttaaatccagcagtcacttgagtcaagtcacattttttttcttgagtaatttcacaaccctaaagtggtgcttcgtgagaactgtctttatgactaagactggtctgctaccacacaccaagcagtggggaaagtgtttcaaaacaagagggcagaatagctctccagacctggcacctttaggggtttacctctgtatgtctctaatgcatgtcaaagaatacttcagcctaaatcagaaagtgtccatggaggcctcgccttatgtatatttcattgtcctagaagtctcatatgtaggactctttgcccataggagagaatgtgtgcatgtctgaaacttgaactgagtcttagaaataaagccatttgaatctcaaaagtgaataaagtgaaatgaggcaattgcatactatcatataagttggggtcttttatataggaatttgttttctaatcaacattttgtgtggggaggaggaggacaacaaacc

SEQ ID NO: 418066 - DNA, 423 bp, Homo sapiens
ctctcagagccagaattactagggagggattctgattggtccaacttggatcaagtggatactcttggaccaatcagcagtggccagggagtgggattatgctgtaccaccatggtgactcctatggtaaccatagtaacaatgggggagaaggggcagtttctagaaggagaaggaggcactggagcagatacaaataattcctgcctacaaaattcttccctatctgtcctcctatcataaaaggtaatcatcctgattccattttttcctgtctgactccatgtgggcaaaactcctaactcctcttctttcatctttggttagaagcagtccatttagttattgattttttttcaacctggacaatctcttctgggagcaagaacagcctgtttggcaagctattcagcaagacataaa

SEQ ID NO: 418067 - DNA, 278 bp, Homo sapiens
caatgtgaataacccagaacctacttccagccctgttcatatttgaatgcctaacaaataagcatctgtttgttttttgccagagctccttagtcagcttcgagatgttaggaagcctgatggctcgactgaacatgttggtcccatcctcgtgggctgggtaagaaagttctctggtctttattgaagataaatttcaataatatagatgggagtttcattttagctagactttttttatttttatttttatttttttacaaatgttggtttcacat

SEQ ID NO: 418068 - DNA, 401 bp, Homo sapiens
cagttaggtgtttgttcagtcccaataaatgatgccaccgtagcctcagagctcaattattttgacattccaaccttctctttctgtttccttcttagctcccttgcctcagctcctatgatagctactgcagcaatcaagtagccgccaaagctctgctggaccacaaaaagcaagatcaccgagtccaggatttcctacagcgatgtttagaatccccctttagccgcaaactagatctctggaatttcctcgatattccaagaagccgcctggtaaaataccctctgcttctccgagaaatcttgaggcacacaccaaatgataatccagatcagcagcacttggaagaagctgtaagtttgtctgtttccttctctctcttcttgttatttccacca

SEQ ID NO: 418069 - DNA, 1147 bp, Homo sapiens
tatgaaacactttatttgggtatcactcaattttactgtagcagcctccatcccttcttagttataccaccgttaccaccacttttgtccttgctcctcccttgatgttttgtctttcatgaaacccatctcccaaggtctttctggatgataatggcttaattcactctctttcccagatacatgtttttccttctttataggaacctaactctgcctgtctaattggggaattccaggcagggtattgaaaatgtctggggggccgggtgcagtggctcaagcttgtaaacccagcaagcacattggaaggctgaggcgggagattgtttgagctcagaagttggagaccagccagacaacataataagactccatccctacaaaatatttaaaaattagctgagtatgttgatgcatgtttgtagtcccagctgtttgggagactaaggtaggaggattgcttgagcccaggaggtcgaggctgcagtgcaccgtgattgtgccactgtgttctagcctcggtgagggtgtgagaccctgtttaaaaaaaaagaaacagaaaatgtctgagcagtgggttctcctgtcactgacttttctgtcattgcttggcttgtaacattggatccacgtgtgtgctgtttatagaggaaccttacaacaggcagagagcttatgagactttagagttcagtaaactcagagttgcctcttagttgaccatctattaactgtttaaatttggacaagtgtctcaacctttctgaatctcagcttcttcatgtataaaataggggcagttacacctccttgtggggttgggaggattaaatgtgatcatgtataggaagtatctcatgtctgtaatcctagtactttcggaagccgaggcaggaggatcacttgagcccaggagtttgagagcagcctgggcaacatagtaagacctcccatctctaaaaaaataaaataaatagccggtatttccagttacttggtggggccaaggcaggaggatcgcttgagcccaggagtttgagaccagcctgggcaacgtaataagaccgtttctctaaaaaaattaaaaaattagccagtgctcccaggtgcttggggggctgaggtgggacggttgattgagctc

SEQ ID NO: 418070 - DNA, 721 bp, Homo sapiens
gcgggggcggggccagcctgggggcccagacgtggcgcagcgactcggaggttcgcctccagcttgcgcatcatctgcggccgggtcccgatgagcctcctgttgcctccgctggcgctgctgctgcttctcgcggcgcttgtggccccagccacagccgccactgcctaccggccggactggaaccgtctgagcggcctaacccgcgcccgggtagagacctgcgggggatgacagctgaaccgcctaaaggaggtgaaggctttcgtcacgcaggacattccattctatcacaacctggtgatgaaacacctccctggggccgaccctgagctcgtgctgctgggccgccgctacgaggaactagagcgcatcccactcagtgaaatgacccgcgaagagatcaatgcgctagtgcaggagctcggcttctaccgcaaggcggcgcccgacgcgcaggtgccccccgagtacgtgtgggcgcccgcgaagcccccagaggaaacttcggaccacgctgacctgtaggtccgggggcgcggcggagctgggacctacctgcctgagtcctggagacagaatgaagcgctcagcatcccgggaatacttctcttgctgagagccgatgcccgtccccgggccagcagggatggggttggggaggttctcccaaccccactttcttccttccccagctccactaaattccctcctgccttaa

SEQ ID NO: 418071 - DNA, 1482 bp, Homo sapiens
  misc_feature (777)..(777): n is a, c, g, or t
gcgggggcggggccagcctgggggcccagacgtggcgcagcgactcggaggttcgcctccagcttgcgcatcatctgcggccgggtcccgatgagcctcctgttgcctccgctggcgctgctgctgcttctcgcggcgcttgtggccccagccacagccgccactgcctaccggccggactggaaccgtctgagcggcctaacccgcgcccgggtagagacctgcgggggatgacagctgaaccgcctaaaggaggtgaaggctttcgtcacgcaggacattccattctatcacaacctggtgatgaaacacctccctggggccgaccctgagctcgtgctgctgggccgccgctacgaggaactagagcgcatcccactcagtgaaatgacccgcgaagagatcaatgcgctagtgcaggagctcggcttctaccgcaaggcggcgcccgacgcgcaggtgccccccgagtacgtgtgggcgcccgcgaagcccccagaggaaacttcggaccacgctgacctgtaggtccgggggcgcggcggagctgggacctacctgcctgagtcctggagacagaatgaagcgctcagcatcccgggaatacttctcttgctgagagccgatgcccgtccccgggccagcagggatggggttggggaggttctcccaaccccactttcttccttccccagctccactaaattccctcctgccttaaaaaaaaaaaaaaaaaaaaaaaaaaaaaaaaaaaaaaaaaaaaaaaaaaaaaaaaanaaaagagagagagagagagagagagagagagaagagagggagaggagagagaaaagagagggagggagaaaagagaaggagggaggagaaagaaaggggggaaaagagagaggagagccgacgaaacaaagggaggcccaccaacataaaagacaaagagaaaaaagagacagagacaaaagaccgacaaaaacaacgaacaaaaaaggaagcgagcaagaaagacgctcgcgaaaaaaacaaccaaagaagagcaagagaaaaacacaactaagggggcgaccaacacacaacaacggcgggcagggcagactacgttcgcacgcgcacaccccgcaagagaggagaccacggacacaagaagagggaaaagccggcgagcaccacagcgcggcgagaaacaccaggcgtggagcagaaagcacggaacagagcgaagagaaacaacgggaggaaaaaacaaggaataaccgaaaccagcgggacagagccataagagacagcaagacactccgacaccaacagacgacgggggaaaaaaaagaaaagaccggacacacagcggatcgcgagagaccgaaagcaacagagcacgacgggagaggcacggaggacaaggagaagcaccaagccaagcacgacgacgaacagaggaaggcctaacggacgagacggccaccccgccacgagcacacgacaaaccac

SEQ ID NO: 418072 - DNA, 919 bp, Homo sapiens
gcgggggcggggccagcctgggggcccagacgtggcgcagcgactcggaggttcgcctccagcttgcgcatcatctgcggccgggtcccgatgagcctcctgttgcctccgctggcgctgctgctgcttctcgcggcgcttgtggccccagccacagccgccactgcctaccggccggactggaaccgtctgagcggcctaacccgcgcccgggtagaggcctgagtctccccacctgtatacacagttcccccttctgcccacaagggtccagcatttccttcagaccttgggaactgctgatccggggataactcacagcccgacccaactcagggataaggaagtatggctttggggatgtgactggaataaacgtgaaggactcctgacctatcccattttatccccctccagacctgcgggggatgacagctgaaccgcctaaaggaggtgaaggctttcgtcacgcaggacattccattctatcacaacctggtgatgaaacacctccctggggccgaccctgagctcgtgctgctgggccgccgctacgaggaactagagcgcatcccactcagtgaaatgacccgcgaagagatcaatgcgctagtgcaggagctcggcttctaccgcaaggcggcgcccgacgcgcaggtgccccccgagtacgtgtgggcgcccgcgaagcccccagaggaaacttcggaccacgctgacctgtaggtccgggggcgcggcggagctgggacctacctgcctgagtcctggagacagaatgaagcgctcagcatcccgggaatacttctcttgctgagagccgatgcccgtccccgggccagcagggatggggttggggaggttctcccaaccccactttcttccttccccagctccactaaattccctcctgccttaa

SEQ ID NO: 418073 - DNA, 909 bp, Homo sapiens
tgggcttcagtgtctcgtctgtacctcgagtagactgaggtcatggtctctgatgctctggttcctccccaggtgaaggctttcgtcacgcaggacattccattctagtatccttctgttctgggggaggggaaatgggatgggcacctgggagaatctccacgtaacttcagaaaggggtggcagatggttttcaactgacaagttgaattgattggtagtggctcccagaggattctgaggtggtctccatgttgggtgggcaagagagattgactagtgatgactgccacagaatggagaggagggccctttacttctttgaaccctaattttctcacgtataagcggagaccctggcccctcccgggcacagagtaagctctgagcaaaggaggcaatgctgttcccatcagtaaggctgcggaaaccaccacctccctctgcccaccaccccgctccttaacaccacctccagtcacaacctggtgatgaaacacctccctggggccgaccctgagctcgtgctgctgggccgccgctacgaggaactagagcgcatcccactcagtgaaatgacccgcgaagagatcaatgcgctagtgcaggagctcggcttctaccgcaaggcggcgcccgacgcgcaggtgccccccgagtacgtgtgggcgcccgcgaagcccccagaggaaacttcggaccacgctgacctgtaggtccgggggcgcggcggagctgggacctacctgcctgagtcctggagacagaatgaagcgctcagcatcccgggaatacttctcttgctgagagccgatgcccgtccccgggccagcagggatggggttggggaggttctcccaaccccactttcttccttccccagctccactaaattccctcctgccttaa

SEQ ID NO: 418074 - DNA, 800 bp, Homo sapiens
gcgggggcggggccagcctgggggcccagacgtggcgcagcgactcggaggttcgcctccagcttgcgcatcatctgcggccgggtcccgatgagcctcctgttgcctccgctggcgctgctgctgcttctcgcggcgcttgtggccccagccacagccgccactgcctaccggccggactggaaccgtctgagcggcctaacccgcgcccgggtagagacctgcgggggatgacagctgaaccgcctaaaggaggtgaaggctttcgtcacgcaggacattccattctatcacaacctggtgatgaaacacctccctggggccgaccctgagctcgtgctgctgggccgccgctacgaggaactagaggtgaggccgtgggaggtgggctgggggcgaggccagaggcgaggcccagcctgctgaccccgcccctcctccgcctcagcgcatcccactcagtgaaatgacccgcgaagagatcaatgcgctagtgcaggagctcggcttctaccgcaaggcggcgcccgacgcgcaggtgccccccgagtacgtgtgggcgcccgcgaagcccccagaggaaacttcggaccacgctgacctgtaggtccgggggcgcggcggagctgggacctacctgcctgagtcctggagacagaatgaagcgctcagcatcccgggaatacttctcttgctgagagccgatgcccgtccccgggccagcagggatggggttggggaggttctcccaaccccactttcttccttccccagctccactaaattccctcctgccttaa

SEQ ID NO: 418075 - DNA, 1193 bp, Homo sapiens
  misc_feature (777)..(777): n is a, c, g, or t
gcgggggcggggccagcctgggggcccagacgtggcgcagcgactcggaggttcgcctccagcttgcgcatcatctgcggccgggtcccgatgagcctcctgttgcctccgctggcgctgctgctgcttctcgcggcgcttgtggccccagccacagccgccactgcctaccggccggactggaaccgtctgagcggcctaacccgcgcccgggtagagacctgcgggggatgacagctgaaccgcctaaaggaggtgaaggctttcgtcacgcaggacattccattctatcacaacctggtgatgaaacacctccctggggccgaccctgagctcgtgctgctgggccgccgctacgaggaactagagcgcatcccactcagtgaaatgacccgcgaagagatcaatgcgctagtgcaggagctcggcttctaccgcaaggcggcgcccgacgcgcaggtgccccccgagtacgtgtgggcgcccgcgaagcccccagaggaaacttcggaccacgctgacctgtaggtccgggggcgcggcggagctgggacctacctgcctgagtcctggagacagaatgaagcgctcagcatcccgggaatacttctcttgctgagagccgatgcccgtccccgggccagcagggatggggttggggaggttctcccaaccccactttcttccttccccagctccactaaattccctcctgccttaaaaaaaaaaaaaaaaaaaaaaaaaaaaaaaaaaaaaaaaaaaaaaaaaaaaaaaaanaaaaaaaaaaaaaaaaaaacaaaaaagacaaaaaagacacgaaaagcgaaacaaaaaaccacaaaaaaaaaccaaaacaagaagaacagacaaagaccagcggagcggggcccggcacgacagcacacgccccggcgcggcgacgctcatgcgccgacgccccaccccgacttcaggagtggtgtgctgcggaaggcggcgtgccctccatgacggggtaggcgtgtgatcgatgcacacagggacggcggcgcgccgcacgtagtaagataaatagcagtgtgatgggagaagacaagacctccggggacgctgatcgtgaagcacgacactcctctctctcatggtggggagaaagtacagaggtggacacagagcacacggcacgtcagcgtccccaccaggacgcttcgaac

SEQ ID NO: 418076 - DNA, 802 bp, Homo sapiens
gcgggggcggggccagcctgggggcccagacgtggcgcagcgactcggaggttcgcctccagcttgcgcatcatctgcggccgggtcccgatgagcctcctgttgcctccgctggcgctgctgctgcttctcgcggcgcttgtggccccagccacagccgccactgcctaccggccggactggaaccgtctgagcggcctaacccgcgcccgggtagagggataaggaagtatggctttggggatgtgactggaataaacgtgaaggactcctgacctatcccattttatccccctccagacctgcgggggatgacagctgaaccgcctaaaggaggtgaaggctttcgtcacgcaggacattccattctatcacaacctggtgatgaaacacctccctggggccgaccctgagctcgtgctgctgggccgccgctacgaggaactagagcgcatcccactcagtgaaatgacccgcgaagagatcaatgcgctagtgcaggagctcggcttctaccgcaaggcggcgcccgacgcgcaggtgccccccgagtacgtgtgggcgcccgcgaagcccccagaggaaacttcggaccacgctgacctgtaggtccgggggcgcggcggagctgggacctacctgcctgagtcctggagacagaatgaagcgctcagcatcccgggaatacttctcttgctgagagccgatgcccgtccccgggccagcagggatggggttggggaggttctcccaaccccactttcttccttccccagctccactaaattccctcctgccttaa

SEQ ID NO: 418077 - DNA, 528 bp, Homo sapiens
tgctcttgaggatcccccatttggcgcacgatggtcgatgacagctgaaccgcctaaaggaggtgaaggctttcgtcacgcaggacattccattctatcacaacctggtgatgaaacacctccctggggccgaccctgagctcgtgctgctgggccgccgctacgaggaactagagcgcatcccactcagtgaaatgacccgcgaagagatcaatgcgctagtgcaggagctcggcttctaccgcaaggcggcgcccgacgcgcaggtgccccccgagtacgtgtgggcgcccgcgaagcccccagaggaaacttcggaccacgctgacctgtaggtccgggggcgcggcggagctgggacctacctgcctgagtcctggagacagaatgaagcgctcagcatcccgggaatacttctcttgctgagagccgatgcccgtccccgggccagcagggatggggttggggaggttctcccaaccccactttcttccttccccagctccactaaattccctcctgccttaa

SEQ ID NO: 418078 - DNA, 2001 bp, Homo sapiens
ggctggggaggagcaggaacagtcaggactggaatctagctttgctccaaagccagctcttaattaccaacatggggatgggggtggcgtgttcctggccctcattttccgggagaggggtaactcccccgattttggcccccacatccctgagaaccttggggtctggctgtaggaggtaggggagctctgaggggtccgcgctggctagttcctgagagagcgttaaaagtagattctcctttcgctccaactttctcggtgtctcaaacactctcctgccttctgggcccattgggcacaccgccacccaatccggggacccccggagactcgccagctctccaggatgggaatttcgtgatgttccctgcctgagcttcggggagggcgggggagtgctgtaaggggctatcgcgcaagtgcagaccctctgcttctgccgcaaacggcgggcctcacctggacccggggactcttcaacgaggggcgctagcctggcccgactgggcgagtccccgcgtccctgcccgttccgtcgctcagttccacgacacgctcccctgccgccccgcctgttcgcgggtgggtgggcgcttccctcggctccccgtgacactttgcagacgctccccggcgccgggcatgggcgccgccgccgtcggtccccgagccggattccgcgagcggtgcccctgaggccctcggctgctggggtccgcaggaagccgcgccatgaatgaccggagcagtcggaggcggacaatgaaggacgatgagaccttcgagatctccattcccttcgatgaggcaccccacctagacccacagatcttttacagtctgagcccctctcggagaaacttcgaggagcctccggaggctgcgtcctccgccctggctctgatgaacagcgtcaagacccagctgcacatggctctggagaggaactcctggctgcagaagcgcatcgaggacctggaggaagagagggacttcctgcggtgccagctggacaaattcatctcttctgctcggatggaggcagaggaccactgccggatgaagcctgggcccaggcggatggagggggacagccgtggtggggctgggggcgaggcctcggaccctgagtcagcagcctcctccctcagcggagcgtccgaagaaggcagtgccagtgagaggaggcggcagaagcagaagggaggtgctagtcggaggcgctttgggaagcccaaggcccgggagaggcagcgagtgaaggacgccgacggggtcctctgccggtacaagaagatcctgggcaccttccagaagctcaagagcatgtcgcgggccttcgagcaccaccgcgtggacaggaacaccgtggcgctgaccacgcccatcgccgagctgctcattgtggcccccgagaagctggccgaggtgggcgagttcgacccctccaaggagcgcctgctcgagtactcccgccgctgctttctggccctggacgacgagacgctcaagaaggtgcaggcgctcaagaagagcaagctgctgctgcccatcacctaccgcttcaagcggtgatcgcaccacgcctccgcgcctccacccgggccttcctcccccgtggaccccggtggatgacctgcccctctccccgccgcgcccctgcccctcctcctcgctccctgggttgggggctcccttagccgggcccccaagcgcgacggccccggaccggccgcggccccttcccgaacgccggcacccccttccgcttgggctgcccagccctgtcctcgccgggccccttcctcctggaaaaccaggcaggcgggtgcccccccctcgagtgggggactgtacagaccccgtctccgccctggccccgcggaggagctgcccacctgattcccggacagacctccccaactccgcgtgagacagagaattattcagataatttaaattaaaaaacgacgtgaaaatttggaataaaattggcct

SEQ ID NO: 418079 - DNA, 2726 bp, Homo sapiens
ggctggggaggagcaggaacagtcaggactggaatctagctttgctccaaagccagctcttaattaccaacatggggatgggggtggcgtgttcctggccctcattttccgggagaggggtaactcccccgattttggcccccacatccctgagaaccttggggtctggctgtaggaggtaggggagctctgaggggtccgcgctggctagttcctgagagagcgttaaaagtagattctcctttcgctccaactttctcggtgtctcaaacactctcctgccttctgggcccattgggcacaccgccacccaatccggggacccccggagactcgccagctctccaggatgggaatttcgtgatgttccctgcctgagcttcggggagggcgggggagtgctgtaaggggctatcgcgcaagtgcagaccctctgcttctgccgcaaacggcgggcctcacctggacccggggactcttcaacgaggggcgctagcctggcccgactgggcgagtccccgcgtccctgcccgttccgtcgctcagttccacgacacgctcccctgccgccccgcctgttcgcgggtgggtgggcgcttccctcggctccccgtgacactttgcagacgctccccggcgccgggcatgggcgccgccgccgtcggtccccgagccggattccgcgagcgggtgggtgagcgcggggggcctcggcccctcggaccccgggcacccgcgggcgggggatggtggccgcgtttgcacccccgccctagtgcatgttcccgctggaatcgttccacgaccgctccccctcccacccgcgggacaaagggcgggggcgggggggggcgcacccccacgcgtgacctttccccgtactgcgcacgcgcccagcccccaccaccgggggacggtccgcccgcccacgcgagtgcgggggaggggtgtgggggccccgaaggtagaggaggcagcgcgcacgggctggacctcctcctaccctgggaagttggggcagtttccccctgcacctgcctcttccttaggcctggcagtggcccgcgatgagagagggtccttccccttcaggctaggtgtccctggtcaggcgaccccttggggcacccagcaatttagggcttcagcttccttttccttcgatacccaggagcccacgtccccagctcacttctcccccaggacctaggcggctgggccccctgcccctgactccaggagcccaggagtttgaagcccaggcgcgttttgcctcagtcctggggtccaggctccctcctccctcagaccaggggtccaggccagaaggtccctcctgtctcacttcacctcccccaggatggaccctccagtccatctgcgtctctccatttgtggctgccgtttctgtccagtgcccctgaggccctcggctgctggggtccgcaggaagccgcgccatgaatgaccggagcagtcggaggcggacaatgaaggacgatgagaccttcgagatctccattcccttcgatgaggcaccccacctagacccacagatcttttacagtctgagcccctctcggagaaacttcgaggagcctccggaggctgcgtcctccgccctggctctgatgaacagcgtcaagacccagctgcacatggctctggagaggaactcctggctgcagaagcgcatcgaggacctggaggaagagagggacttcctgcggtgccagctggacaaattcatctcttctgctcggatggaggcagaggaccactgccggatgaagcctgggcccaggcggatggagggggacagccgtggtggggctgggggcgaggcctcggaccctgagtcagcagcctcctccctcagcggagcgtccgaagaaggcagtgccagtgagaggaggcggcagaagcagaagggaggtgctagtcggaggcgctttgggaagcccaaggcccgggagaggcagcgagtgaaggacgccgacggggtcctctgccggtacaagaagatcctgggcaccttccagaagctcaagagcatgtcgcgggccttcgagcaccaccgcgtggacaggaacaccgtggcgctgaccacgcccatcgccgagctgctcattgtggcccccgagaagctggccgaggtgggcgagttcgacccctccaaggagcgcctgctcgagtactcccgccgctgctttctggccctggacgacgagacgctcaagaaggtgcaggcgctcaagaagagcaagctgctgctgcccatcacctaccgcttcaagcggtgatcgcaccacgcctccgcgcctccacccgggccttcctcccccgtggaccccggtggatgacctgcccctctccccgccgcgcccctgcccctcctcctcgctccctgggttgggggctcccttagccgggcccccaagcgcgacggccccggaccggccgcggccccttcccgaacgccggcacccccttccgcttgggctgcccagccctgtcctcgccgggccccttcctcctggaaaaccaggcaggcgggtgcccccccctcgagtgggggactgtacagaccccgtctccgccctggccccgcggaggagctgcccacctgattcccggacagacctccccaactccgcgtgagacagagaattattcagataatttaaattaaaaaacgacgtgaaaatttggaataaaattggcct

SEQ ID NO: 418080 - DNA, 2245 bp, Homo sapiens
ggctggggaggagcaggaacagtcaggactggaatctagctttgctccaaagccagctcttaattaccaacatggggatgggggtggcgtgttcctggccctcattttccgggagaggggtaactcccccgattttggcccccacatccctgagaaccttggggtctggctgtaggaggtaggggagctctgaggggtccgcgctggctagttcctgagagagcgttaaaagtagattctcctttcgctccaactttctcggtgtctcaaacactctcctgccttctgggcccattgggcacaccgccacccaatccggggacccccggagactcgccagctctccaggatgggaatttcgtgatgttccctgcctgagcttcggggagggcgggggagtgctgtaaggggctatcgcgcaagtgcagaccctctgcttctgccgcaaacggcgggcctcacctggacccggggactcttcaacgaggggcgctagcctggcccgactgggcgagtccccgcgtccctgcccgttccgtcgctcagttccacgacacgctcccctgccgccccgcctgttcgcgggtgggtgggcgcttccctcggctccccgtgacactttgcagacgctccccggcgccgggcatgggcgccgccgccgtcggtccccgagccggattccgcgagcgggagcccacgtccccagctcacttctcccccaggacctaggcggctgggccccctgcccctgactccaggagcccaggagtttgaagcccaggcgcgttttgcctcagtcctggggtccaggctccctcctccctcagaccaggggtccaggccagaaggtccctcctgtctcacttcacctcccccaggatggaccctccagtccatctgcgtctctccatttgtggctgccgtttctgtccagtgcccctgaggccctcggctgctggggtccgcaggaagccgcgccatgaatgaccggagcagtcggaggcggacaatgaaggacgatgagaccttcgagatctccattcccttcgatgaggcaccccacctagacccacagatcttttacagtctgagcccctctcggagaaacttcgaggagcctccggaggctgcgtcctccgccctggctctgatgaacagcgtcaagacccagctgcacatggctctggagaggaactcctggctgcagaagcgcatcgaggacctggaggaagagagggacttcctgcggtgccagctggacaaattcatctcttctgctcggatggaggcagaggaccactgccggatgaagcctgggcccaggcggatggagggggacagccgtggtggggctgggggcgaggcctcggaccctgagtcagcagcctcctccctcagcggagcgtccgaagaaggcagtgccagtgagaggaggcggcagaagcagaagggaggtgctagtcggaggcgctttgggaagcccaaggcccgggagaggcagcgagtgaaggacgccgacggggtcctctgccggtacaagaagatcctgggcaccttccagaagctcaagagcatgtcgcgggccttcgagcaccaccgcgtggacaggaacaccgtggcgctgaccacgcccatcgccgagctgctcattgtggcccccgagaagctggccgaggtgggcgagttcgacccctccaaggagcgcctgctcgagtactcccgccgctgctttctggccctggacgacgagacgctcaagaaggtgcaggcgctcaagaagagcaagctgctgctgcccatcacctaccgcttcaagcggtgatcgcaccacgcctccgcgcctccacccgggccttcctcccccgtggaccccggtggatgacctgcccctctccccgccgcgcccctgcccctcctcctcgctccctgggttgggggctcccttagccgggcccccaagcgcgacggccccggaccggccgcggccccttcccgaacgccggcacccccttccgcttgggctgcccagccctgtcctcgccgggccccttcctcctggaaaaccaggcaggcgggtgcccccccctcgagtgggggactgtacagaccccgtctccgccctggccccgcggaggagctgcccacctgattcccggacagacctccccaactccgcgtgagacagagaattattcagataatttaaattaaaaaacgacgtgaaaatttggaataaaattggcct

SEQ ID NO: 418081 - DNA, 2057 bp, Homo sapiens
ggctggggaggagcaggaacagtcaggactggaatctagctttgctccaaagccagctcttaattaccaacatggggatgggggtggcgtgttcctggccctcattttccgggagaggggtaactcccccgattttggcccccacatccctgagaaccttggggtctggctgtaggaggtaggggagctctgaggggtccgcgctggctagttcctgagagagcgttaaaagtagattctcctttcgctccaactttctcggtgtctcaaacactctcctgccttctgggcccattgggcacaccgccacccaatccggggacccccggagactcgccagctctccaggatgggaatttcgtgatgttccctgcctgagcttcggggagggcgggggagtgctgtaaggggctatcgcgcaagtgcagaccctctgcttctgccgcaaacggcgggcctcacctggacccggggactcttcaacgaggggcgctagcctggcccgactgggcgagtccccgcgtccctgcccgttccgtcgctcagttccacgacacgctcccctgccgccccgcctgttcgcgggtgggtgggcgcttccctcggctccccgtgacactttgcagacgctccccggcgccgggcatgggcgccgccgccgtcggtccccgagccggattccgcgagcgggatggaccctccagtccatctgcgtctctccatttgtggctgccgtttctgtccagtgcccctgaggccctcggctgctggggtccgcaggaagccgcgccatgaatgaccggagcagtcggaggcggacaatgaaggacgatgagaccttcgagatctccattcccttcgatgaggcaccccacctagacccacagatcttttacagtctgagcccctctcggagaaacttcgaggagcctccggaggctgcgtcctccgccctggctctgatgaacagcgtcaagacccagctgcacatggctctggagaggaactcctggctgcagaagcgcatcgaggacctggaggaagagagggacttcctgcggtgccagctggacaaattcatctcttctgctcggatggaggcagaggaccactgccggatgaagcctgggcccaggcggatggagggggacagccgtggtggggctgggggcgaggcctcggaccctgagtcagcagcctcctccctcagcggagcgtccgaagaaggcagtgccagtgagaggaggcggcagaagcagaagggaggtgctagtcggaggcgctttgggaagcccaaggcccgggagaggcagcgagtgaaggacgccgacggggtcctctgccggtacaagaagatcctgggcaccttccagaagctcaagagcatgtcgcgggccttcgagcaccaccgcgtggacaggaacaccgtggcgctgaccacgcccatcgccgagctgctcattgtggcccccgagaagctggccgaggtgggcgagttcgacccctccaaggagcgcctgctcgagtactcccgccgctgctttctggccctggacgacgagacgctcaagaaggtgcaggcgctcaagaagagcaagctgctgctgcccatcacctaccgcttcaagcggtgatcgcaccacgcctccgcgcctccacccgggccttcctcccccgtggaccccggtggatgacctgcccctctccccgccgcgcccctgcccctcctcctcgctccctgggttgggggctcccttagccgggcccccaagcgcgacggccccggaccggccgcggccccttcccgaacgccggcacccccttccgcttgggctgcccagccctgtcctcgccgggccccttcctcctggaaaaccaggcaggcgggtgcccccccctcgagtgggggactgtacagaccccgtctccgccctggccccgcggaggagctgcccacctgattcccggacagacctccccaactccgcgtgagacagagaattattcagataatttaaattaaaaaacgacgtgaaaatttggaataaaattggcct

SEQ ID NO: 418082 - DNA, 1977 bp, Homo sapiens
ggctggggaggagcaggaacagtcaggactggaatctagctttgctccaaagccagctcttaattaccaacatggggatgggggtggcgtgttcctggccctcattttccgggagaggggtaactcccccgattttggcccccacatccctgagaaccttggggtctggctgtaggaggtaggggagctctgaggggtccgcgctggctagttcctgagagagcgttaaaagtagattctcctttcgctccaactttctcggtgtctcaaacactctcctgccttctgggcccattgggcacaccgccacccaatccggggacccccggagactcgccagctctccaggatgggaatttcgtgatgttccctgcctgagcttcggggagggcgggggagtgctgtaaggggctatcgcgcaagtgcagaccctctgcttctgccgcaaacggcgggcctcacctggacccggggactcttcaacgaggggcgctagcctggcccgactgggcgagtccccgcgtccctgcccgttccgtcgctcagttccacgacacgctcccctgccgccccgcctgttcgcgggtgggtgggcgcttccctcggctccccgtgacactttgcagacgctccccggcgccgggcatgggcgccgccgccgtcggtccccgagccggattccgcgagcgggtgggtgagcgcggggggcctcggcccctcggaccccgggcacccgcgggcgggggatggtggccgcgtttgcacccccgccctagtgcatgttcccgctggaatcgttccacgaccgctccccctcccacccgcgggacaaagggcgggggcgggggggggcgcacccccacgcgtgacctttccccgtactgcgcacgcgcccagcccccaccaccgggggacggtccgcccgcccacgcgagtgcgggggaggggtgtgggggccccgaaggtagaggaggcagcgcgcacgggctggacctcctcctaccctgggaagttggggcagtttccccctgcacctgcctcttccttaggcctggcagtggcccgcgatgagagagggtccttccccttcaggctaggtgtccctggtcaggcgaccccttggggcacccagcaatttagggcttcagcttccttttccttcgatacccaggagcccacgtccccagctcacttctcccccaggacctaggcggctgggccccctgcccctgactccaggagcccaggagtttgaagcccaggcgcgttttgcctcagtcctggggtccaggctccctcctccctcagaccaggggtccaggccagaaggtccctcctgtctcacttcacctcccccaggatggaccctccagtccatctgcgtctctccatttgtggctgccgtttctgtccagtgcccctgaggccctcggctgctggggtccgcaggaagccgcgccatgaatgaccggagcagtcggaggcggacaatgaaggacgatgagaccttcgagatctccattcccttcgatgaggcaccccacctagacccacagatcttttacagtctgagcccctctcggagaaacttcgaggagcctccggaggctgcgtcctccgccctggctctgatgaacagcgtcaagacccagctgcacatggctctggagaggaactcctggctgcagaagcgcatcgaggacctggaggaagagagggacttcctgcggtgccagctggacaaattcatctcttctgctcggatggaggcagagacactgccggatgaagctggccagcggtgagggcaaccggttgtgttgggcagcccacctgataagctctccaagaagccaaaagaggctgaaaggggaacaggggtaagcctgaccaccgaagaggaaacgggacccgaaaaagtcccaaaattggtccacggagtccccagacaagaggaacaacatcaaaaaaaccacg

SEQ ID NO: 418083 - DNA, 1604 bp, Homo sapiens
gcctggtggcgaattcggcacgagggcttccttttccttcgatacccaggagcccacgtccccagctcacttctcccccaggacctaggcggctgggccccctgcccctgactccaggagcccaggagtttgaagcccaggcgcgttttgcctcagtcctggggtccaggctccctcctccctcagaccaggggtccaggccagaaggtccctcctgtctcacttcacctcccccaggatggaccctccagtccatctgcgtctctccatttgtggctgccgtttctgtccagtgcccctgaggccctcggctgctggggtccgcaggaagccgcgccatgaatgaccggagcagtcggaggcggacaatgaaggacgatgagaccttcgagatctccattcccttcgatgaggcaccccacctagacccacagatcttttacagtctgagcccctctcggagaaacttcgaggagcctccggaggctgcgtcctccgccctggctctgatgaacagcgtcaagacccagctgcacatggctctggagaggaactcctggctgcagaagcgcatcgaggacctggaggaagagagggacttcctgcggtgccagctggacaaattcatctcttctgctcggatggaggcagaggaccactgccggatgaagcctgggcccaggcggatggagggggacagccgtggtggggctgggggcgaggcctcggaccctgagtcagcagcctcctccctcagcggagcgtccgaagaaggcagtgccagtgagaggaggcggcagaagcagaagggaggtgctagtcggaggcgctttgggaagcccaaggcccgggagaggcagcgagtgaaggacgccgacggggtcctctgccggtacaagaagatcctgggcaccttccagaagctcaagagcatgtcgcgggccttcgagcaccaccgcgtggacaggaacaccgtggcgctgaccacgcccatcgccgagctgctcattgtggcccccgagaagctggccgaggtgggcgagttcgacccctccaaggagcgcctgctcgagtactcccgccgctgctttctggccctggacgacgagacgctcaagaaggtgcaggcgctcaagaagagcaagctgctgctgcccatcacctaccgcttcaagcggtgatcgcaccacgcctccgcgcctccacccgggccttcctcccccgtggaccccggtggatgacctgcccctctccccgccgcgcccctgcccctcctcctcgctccctgggttgggggctcccttagccgggcccccaagcgcgacggccccggaccggccgcggccccttcccgaacgccggcacccccttccgcttgggctgcccagccctgtcctcgccgggccccttcctcctggaaaaccaggcaggcgggtgcccccccctcgagtgggggactgtacagaccccgtctccgccctggccccgcggaggagctgcccacctgattcccggacagacctccccaactccgcgtgagacagagaattattcagataatttaaattaaaaaacgacgtgaaaatttggaataaaattggcct

SEQ ID NO: 418084 - DNA, 1745 bp, Homo sapiens
aacatgctaggtggcgggtaatggagagggggagtggggatttccccctgcacctgcctcttccttaggcctggcagtggcccgcgatgagagagggtccttccccttcaggctaggtgtccctggtcaggcgaccccttggggcacccagcaatttagggcttcagcttccttttccttcgatacccaggagcccacgtccccagctcacttctcccccaggacctaggcggctgggccccctgcccctgactccaggagcccaggagtttgaagcccaggcgcgttttgcctcagtcctggggtccaggctccctcctccctcagaccaggggtccaggccagaaggtccctcctgtctcacttcacctcccccaggatggaccctccagtccatctgcgtctctccatttgtggctgccgtttctgtccagtgcccctgaggccctcggctgctggggtccgcaggaagccgcgccatgaatgaccggagcagtcggaggcggacaatgaaggacgatgagaccttcgagatctccattcccttcgatgaggcaccccacctagacccacagatcttttacagtctgagcccctctcggagaaacttcgaggagcctccggaggctgcgtcctccgccctggctctgatgaacagcgtcaagacccagctgcacatggctctggagaggaactcctggctgcagaagcgcatcgaggacctggaggaagagagggacttcctgcggtgccagctggacaaattcatctcttctgctcggatggaggcagaggaccactgccggatgaagcctgggcccaggcggatggagggggacagccgtggtggggctgggggcgaggcctcggaccctgagtcagcagcctcctccctcagcggagcgtccgaagaaggcagtgccagtgagaggaggcggcagaagcagaagggaggtgctagtcggaggcgctttgggaagcccaaggcccgggagaggcagcgagtgaaggacgccgacggggtcctctgccggtacaagaagatcctgggcaccttccagaagctcaagagcatgtcgcgggccttcgagcaccaccgcgtggacaggaacaccgtggcgctgaccacgcccatcgccgagctgctcattgtggcccccgagaagctggccgaggtgggcgagttcgacccctccaaggagcgcctgctcgagtactcccgccgctgctttctggccctggacgacgagacgctcaagaaggtgcaggcgctcaagaagagcaagctgctgctgcccatcacctaccgcttcaagcggtgatcgcaccacgcctccgcgcctccacccgggccttcctcccccgtggaccccggtggatgacctgcccctctccccgccgcgcccctgcccctcctcctcgctccctgggttgggggctcccttagccgggcccccaagcgcgacggccccggaccggccgcggccccttcccgaacgccggcacccccttccgcttgggctgcccagccctgtcctcgccgggccccttcctcctggaaaaccaggcaggcgggtgcccccccctcgagtgggggactgtacagaccccgtctccgccctggccccgcggaggagctgcccacctgattcccggacagacctccccaactccgcgtgagacagagaattattcagataatttaaattaaaaaacgacgtgaaaatttggaataaaattggcct

SEQ ID NO: 418085 - DNA, 1568 bp, Homo sapiens
tagcaggctggtacctggtctggagatttatggatccggggactcttcaacgaggggcgctagcctggcccgactgggcgagtccccgcgtccctgcccgttccgtcgctcagttccacgacacgctcccctgccgccccgcctgttcgcgggtgggtgggcgcttccctcggctccccgtgacactttgcagacgctccccggcgccgggcatgggcgccgccgccgtcggtccccgagccggattccgcgagcggtgcccctgaggccctcggctgctggggtccgcaggaagccgcgccatgaatgaccggagcagtcggaggcggacaatgaaggacgatgagaccttcgagatctccattcccttcgatgaggcaccccacctagacccacagatcttttacagtctgagcccctctcggagaaacttcgaggagcctccggaggctgcgtcctccgccctggctctgatgaacagcgtcaagacccagctgcacatggctctggagaggaactcctggctgcagaagcgcatcgaggacctggaggaagagagggacttcctgcggtgccagctggacaaattcatctcttctgctcggatggaggcagaggaccactgccggatgaagcctgggcccaggcggatggagggggacagccgtggtggggctgggggcgaggcctcggaccctgagtcagcagcctcctccctcagcggagcgtccgaagaaggcagtgccagtgagaggaggcggcagaagcagaagggaggtgctagtcggaggcgctttgggaagcccaaggcccgggagaggcagcgagtgaaggacgccgacggggtcctctgccggtacaagaagatcctgggcaccttccagaagctcaagagcatgtcgcgggccttcgagcaccaccgcgtggacaggaacaccgtggcgctgaccacgcccatcgccgagctgctcattgtggcccccgagaagctggccgaggtgggcgagttcgacccctccaaggagcgcctgctcgagtactcccgccgctgctttctggccctggacgacgagacgctcaagaaggtgcaggcgctcaagaagagcaagctgctgctgcccatcacctaccgcttcaagcggtgatcgcaccacgcctccgcgcctccacccgggccttcctcccccgtggaccccggtggatgacctgcccctctccccgccgcgcccctgcccctcctcctcgctccctgggttgggggctcccttagccgggcccccaagcgcgacggccccggaccggccgcggccccttcccgaacgccggcacccccttccgcttgggctgcccagccctgtcctcgccgggccccttcctcctggaaaaccaggcaggcgggtgcccccccctcgagtgggggactgtacagaccccgtctccgccctggccccgcggaggagctgcccacctgattcccggacagacctccccaactccgcgtgagacagagaattattcagataatttaaattaaaaaacgacgtgaaaatttggaataaaattggcct

SEQ ID NO: 418086 - DNA, 1017 bp, Homo sapiens
ggctggggaggagcaggaacagtcaggactggaatctagctttgctccaaagccagctcttaattaccaacatggggatgggggtggcgtgttcctggccctcattttccgggagaggggtaactcccccgattttggcccccacatccctgagaaccttggggtctggctgtaggaggtaggggagctctgaggggtccgcgctggctagttcctgagagagcgttaaaagtagattctcctttcgctccaactttctcggtgtctcaaacactctcctgccttctgggcccattgggcacaccgccacccaatccggggacccccggagactcgccagctctccaggatgggaatttcgtgatgttccctgcctgagcttcggggagggcgggggagtgctgtaaggggctatcgcgcaagtgcagaccctctgcttctgccgcaaacggcgggcctcacctggacccggggactcttcaacgaggggcgctagcctggcccgactgggcgagtccccgcgtccctgcccgttccgtcgctcagttccacgacacgctcccctgccgccccgcctgttcgcgggtgggtgggcgcttccctcggctccccgtgacactttgcagacgctccccggcgccgggcatgggcgccgccgccgtcggtccccgagccggattccgcgagcggtgcccctgaggccctcggctgctggggtccgcaggaagccgcgccatgaatgaccggagcagtcggaggcggacaatgaaggacgatgagaccttcgagatctccattcccttcgatgaggcaccccacctagacccacagatcttttacagtctgagcccctctcggagaaacttcgaggtgtacagaccccgtctccgccctggccccgcggaggagctgcccacctgattcccggacagacctccccaactccgcgtgagacagagaattattcagataatttaaattaaaaaacgacgtgaaaatttggaataaaattggcct

SEQ ID NO: 418087 - DNA, 428 bp, Homo sapiens
agagtgatgtgagagatgatatatgagtggtaaagcggaggttcagtgatcttaaaagccttatctaacaaaagcagaaagataaaaataaaaaaaataaaagctgatgaaggacagaggccagatcaaatgagatgctatcagagaagatcaaagaacatatcacacaaataaattaaatgtgggagggacaaggagagctatacatgtactgatcatctgctatgctggaagtttatttagcaaatgtaatcttatttaatcatctggacccaagggaggtaatctgacctctctgaatctcagcttcatgtgaaaacggggataatattattgagagagaacatttgttacaggggcaaaccctgttccaaggtttctttcactcaaagtataaacaatgaggcactttttacactttagacact

SEQ ID NO: 418088 - DNA, 759 bp, Homo sapiens
gctgcccatcacatggacagtattctgtgacttaatgacaataataaggtcatgaagtctcctatacagggtcttgctctgtcacccaagctggagtgcaatggcgcaaccatggctcactgcagcctcaaactcttgggctcaaatgatcctcctgcctcagcctcctgagtagctgggactataggcacatgctgccacgcccagctgaagtcatgctctctatccatgagcatctttataacttgcatagatatatttgggtgaaatcctgtcttggtctttcccgattctccctgagcaggttccaaacattgtttagggctcaaagggaaattagtcttcagagtttctccaataaagtaattacgggagatcgggtcatttattcaacagattggggtggcctaccatgtgccaagactgtgccaggcactggggatatgatgatgaaaccaaagatgctagcatgaacacaatcactaaaccaaagtcacacaaataaattaaatgtgggagggacaaggagagctatacatgtactgatcatctgctatgctggaagtttatttagcaaatgtaatcttatttaatcatctggacccaagggaggtaatctgacctctctgaatctcagcttcatgtgaaaacggggataatattattgagagagaacatttgttacaggggcaaaccctgttccaaggtttctttcactcaaagtataaacaatgaggcactttttacactttagacact

SEQ ID NO: 418089 - DNA, 726 bp, Homo sapiens
tgggatttggtctctttgactaatcaccaaaaagcaaccaactcctccgactcttccttggcttcaaccttagctggggctgcagcagcagagcgagcagctgtggtggcagcagcaacggggcagcagcacaaaggcagatggatcagccaagaaggccttgaccttttcagcaagtgggaaggtgtaatccgtctccacagacaaggccagtgcgagtatggcggcgtcaaaggtgaagcaggacatgcctccgccggggggctatgggcccatcgactacaaacggaacttgccgcgtcgaggactgtcgggctacagcatgctggccatagggattggaaccctgatctacgggcactggagcataatgaagtggaaccgtgagcgcaggcgcctacaaatcgaggacttcgaggctcgcatcgcgctgttgccactgttacaggcagaaaccgaccggaggaccttgcagatgcttcgggagaacctggaggaggaggccatcatcatgaaggacgtgcccgactggaaggtgggggagtctgtgttccacacaacccgctgggtgccccccttgatcggggagctgtacgggctgcgcaccacagaggaggctctccatgccagccacggcttcatgtggtacacgtaggccctgtgccctccggccacctggatccctgcccctccccactgggacggaataaatgctctgcagacctg

SEQ ID NO: 418090 - DNA, 872 bp, Homo sapiens
cctccctccacggatgcgcttaaaaggcggtggcggtggcggcagcgcccggcgcccgggctcacctcggccatgagcagcgcagccggcccagacccgtcggaggcgcccgaagagcggcatttcctcagcaccgcggaggcagccgccctggagcgggagctgctggaggattatcgctttgggcggcagcagctcgtggagctgtgcggtcatgctagtgccgtggctgtgaccaaggcgttcccgttgcccgctctctcccggaagcagaggacggtgctggtcgtgtgtggcccggagcagaacggggcagtggggctggtctgtgcccggcacctgcgggtgtttgagtatgaacccaccatcttctaccccacacgctcgctggacctgctgcatcgggacctgaccacccagtgcgagaagatggacatccccttcctgagctacctgcccactgaggtgcagctcattaacgaagcctatgggctggtggtggatgccgtactgggccccggcgtggagccgggcgaggtcgggggcccctgcacccgcgcgctggccacgctcaagctgctgtccatccccctcgtgagcctggacatcccctcaggctgggacgcagagaccggcagcgattcggaggacgggctgcggcctgacgtgctggtgtctctcgcggcgcccaagcgctgcgctggccgcttctccgggcgccaccacttcgtggccggcaggttcgtgcccgatgacgtgcgccgcaagttcgctctgcgcctgccgggatacacgggcaccgactgcgtcgcggcactgtgaccgccacccgcggccacaccgcagggaccctcgccaataaacagccctcc

SEQ ID NO: 418091 - DNA, 553 bp, Homo sapiens
  misc_feature (73)..(73): n is a, c, g, or t
ggttgtgaagaagatcgagacacgtgatgggaagctggtggtctgagtcctctgacgtctgccccaaagtgancagctgcggcagcccctcccagcctacccctcctgcgctgccccagagcctgggaaggaggccgctatgcagggtagcactgggaacaggagacccacctgaggctcagccctagccctcagcccacctggggagtttactacctggggaccccccttgcccatgcctccagctacaaaacaattcaattgcttttttttttggtccaaaataaaacctcagctagctctgccaaaaaaaaaaaaaaaaaaaaaagggcggctgctcgcgatctagaaccccgactggagtgggggagtctgtgttccacacaacccgctgggtgccccccttgatcggggagctgtacgggctgcgcaccacagaggaggctctccatgccagccacggcttcatgtggtacacgtaggccctgtgccctccggccacctggatccctgcccctccccactgggacggaataaatgctctgcagacctg

SEQ ID NO: 418092 - DNA, 315 bp, Homo sapiens
agagatgaaaggctgcagaaatgtttattgaatacagtgccaggtttataaataaaacgtatttacaatttccctcgtcgaattcggcacgaggccatcatcatgaaggacgtgcccgactggagtgggggagtctgtgttccacacaacccgctgggtgccccccttgatcggggagctgtacgggctgcgcaccacagaggaggctctccatgccagccacggcttcatgtggtacacgtaggccctgtgccctccggccacctggatccctgcccctccccactgggacggaataaatgctctgcagacctg

SEQ ID NO: 418093 - DNA, 148 bp, Homo sapiens
  misc_feature (25)..(25): n is a, c, g, or t
gcggccgcctactactactactacnactgctcgaattcaagcttctaacgatgtacggggacatgtggtacacgtaggccctgtgccctccggccacctggatccctgcccctccccactgggacggaataaatgctctgcagacctg

SEQ ID NO: 418094 - DNA, 470 bp, Homo sapiens
gattgggagggaaacacctccaaggactgggagagacttgtctgagggcggaggcagagttctagggggcgacaagtctcaccaggacccatgtgccagagagaaaaggctgggtctgatgggggaggggaagtgggggtggggcagcaggactctggtgctgagggcaggccaccctcccagttcccaatccccccggaccctcctccctcaggctgggacgcagagaccggcagcgattcggaggacgggctgcggcctgacgtgctggtgtctctcgcggcgcccaagcgctgcgctggccgcttctccgggcgccaccacttcgtggccggcaggttcgtgcccgatgacgtgcgccgcaagttcgctctgcgcctgccgggatacacgggcaccgactgcgtcgcggcactgtgaccgccacccgcggccacaccgcagggaccctcgccaataaacagccctcc

SEQ ID NO: 418095 - DNA, 1243 bp, Homo sapiens
agcaagggatacccatcaccaccagggagcagaatccgttccaggattggggtgagtccgacttcgagcagcagctgccccccaacatcatgtacccagcccgtgactacgtggagccctgggcttcgcgtagagtccctagacggggcgaaaacgggaaaaggggccttaactggggcacctggctcctttgagagctcggagtttctgactggcctgcgcaacaccccagaggcaaggtgaacgcgagggcctataatgcaagaaccaaggcgagtcacgccctgtctgggcaaaagaggagtaaagacccctcagctgcagcccggcagcgcattcctacccagggtccgccgccagagctttcccgcgcggtcggatagttacactactgtccgggacttcctagccgtgccgcggaccatctcaagtgcttccgccacactcatcatggcggtggcagtaagtcacttccgcccgggaccggaagtgtgggatactgcgagtatggcggcgtcaaaggtgaagcaggacatgcctccgccggggggctatgggcccatcgactacaaacggaacttgccgcgtcgaggactgtcgggctacagcatgctggccatagggattggaaccctgatctacgggcactggagcataatgaagtggaaccgtgagcgcaggcgcctacaaatcgaggacttcgaggctcgcatcgcgctgttgccactgttacaggcagaaaccgaccggaggaccttgcagatgcttcgggagaacctggaggaggaggccatcatcatgaaggacgtgcccgactggaaggtgggggagtctgtgttccacacaacccgctgggtgccccccttgatcggggagctgtacgggctgcgcaccacagaggaggctctccatgccagccacggcttcatgtggtacacgtaggccctgtgccctccggccacctggatccctgcccctccccactgggacggaataaatgctctgcagacctgaaaaaaaacaacaaaaaaaaaaaaaccccgagaggcgcactcaatagtgccgggggggcgcgagacacaaacaggggtattggaatgtgggcagttggctcaataggttggttcccttggacccaagtttttcttggtccaagcggggaagaaccggcgggcgctcccccaatgagagaggcggaataattcgaaaaacgccggtacctggtagagtccccagaaaacat

SEQ ID NO: 418096 - DNA, 1071 bp, Homo sapiens
agcaagggatacccatcaccaccagggagcagaatccgttccaggattggggtgagtccgacttcgagcagcagctgccccccaacatcatgtacccagcccgtgactacgtggagccctgggcttcgcgtagagtccctagacggggcgaaaacgggaaaaggggccttaactggggcacctggctcctttgagagctcggagtttctgactggcctgcgcaacaccccagaggcaaggtgaacgcgagggcctataatgcaagaaccaaggcgagtcacgccctgtctgggcaaaagaggagtaaagacccctcagctgcagcccggcagcgcattcctacccagggtccgccgccagagctttcccgcgcggtcggatagttacactactgtccgggacttcctagccgtgccgcggaccatctcaagtgcttccgccacactcatcatggcggtggcagtaagtcacttccgcccgggaccggaagtgtgggatactgcgagtatggcggcgtcaaaggtgaagcaggacatgcctccgccggggggctatgggcccatcgactacaaacggaacttgccgcgtcgaggactgtcgggctacagcatgctggccatagggattggaaccctgatctacgggcactggagcataatgaagtggaaccgtgagcgcaggcgcctacaaatcgaggacttcgaggctcgcatcgcgctgttgccactgttacaggcagaaaccgaccggaggaccttgcagatgcttcgggagaacctggaggaggaggccatcatcatgaaggacgtgcccgactggaaggtgggggagtctgtgttccacacaacccgctgggtgccccccttgatcggggagctgtacgggctgcgcaccacagaggaggctctccatgccagccacggcttcatgtggtacacgtaggccctgtgccctccggccacctggatccctgcccctccccactgggacggaataaatgctctgcagacctgaagtggaaccgtgagcgcaggcgcctacaaatcgaggacttcgaggctcgcatcgcgc

SEQ ID NO: 418097 - DNA, 1170 bp, Homo sapiens
agcaagggatacccatcaccaccagggagcagaatccgttccaggattggggtgagtccgacttcgagcagcagctgccccccaacatcatgtacccagcccgtgactacgtggagccctgggcttcgcgtagagtccctagacggggcgaaaacgggaaaaggggccttaactggggcacctggctcctttgagagctcggagtttctgactggcctgcgcaacaccccagaggcaaggtgaacgcgagggcctataatgcaagaaccaaggcgagtcacgccctgtctgggcaaaagaggagtaaagacccctcagctgcagcccggcagcgcattcctacccagggtccgccgccagagctttcccgcgcggtcggatagttacactactgtccgggacttcctagccgtgccgcggaccatctcaagtgcttccgccacactcatcatggcggtggcagtaagtcacttccgcccgggaccggaagtgtgggatactgcgagtatggcggcgtcaaaggtgaagcaggacatgcctccgccggggggctatgggcccatcgactacaaacggaacttgccgcgtcgaggactgtcggaaaacccctggcatgggggcagaggtgtcacagtccaagcagcctcactcctgagaagccgccagtgtcccctgattgcagagtgggcagcgcctggagctgtggaggagggtgtctgggggcgggctggcccgctgagcagcgcctctcttcacaggctacagcatgctggccatagggattggaaccctgatctacgggcactggagcataatgaagtggaaccgtgagcgcaggcgcctacaaatcgaggacttcgaggctcgcatcgcgctgttgccactgttacaggcagaaaccgaccggaggaccttgcagatgcttcgggagaacctggaggaggaggccatcatcatgaaggacgtgcccgactggaaggtgggggagtctgtgttccacacaacccgctgggtgccccccttgatcggggagctgtacgggctgcgcaccacagaggaggctctccatgccagccacggcttcatgtggtacacgtaggccctgtgccctccggccacctggatccctgcccctccccactgggacggaataaatgctctgcagacctg

SEQ ID NO: 418098 - DNA, 1363 bp, Homo sapiens
agcaagggatacccatcaccaccagggagcagaatccgttccaggattggggtgagtccgacttcgagcagcagctgccccccaacatcatgtacccagcccgtgactacgtggagccctgggcttcgcgtagagtccctagacggggcgaaaacgggaaaaggggccttaactggggcacctggctcctttgagagctcggagtttctgactggcctgcgcaacaccccagaggcaaggtgaacgcgagggcctataatgcaagaaccaaggcgagtcacgccctgtctgggcaaaagaggagtaaagacccctcagctgcagcccggcagcgcattcctacccagggtccgccgccagagctttcccgcgcggtcggatagttacactactgtccgggacttcctagccgtgccgcggaccatctcaagtgcttccgccacactcatcatggcggtggcagtaagtcacttccgcccgggaccggaagtgtgggatactgcgagtatggcggcgtcaaaggtgaagcaggacatgcctccgccggggggctatgggcccatcgactacaaacggaacttgccgcgtcgaggactgtcggaaaacccctggcatgggggcagaggtgtcacagtccaagcagcctcactcctgagaagccgccagtgtcccctgattgcagagtgggcagcgcctggagctgtggaggagggtgtctgggggcgggctggcccgctgagcagcgcctctcttcacaggctacagcatgctggccatagggattggaaccctgatctacgggcactggagcataatgaagtggaaccgtgagcgcaggcgcctacaaatcgaggacttcgaggctcgcatcgcgctgttgccactgttacaggcagaaaccgaccggaggaccttgcagatgcttcgggagaacctggaggaggaggccatcatcatgaaggacgtgcccgactggaaggtgggggagtctgtgttccacacaacccgctgggtgccccccttgatcggggagctgtacgggctgcgcaccacagaggaggctctccatgccagccacggcttcatgtggtacacgtaggccctgtgccctccggccacctggatccctgcccctccccactgggacggaataaatgctctgcagacctgaacacacaccaacaaaacaccaccaccacacaaaccacaccggcgccagacaggcacacaaaaggccccacgcggtgagcaccaacgcagcaccgcgccaacaccgagacaaggaaacactcgcgggccccaacaaagggacaccaacacaacacagaagacaacgacccgcctccaagcaccaacacaaccg

SEQ ID NO: 418099 - DNA, 2061 bp, Homo sapiens
agcaagggatacccatcaccaccagggagcagaatccgttccaggattggggtgagtccgacttcgagcagcagctgccccccaacatcatgtacccagcccgtgactacgtggagccctgggcttcgcgtagagtccctagacggggcgaaaacgggaaaaggggccttaactggggcacctggctcctttgagagctcggagtttctgactggcctgcgcaacaccccagaggcaaggtgaacgcgagggcctataatgcaagaaccaaggcgagtcacgccctgtctgggcaaaagaggagtaaagacccctcagctgcagcccggcagcgcattcctacccagggtccgccgccagagctttcccgcgcggtcggatagttacactactgtccgggacttcctagccgtgccgcggaccatctcaagtgcttccgccacactcatcatggcggtggcagtaagtcacttccgcccgggaccggaagtgtgggatactgcgagtatggcggcgtcaaaggtgaagcaggacatgcctccgccggggggctatgggcccatcgactacaaacggaacttgccgcgtcgaggactgtcgggctacagcatgctggccatagggattggaaccctgatctacgggcactggagcataatgaagtggaaccgtgagcgcaggcgcctacaaatcgaggacttcgaggctcgcatcgcgctgttgccactgttacaggcagaaaccgaccggaggtagcaccgcaggggccaaggttgggaggtcactggccggaaggccccaggctgcagggcctgacctgcatccccgaaggtggccagaatgcacgtgggggccatcgccctgtgccgtcagctgcatcctcaggcgtggagacttagtggagacccaagggggcgaaccggaaggcttcctggaggaggaggcagcactggggttggggcaagagaaaagctaggagttggctgggggaaaaggagacagggtcggagggaggcttgaaggggtgctactaggggccctaggcaggggcccctcagggcactgaggccccacccccaccatcggccccatccccacaggaccttgcagatgcttcgggagaacctggaggaggaggccatcatcatgaaggacgtgcccgactggaagggccttggagctgcagcccccacttgccgacatgggaagagcggagcttagctcaaatgctaccacctcccttgtccagaggaggaaacaggcctggggaaggcagtcatggctagagcagatttggaacgcagggcctgtttgccagagcaccgcggaggcagccgccctggagcgggagctgctggaggattatcgctttgggcggcagcagctcgtggagctgtgcggtcatgctagtgccgtggctgtgaccaaggcgttcccgttgcccgctctctcccggaagcagaggacggtgctggtcgtgtgtggcccggagcagaacggggcagtggggctggtctgtgcccggcacctgcgggtgtttgagtatgaacccaccatcttctaccccacacgctcgctggacctgctgcatcgggacctgaccacccagtgcgagaagatggacatccccttcctgagctacctgcccactgaggtgcagctcattaacgaagcctatgggctggtggtggatgccgtactgggccccggcgtggagccgggcgaggtcgggggcccctgcacccgcgcgctggccacgctcaagctgctgtccatccccctcgtgagcctggacatcccctcaggctgggacgcagagaccggcagcgattcggaggacgggctgcggcctgacgtgctggtgtctctcgcggcgcccaagcgctgcgctggccgcttctccgggcgccaccacttcgtggccggcaggttcgtgcccgatgacgtgcgccgcaagttcgctctgcgcctgccgggatacacgggcaccgactgcgtcgcggcactgtgaccgccacccgcggccacaccgcagggaccctcgccaataaacagccctcc

SEQ ID NO: 418100 - DNA, 1661 bp, Homo sapiens
tttaggataaaaaaagtttttaattgaaaagaaagtagaaagccaacagtcttgtgggcagtcacccgtgcagctgcctgcacccgccctcctctcaggctcctggtgggctctgcccacagcccttgcccttcccgcgaccctcgccctgccccctgcctgcctccccgcccccctccgcctcttcccccagcagcaccctggcccctgaggtctgtgctgcctgtgctcccccgacctagcctggtctgacctgagtgtgggtttcgggctttcacaggcgcctacaaatcgaggacttcgaggctcgcatcgcgctgttgccactgttacaggcagaaaccgaccggaggtagcaccgcaggggccaaggttgggaggtcactggccggaaggccccaggctgcagggcctgacctgcatccccgaaggtggccagaatgcacgtgggggccatcgccctgtgccgtcagctgcatcctcaggcgtggagacttagtggagacccaagggggcgaaccggaaggcttcctggaggaggaggcagcactggggttggggcaagagaaaagctaggagttggctgggggaaaaggagacagggtcggagggaggcttgaaggggtgctactaggggccctaggcaggggcccctcagggcactgaggccccacccccaccatcggccccatccccacaggaccttgcagatgcttcgggagaacctggaggaggaggccatcatcatgaaggacgtgcccgactggaagggccttggagctgcagcccccacttgccgacatgggaagagcggagcttagctcaaatgctaccacctcccttgtccagaggaggaaacaggcctggggaaggcagtcatggctagagcagatttggaacgcagggcctgtttgccagagcaccgcggaggcagccgccctggagcgggagctgctggaggattatcgctttgggcggcagcagctcgtggagctgtgcggtcatgctagtgccgtggctgtgaccaaggcgttcccgttgcccgctctctcccggaagcagaggacggtgctggtcgtgtgtggcccggagcagaacggggcagtggggctggtctgtgcccggcacctgcgggtgtttgagtatgaacccaccatcttctaccccacacgctcgctggacctgctgcatcgggacctgaccacccagtgcgagaagatggacatccccttcctgagctacctgcccactgaggtgcagctcattaacgaagcctatgggctggtggtggatgccgtactgggccccggcgtggagccgggcgaggtcgggggcccctgcacccgcgcgctggccacgctcaagctgctgtccatccccctcgtgagcctggacatcccctcaggctgggacgcagagaccggcagcgattcggaggacgggctgcggcctgacgtgctggtgtctctcgcggcgcccaagcgctgcgctggccgcttctccgggcgccaccacttcgtggccggcaggttcgtgcccgatgacgtgcgccgcaagttcgctctgcgcctgccgggatacacgggcaccgactgcgtcgcggcactgtgaccgccacccgcggccacaccgcagggaccctcgccaataaacagccctcc

SEQ ID NO: 418101 - DNA, 1138 bp, Homo sapiens
agcaagggatacccatcaccaccagggagcagaatccgttccaggattggggtgagtccgacttcgagcagcagctgccccccaacatcatgtacccagcccgtgactacgtggagccctgggcttcgcgtagagtccctagacggggcgaaaacgggaaaaggggccttaactggggcacctggctcctttgagagctcggagtttctgactggcctgcgcaacaccccagaggcaaggtgaacgcgagggcctataatgcaagaaccaaggcgagtcacgccctgtctgggcaaaagaggagtaaagacccctcagctgcagcccggcagcgcattcctacccagggtccgccgccagagctttcccgcgcggtcggatagttacactactgtccgggacttcctagccgtgccgcggaccatctcaagtgcttccgccacactcatcatggcggtggcagtaagtcacttccgcccgggaccggaagtgtgggatactgcgagtatggcggcgtcaaaggtgaagcaggacatgcctccgccggggggctatgggcccatcgactacaaacggaacttgccgcgtcgaggactgtcgggctacagcatgctggccatagggattggaaccctgatctacgggcactggagcataatgaagtggaaccgtgagcgcaggtagggcccctggtgggcgttgtctgaaagtgcccccccggcgagttgtcggggtcctgtagcattccgctgttgtctgtgctggcgaggggtgaacgggccccttggacttggctgtgcaatcccaggccccagaaagtgcagatccagacccagcacttccacttctaggctctgtcctcgagatgtctccatgtctgcaatcccagcactttgggaggccaaggtgggagcattgcttgagcccaggagttcaagaccagcctgggcaacagagggaaaccctgtcctcgccaccccaaaaaatgtgtctagtgaggagggttgggacccgtggatccagattaggacaggatatgagtggggggcctgcctcgggccctctaagcaggattttgtcagaggtgaccaggctcaaaccagaccacaccaggcagtggacacacagggccagatga

SEQ ID NO: 418102 - DNA, 431 bp, Homo sapiens
agcaaggccccactggtgctcagtaaatattcatgatggcctaggtccttcctggggtgcagggcagggggcttcaccctgcagagccaagaggtagcacggccacccctagagtccggggggtggctgggcagcccccacagggcactgcctgtccctggcagctgtgtgcagcccccgcagggcagcacgcggaactgtggcccaggtggccgggagccaccatggacactgtcagaactgcccttccacttcagggccagcctgccgcccagggtccaaacagccttctagaacacgatggacctggggcccccctagcaaccaccatctagaccctcaggcctcctgaggttgctgcctggcttgtacctttcagaaaacccctggcatgggggcagaggtgtcacagtccaagcagcctcactcct

SEQ ID NO: 418103 - DNA, 1013 bp, Homo sapiens
agcaagggatacccatcaccaccagggagcagaatccgttccaggattggggtgagtccgacttcgagcagcagctgccccccaacatcatgtacccagcccgtgactacgtggagccctgggcttcgcgtagagtccctagacggggcgaaaacgggaaaaggggccttaactggggcacctggctcctttgagagctcggagtttctgactggcctgcgcaacaccccagaggcaaggtgaacgcgagggcctataatgcaagaaccaaggcgagtcacgccctgtctgggcaaaagaggagtaaagacccctcagctgcagcccggcagcgcattcctacccagggtccgccgccagagctttcccgcgcggtcggatagttacactactgtccgggacttcctagccgtgccgcggaccatctcaagtgcttccgccacactcatcatggcggtggcagtaagtcacttccgcccgggaccggaagtgtgggatactgcgagtatggcggcgtcaaaggtgaagcaggacatgcctccgccggggggctatgggcccatcgactacaaacggaacttgccgcgtcgaggactgtcgggctacagcatgctggccatagggattggaaccctgatctacgggcactggagcataatgaagtggaaccgtgagcgcaggcgcctacaaatcgaggacttcgaggctcgcatcgcgctgttgccactgttacaggcagaaaccgaccggaggaccttgcagatgcttcgggagaacctggaggaggaggccatcatcatgaaggacgtgcccgactggaaggtgggggagtctgtgttccacacaacccgctgggtgccccccttgatcggggagctgtacgggctgcgcaccacagaggaggctctccatgccagccacggcttcatgtggtacacgtaggccctgtgccctccggccacctggatccctgcccctccccactgggacggaataaatgctctgcagacctg

SEQ ID NO: 418104 - DNA, 539 bp, Homo sapiens
cttcagcctcgccaaaaagtccatggaaactggatgcgtcccatcagcggtgccccaccgtcaggccaaggaatttatgtcctcttggactgacaagagcccatcgggtctggcctcgtgccgaattcgcacgtgcagctcattaacgaagcctatgggctggtggtggatgccgtactgggccccggcgtggagccgggcgaggtcgggggcccctgcacccgcgcgctggccacgctcaagctgctgtccatccccctcgtgagcctggacatcccctcaggctgggacgcagagaccggcagcgattcggaggacgggctgcggcctgacgtgctggtgtctctcgcggcgcccaagcgctgcgctggccgcttctccgggcgccaccacttcgtggccggcaggttcgtgcccgatgacgtgcgccgcaagttcgctctgcgcctgccgggatacacgggcaccgactgcgtcgcggcactgtgaccgccacccgcggccacaccgcagggaccctcgccaataaacagccctcc

SEQ ID NO: 418105 - DNA, 1159 bp, Homo sapiens
agcaagggatacccatcaccaccagggagcagaatccgttccaggattggggtgagtccgacttcgagcagcagctgccccccaacatcatgtacccagcccgtgactacgtggagccctgggcttcgcgtagagtccctagacggggcgaaaacgggaaaaggggccttaactggggcacctggctcctttgagagctcggagtttctgactggcctgcgcaacaccccagaggcaaggtgaacgcgagggcctataatgcaagaaccaaggcgagtcacgccctgtctgggcaaaagaggagtaaagacccctcagctgcagcccggcagcgcattcctacccagggtccgccgccagagctttcccgcgcggtcggatagttacactactgtccgggacttcctagccgtgccgcggaccatctcaagtgcttccgccacactcatcatggcggtggcagtaagtcacttccgcccgggaccggaagtgtgggatactgcgagtatggcggcgtcaaaggtgaagcaggacatgcctccgccggggggctatgggcccatcgactacaaacggaacttgccgcgtcgaggactgtcgggctacagcatgctggccatagggattggaaccctgatctacgggcactggagcataatgaagtggaaccgtgagcgcaggcgcctacaaatcgaggacttcgaggctcgcatcgcgctgttgccactgttacaggcagaaaccgaccggaggaccttgcagatgcttcgggagaacctggaggaggaggccatcatcatgaaggacgtgcccgactggaaggtgggggagtctgtgttccacacaacccgctgggtgccccccttgatcggggagctgtacgggctgcgcaccacagaggaggctctccatgccagccacggcttcatgtggtacacgtaggccctgtgccctccggccacctggatccctgcccctccccactgggacggaataaatgctctgcagacctgaaaaaaaaaaaaaaaaaacaaaaaaaaaaaaaaaaaaaaaacaacaaaaaaaaaaaaacagggggggggcagcaaacaaaaaaccccacagaggggccaagataagagcagacacacagggtattgtgagacaagggggcgcccag

SEQ ID NO: 418106 - DNA, 1364 bp, Homo sapiens
  misc_feature (1209)..(1209): n is a, c, g, or t
agcaagggatacccatcaccaccagggagcagaatccgttccaggattggggtgagtccgacttcgagcagcagctgccccccaacatcatgtacccagcccgtgactacgtggagccctgggcttcgcgtagagtccctagacggggcgaaaacgggaaaaggggccttaactggggcacctggctcctttgagagctcggagtttctgactggcctgcgcaacaccccagaggcaaggtgaacgcgagggcctataatgcaagaaccaaggcgagtcacgccctgtctgggcaaaagaggagtaaagacccctcagctgcagcccggcagcgcattcctacccagggtccgccgccagagctttcccgcgcggtcggatagttacactactgtccgggacttcctagccgtgccgcggaccatctcaagtgcttccgccacactcatcatggcggtggcagtaagtcacttccgcccgggaccggaagtgtgggatactgcgagtatggcggcgtcaaaggtgaagcaggacatgcctccgccggggggctatgggcccatcgactacaaacggaacttgccgcgtcgaggactgtcgggctacagcatgctggccatagggattggaaccctgatctacgggcactggagcataatgaagtggaaccgtgagcgcaggcgcctacaaatcgaggacttcgaggctcgcatcgcgctgttgccactgttacaggcagaaaccgaccggaggaccttgcagatgcttcgggagaacctggaggaggaggccatcatcatgaaggacgtgcccgactggaaggtgggggagtctgtgttccacacaacccgctgggtgccccccttgatcggggagctgtacgggctgcgcaccacagaggaggctctccatgccagccacggcttcatgtggtacacgtaggccctgtgccctccggccacctggatccctgcccctccccactgggacggaataaatgctctgcagacctgaaaaaaaaaaaaaaaaaacaaaaaaaaaaaaaaccgggggctttttttcgggggggggaaaaaagggttttaaagggccgtgggttatttgttcccggcccccttttttttttccaaggggggagatcggcgggcccctaaagagggcggttaaattcgaaaacgccggtactgtagtgttccggctcagaacacncacacgaggggagagaacgggagacaacgacagcaagcacacacaagcagaacgtaggcagacgaagacgaggacgatcgccacgcacgcagacacagcaccataaagcatatcacaatgtcacacatcacagcagcgactctacacggcacact

SEQ ID NO: 418107 - DNA, 1206 bp, Homo sapiens
agcaagggatacccatcaccaccagggagcagaatccgttccaggattggggtgagtccgacttcgagcagcagctgccccccaacatcatgtacccagcccgtgactacgtggagccctgggcttcgcgtagagtccctagacggggcgaaaacgggaaaaggggccttaactggggcacctggctcctttgagagctcggagtttctgactggcctgcgcaacaccccagaggcaaggtgaacgcgagggcctataatgcaagaaccaaggcgagtcacgccctgtctgggcaaaagaggagtaaagacccctcagctgcagcccggcagcgcattcctacccagggtccgccgccagagctttcccgcgcggtcggatagttacactactgtccgggacttcctagccgtgccgcggaccatctcaagtgcttccgccacactcatcatggcggtggcagtaagtcacttccgcccgggaccggaagtgtgggatactgcgagtatggcggcgtcaaaggtgaagcaggacatgcctccgccggggggctatgggcccatcgactacaaacggaacttgccgcgtcgaggactgtcgggctacagcatgctggccatagggattggaaccctgatctacgggcactggagcataatgaagtggaaccgtgagcgcaggcgcctacaaatcgaggacttcgaggctcgcatcgcgctgttgccactgttacaggcagaaaccgaccggaggaccttgcagatgcttcgggagaacctggaggaggaggccatcatcatgaaggacgtgcccgactggaaggtgggggagtctgtgttccacacaacccgctgggtgccccccttgatcggggagctgtacgggctgcgcaccacagaggaggctctccatgccagccacggcttcatgtggtacacgtaggccctgtgccctccggccacctggatccctgcccctccccactgggacggaataaatgctctgcagacctgaacacacaccaacaaaacaccaccaccacacaaaccacaccggcgccagacaggcacacaaaaggccccacgcggtgagcaccaacgcagcaccgcgccaacaccgagacaaggaaacactcgcgggccccaacaaagggacaccaacacaacacagaagacaacgacccgcctccaagcaccaacacaaccg

SEQ ID NO: 418108 - DNA, 1315 bp, Homo sapiens
agcaagggatacccatcaccaccagggagcagaatccgttccaggattggggtgagtccgacttcgagcagcagctgccccccaacatcatgtacccagcccgtgactacgtggagccctgggcttcgcgtagagtccctagacggggcgaaaacgggaaaaggggccttaactggggcacctggctcctttgagagctcggagtttctgactggcctgcgcaacaccccagaggcaaggtgaacgcgagggcctataatgcaagaaccaaggcgagtcacgccctgtctgggcaaaagaggagtaaagacccctcagctgcagcccggcagcgcattcctacccagggtccgccgccagagctttcccgcgcggtcggatagttacactactgtccgggacttcctagccgtgccgcggaccatctcaagtgcttccgccacactcatcatggcggtggcagtaagtcacttccgcccgggaccggaagtgtgggatactgcgagtatggcggcgtcaaaggtgaagcaggacatgcctccgccggggggctatgggcccatcgactacaaacggaacttgccgcgtcgaggactgtcgggctacagcatgctggccatagggattggaaccctgatctacgggcactggagcataatgaagtggaaccgtgagcgcaggcgcctacaaatcgaggacttcgaggctcgcatcgcgctgttgccactgttacaggcagaaaccgaccggaggaccttgcagatgcttcgggagaacctggaggaggaggccatcatcatgaaggacgtgcccgactggaaggtgggggagtctgtgttccacacaacccgctgggtgccccccttgatcggggagctgtacgggctgcgcaccacagaggaggctctccatgccagccacggcttcatgtggtacacgtaggccctgtgccctccggccacctggatccctgcccctccccactgggacggaataaatgctctgcagacctgtggcctgcctgttttcctggggactgggggaaagaagggggagagggcccagctaggcaccaccggatcacatgtagcatggggacgcagcagatatgcacagggtgacctcaaaacacacctaggggctgcccctggatccactggcggcctcctctctgcctccgatatacctggactctcctgcctcccttttgaaaccatgcctgtcagcagcccacttacctctccaggctgggggcccctgggtcagctttgggtcagaccttctccacggaggtctggagagtggggggagcctt

SEQ ID NO: 418109 - DNA, 1713 bp, Homo sapiens
agcaagggatacccatcaccaccagggagcagaatccgttccaggattggggtgagtccgacttcgagcagcagctgccccccaacatcatgtacccagcccgtgactacgtggagccctgggcttcgcgtagagtccctagacggggcgaaaacgggaaaaggggccttaactggggcacctggctcctttgagagctcggagtttctgactggcctgcgcaacaccccagaggcaaggtgaacgcgagggcctataatgcaagaaccaaggcgagtcacgccctgtctgggcaaaagaggagtaaagacccctcagctgcagcccggcagcgcattcctacccagggtccgccgccagagctttcccgcgcggtcggatagttacactactgtccgggacttcctagccgtgccgcggaccatctcaagtgcttccgccacactcatcatggcggtggcagtaagtcacttccgcccgggaccggaagtgtgggatactgcgagtatggcggcgtcaaaggtgaagcaggacatgcctccgccggggggctatgggcccatcgactacaaacggaacttgccgcgtcgaggactgtcgggctacagcatgctggccatagggattggaaccctgatctacgggcactggagcataatgaagtggaaccgtgagcgcaggcgcctacaaatcgaggacttcgaggctcgcatcgcgctgttgccactgttacaggcagaaaccgaccggaggaccttgcagatgcttcgggagaacctggaggaggaggccatcatcatgaaggacgtgcccgactggaagggccttggagctgcagcccccacttgccgacatgggaagagcggagcttagctcaaatgctaccacctcccttgtccagaggaggaaacaggcctggggaaggcagtcatggctagagcagatttggaacgcagggcctgtttgccagagcaccgcggaggcagccgccctggagcgggagctgctggaggattatcgctttgggcggcagcagctcgtggagctgtgcggtcatgctagtgccgtggctgtgaccaaggcgttcccgttgcccgctctctcccggaagcagaggacggtgctggtcgtgtgtggcccggagcagaacggggcagtggggctggtctgtgcccggcacctgcgggtgtttgagtatgaacccaccatcttctaccccacacgctcgctggacctgctgcatcgggacctgaccacccagtgcgagaagatggacatccccttcctgagctacctgcccactgaggtgcagctcattaacgaagcctatgggctggtggtggatgccgtactgggccccggcgtggagccgggcgaggtcgggggcccctgcacccgcgcgctggccacgctcaagctgctgtccatccccctcgtgagcctggacatcccctcaggctgggacgcagagaccggcagcgattcggaggacgggctgcggcctgacgtgctggtgtctctcgcggcgcccaagcgctgcgctggccgcttctccgggcgccaccacttcgtggccggcaggttcgtgcccgatgacgtgcgccgcaagttcgctctgcgcctgccgggatacacgggcaccgactgcgtcgcggcactgtgaccgccacccgcggccacaccgcagggaccctcgccaataaacagccctcc

SEQ ID NO: 418110 - DNA, 1022 bp, Homo sapiens
cctccctccacggatgcgcttaaaaggcggtggcggtggcggcagcgcccggcgcccgggctcacctcggccatgagcagcgcagccggcccagacccgtcggaggcgcccgaagagcggcatttcctcagggccttggagctgcagcccccacttgccgacatgggaagagcggagcttagctcaaatgctaccacctcccttgtccagaggaggaaacaggcctggggaaggcagtcatggctagagcagatttggaacgcagggcctgtttgccagagcaccgcggaggcagccgccctggagcgggagctgctggaggattatcgctttgggcggcagcagctcgtggagctgtgcggtcatgctagtgccgtggctgtgaccaaggcgttcccgttgcccgctctctcccggaagcagaggacggtgctggtcgtgtgtggcccggagcagaacggggcagtggggctggtctgtgcccggcacctgcgggtgtttgagtatgaacccaccatcttctaccccacacgctcgctggacctgctgcatcgggacctgaccacccagtgcgagaagatggacatccccttcctgagctacctgcccactgaggtgcagctcattaacgaagcctatgggctggtggtggatgccgtactgggccccggcgtggagccgggcgaggtcgggggcccctgcacccgcgcgctggccacgctcaagctgctgtccatccccctcgtgagcctggacatcccctcaggctgggacgcagagaccggcagcgattcggaggacgggctgcggcctgacgtgctggtgtctctcgcggcgcccaagcgctgcgctggccgcttctccgggcgccaccacttcgtggccggcaggttcgtgcccgatgacgtgcgccgcaagttcgctctgcgcctgccgggatacacgggcaccgactgcgtcgcggcactgtgaccgccacccgcggccacaccgcagggaccctcgccaataaacagccctcc

SEQ ID NO: 418111 - DNA, 944 bp, Homo sapiens
agaaaggtggaagaatgtctgcaactcaggcggagaataaacaaaccgcactccgggcgacgggcagtggctggatgcacgtttttcctgcaccgacctggcagagcctgagaccgggcctctgcatctccagcggggaaactgaggccccaagaggcccaacccctcatccagaacagctcacctcctgtcctatcctgttgcctccaggcccaagccccatcccttcccctactccgggcctcagtttcctctccaggcaaggaggaatctggactgtgcctgtgcctttgctgtgtcccctaccaccaggcgttcccgttgcccgctctctcccggaagcagaggacggtgctggtcgtgtgtggcccggagcagaacggggcagtggggctggtctgtgcccggcacctgcgggtgtttgagtatgaacccaccatcttctaccccacacgctcgctggacctgctgcatcgggacctgaccacccagtgcgagaagatggacatccccttcctgagctacctgcccactgaggtgcagctcattaacgaagcctatgggctggtggtggatgccgtactgggccccggcgtggagccgggcgaggtcgggggcccctgcacccgcgcgctggccacgctcaagctgctgtccatccccctcgtgagcctggacatcccctcaggctgggacgcagagaccggcagcgattcggaggacgggctgcggcctgacgtgctggtgtctctcgcggcgcccaagcgctgcgctggccgcttctccgggcgccaccacttcgtggccggcaggttcgtgcccgatgacgtgcgccgcaagttcgctctgcgcctgccgggatacacgggcaccgactgcgtcgcggcactgtgaccgccacccgcggccacaccgcagggaccctcgccaataaacagccctcc

SEQ ID NO: 418112 - DNA, 432 bp, Homo sapiens
agaaaaggctgggtctgatgggggaggggaagtgggggtggggcagcaggactctggtctgagggcagaggctcagtgttggaggggagaggagaggaggcagggacaggatggactctaggctgagggcaggccaccctcccagttcccaatccccccggaccctcctccctcaggctgggacgcagagaccggcagcgattcggaggacgggctgcggcctgacgtgctggtgtctctcgcggcgcccaagcgctgcgctggccgcttctccgggcgccaccacttcgtggccggcaggttcgtgcccgatgacgtgcgccgcaagttcgctctgcgcctgccgggatacacgggcaccgactgcgtcgcggcactgtgaccgccacccgcggccacaccgcagggaccctcgccaataaacagccctcc

SEQ ID NO: 418113 - DNA, 2800 bp, Homo sapiens
cggggcagtaggaacgccgagtcggctgccgtggctgtgctgagggtggcggccggatagctgatgttctaatcatgtcagataaagatgatattgagactccactgctaactgaagcagcccccatccttgaagatggaaactgtgagccagccaagaattctgagtctgttgaccaaggtgccaaaccagagagtaaatcagaacctgtagtttccactcggaaaagaccagagaccaaaccttccagtgaccttgagacttcaaaagttctccctattcaggataatgtttccaaagatgtaccccagaccagatggggttattgggggagctggggcaagtccatactctcctcagcctcggctacagtagctacagtaggacaaggcatttcaaatgtcatcgagaaggcagagacttcccttggaatccctagtcccagtgaaatttcaactgaagtcaagtatgtagcaggagagacaaatgccaaagagaatgaaaactcctccccagtggctggggcatttggtgtattctctaccatctctactgctgttcagagcacaggaaagagtgttataagtgggggtttggatgccttagaattcattggaaaaaagacaatggatgtgatagcagaaggggatcctggatttaaaagaaccaagggtctgatgaaccgaaatgctacactatctcaggttttacgagaggcgaaggagaaagaagagatacggacctccaatgaggttaccgtggaaacagacaagaaaactcattatgggctactctttgatgaatttcaaggcctttcacatctagaagctctggagatgctttcccaagaaagtgaaataaaggtgaaatctatccttaattctctgagtggagaagaattagagactctaaaagttgaattagagcaactcaaagaaacattttctctagcagaattttgtgaagaagaggaagaagagaaaaaaggggatgaagattttaccaaggacataacagagctgttttcccagctgcacgtttcctccaaaccagagaaacttgccagggcaagaaataccgcccacgaatggatcaggaagtctctgaccaagccattagcagagaatgaagaaggagaaaaacagtcggaagcagaaaatactgagcaagtcaacaaaaattcaatagaggatatccatgcgtttgcaatccggagcctggctgaactgactgcctgctcaattgaactattccacaaaacagctgcattggttctgcatggcaggaagcaggaagtgacagccatagaaaggagccaaactctttcccagatgacaattgtgttgtgtaaagagttgtcctctctgtctaaagagttcactacctgcctaacaactgctggggtcaaagaaatggcagatgtccttaacccattaatcactgcagtatttctagaggcatcaaacagtgcctcctacatccaggacgcctttcagctactcttacctgtgctagagatctctctcattgagaacaagattgaatcacacagacatgagctgcagggccagaaacctttgttagaacattgaagaatggagatgttttgacctgggacttgtgacggccaaggaatgccaccttattctggctactcctgcagaaatgaaggagtggggttattttagtatataaaaattcaggcaggagagatggtttaaagaggaagattgttgccttcagtgtttgattgaagtattcaggttctcacagtattctttccagttgttgtaattcataaattatttgaaaagaaacttttgtagaaagtccaagaataataactctagataaagattagtgggacactcaggcaaaaatgttggtctttctttgacatgttgcaaaatgttatcaattttgtcatggatataatttgcagcccatggatataactggttgataagccagagaaaaataatttagtgttctaaaattcatggcatgtgtggtttattaatgccatgtactttctcctttctggaataaaatctatggctttaagaaaactgagcatatgtaaactctgtgatgattaccctttatcacatgaattcttggaaatagaaagtttcatctgcttttttaaattcttagtagatatttggcattgaggagaaacttgtagactattatagccatgtgaattaactgtagcaaagtgccctttttcttcaaattgctccccctccccaggatgacacacttcatgtcatagctgaaccctactctactggattcaaggccagtaaatgcaatttagagaagcagttttatgtttgcagatattctgagtctcttcaggatgtgtttcgtgtctaccatatatgcaggataaattctttaacagcaaactccaaaggaatgttgaagctgttttagcaatgaggatttttttgtttgagtgttgaagtgggccatagtcctttagaaatgatgttcatttatgataggatttaacttctaaggcatagtttattttttcctctttcctttttgtttgttttaatgtattctttagcatgtttttgatataacttttatcctccagatcttaagctttcttttgctctcttcagcaatttaagagactattaagctgtcatcttcctaaaagctattttggtatccactctttttaaaaaaattctccaactttgtgattttttaatgattaaggtaatttgttagctctgcccctcatcttctaaaacctttgtaataaaatgtattaatcatg

SEQ ID NO: 418114 - DNA, 3244 bp, Homo sapiens
cggggcagtaggaacgccgagtcggctgccgtggctgtgctgagggtggcggccggatagggacccagaactccatttgacagatgaggaaacggcgaggcagacaggtgacctgacttccccacaatcgctgcaggacaggaagaaagtaaactccagagcccgtgctcttagctactaagctgtactgctcttcattttgctgatgttctaatcatgtcagataaagatgatattgagactccactgctaactgaagcagcccccatccttgaagatggaaactgtgagccagccaagaattctgagtctgttgaccaaggtgccaaaccagagagtaaatcagaacctgtagtttccactcggaaaagaccagagaccaaaccttccagtgaccttgagacttcaaaagttctccctattcaggataatgtttccaaagatgtaccccagaccagatggggttattgggggagctggggcaagtccatactctcctcagcctcggctacagtagctacagtaggacaaggcatttcaaatgtcatcgagaaggcagagacttcccttggaatccctagtcccagtgaaatttcaactgaagtcaagtatgtagcaggagagacaaatgccaaagagaatgaaaactcctccccagtggctggggcatttggtgtattctctaccatctctactgctgttcagagcacaggaaagagtgttataagtgggggtttggatgccttagaattcattggaaaaaagacaatggatgtgatagcagaaggggatcctggatttaaaagaaccaagggtctgatgaaccgaaatgctacactatctcaggttttacgagaggcgaaggagaaagaagagatacggacctccaatgaggttaccgtggaaacagacaagaaaactcattatgggctactctttgatgaatttcaaggcctttcacatctagaagctctggagatgctttcccaagaaagtgaaataaaggtgaaatctatccttaattctctgagtggagaagaattagagactctaaaagttgaattagagcaactcaaagaaacattttctctagcagaattttgtgaagaagaggaagaagagaaaaaaggggatgaagattttaccaaggacataacagagctgttttcccagctgcacgtttcctccaaaccagagaaacttgccagggcaagaaataccgcccacgaatggatcaggaagtctctgaccaagccattagcagagaatgaagaaggagaaaaacagtcggaagcagaaaatactgagcaagtcaacaaaaattcaatagaggatatccatgcgtttgcaatccggagcctggctgaactgactgcctgctcaattgaactattccacaaaacagctgcattggttctgcatggcaggaagcaggaagtgacagccatagaaaggagccaaactctttcccagatgacaattgtgttgtgtaaagagttgtcctctctgtctaaagagttcactacctgcctaacaactgctggggtcaaagaaatggcagatgtccttaacccattaatcactgcagtatttctagaggcatcaaacagtgcctcctacatccaggacgcctttcagctactcttacctgtgctagagatctctctcattgagaacaagattgaatcacacagacatgagctgcagggccagaaacctttgttagaacattgaagaatggagatgttttgacctgggacttgtgacggccaaggaatgccaccttattctggctactcctgcagaaatgaaggagtggggttattttagtatataaaaattcaggcaggagagatggtttaaagaggaagattgttgccttcagtgtttgattgaagtattcaggttctcacagtattctttccagttgttgtaattcataaattatttgaaaagaaacttttgtagaaagtccaagaataataactctagataaagattagtgggacactcaggcaaaaatgttggtctttctttgacatgttgcaaaatgttatcaattttgtcatggatataatttgcagcccatggatataactggttgataagccagagaaaaataatttagtgttctaaaattcatggcatgtgtggtttattaatgccatgtactttctcctttctggaataaaatctatggctttaagaaaactgagcatatgtaaactctgtgatgattaccctttatcacatgaattcttggaaatagaaagtttcatctgcttttttaaattcttagtagatatttggcattgaggagaaacttgtagactattatagccatgtgaattaactgtagcaaagtgccctttttcttcaaattgctccccctccccaggatgacacacttcatgtcatagctgaaccctactctactggattcaaggccagtaaatgcaatttagagaagcagttttatgtttgcagatattctgagtctcttcaggatgtgtttcgtgtctaccatatatgcaggataaattctttaacagcaaactccaaaggaatgttgaagctgttttagcaatgaggatttttttgtttgagtgttgaagtgggccatagtcctttagaaatgatgttcatttatgataggatttaacttctaaggcatagtttattttttcctctttcctttttgtttgttttaatgtattctttagcatgtttttgatataacttttatcctccagatcttaagctttcttttgctctcttcagcaatttaagagactattaagctgtcatcttcctaaaagctattttggtatccactctttttaaaaaaattctccaactttgtgattttttaatgattaaggtaatttgttagctctgcccctcatcttctaaaacctttgtaataaaatgtattaatcatgttatttgatcctttcatttacttttgtaaacacgagccctaatatcttacttagaccaaaaaaaaaaaaaaaaaatagcaaagcaaagccataaatagattagtataaagactgtttctatgtaatcttctttggggcaggagtcagttagtaagcaaggaagagaaataaatttggtttaaaaaggtataccaacagcactacaatgttactctgcctatattctgtcttaatatgatcagaaagtttttgaatattcctttttaaagacaaatttcaccctttccagcttgaatatttct

SEQ ID NO: 418115 - DNA, 3132 bp, Homo sapiens
cggggcagtaggaacgccgagtcggctgccgtggctgtgctgagggtggcggccggataggtgcggagcttcctgaacgaggcaggagggctgatgttctaatcatgtcagataaagatgatattgagactccactgctaactgaagcagcccccatccttgaagatggaaactgtgagccagccaagaattctgagtctgttgaccaaggtgccaaaccagagagtaaatcagaacctgtagtttccactcggaaaagaccagagaccaaaccttccagtgaccttgagacttcaaaagttctccctattcaggataatgtttccaaagatgtaccccagaccagatggggttattgggggagctggggcaagtccatactctcctcagcctcggctacagtagctacagtaggacaaggcatttcaaatgtcatcgagaaggcagagacttcccttggaatccctagtcccagtgaaatttcaactgaagtcaagtatgtagcaggagagacaaatgccaaagagaatgaaaactcctccccagtggctggggcatttggtgtattctctaccatctctactgctgttcagagcacaggaaagagtgttataagtgggggtttggatgccttagaattcattggaaaaaagacaatggatgtgatagcagaaggggatcctggatttaaaagaaccaagggtctgatgaaccgaaatgctacactatctcaggttttacgagaggcgaaggagaaagaagagatacggacctccaatgaggttaccgtggaaacagacaagaaaactcattatgggctactctttgatgaatttcaaggcctttcacatctagaagctctggagatgctttcccaagaaagtgaaataaaggtgaaatctatccttaattctctgagtggagaagaattagagactctaaaagttgaattagagcaactcaaagaaacattttctctagcagaattttgtgaagaagaggaagaagagaaaaaaggggatgaagattttaccaaggacataacagagctgttttcccagctgcacgtttcctccaaaccagagaaacttgccagggcaagaaataccgcccacgaatggatcaggaagtctctgaccaagccattagcagagaatgaagaaggagaaaaacagtcggaagcagaaaatactgagcaagtcaacaaaaattcaatagaggatatccatgcgtttgcaatccggagcctggctgaactgactgcctgctcaattgaactattccacaaaacagctgcattggttctgcatggcaggaagcaggaagtgacagccatagaaaggagccaaactctttcccagatgacaattgtgttgtgtaaagagttgtcctctctgtctaaagagttcactacctgcctaacaactgctggggtcaaagaaatggcagatgtccttaacccattaatcactgcagtatttctagaggcatcaaacagtgcctcctacatccaggacgcctttcagctactcttacctgtgctagagatctctctcattgagaacaagattgaatcacacagacatgagctgcagggccagaaacctttgttagaacattgaagaatggagatgttttgacctgggacttgtgacggccaaggaatgccaccttattctggctactcctgcagaaatgaaggagtggggttattttagtatataaaaattcaggcaggagagatggtttaaagaggaagattgttgccttcagtgtttgattgaagtattcaggttctcacagtattctttccagttgttgtaattcataaattatttgaaaagaaacttttgtagaaagtccaagaataataactctagataaagattagtgggacactcaggcaaaaatgttggtctttctttgacatgttgcaaaatgttatcaattttgtcatggatataatttgcagcccatggatataactggttgataagccagagaaaaataatttagtgttctaaaattcatggcatgtgtggtttattaatgccatgtactttctcctttctggaataaaatctatggctttaagaaaactgagcatatgtaaactctgtgatgattaccctttatcacatgaattcttggaaatagaaagtttcatctgcttttttaaattcttagtagatatttggcattgaggagaaacttgtagactattatagccatgtgaattaactgtagcaaagtgccctttttcttcaaattgctccccctccccaggatgacacacttcatgtcatagctgaaccctactctactggattcaaggccagtaaatgcaatttagagaagcagttttatgtttgcagatattctgagtctcttcaggatgtgtttcgtgtctaccatatatgcaggataaattctttaacagcaaactccaaaggaatgttgaagctgttttagcaatgaggatttttttgtttgagtgttgaagtgggccatagtcctttagaaatgatgttcatttatgataggatttaacttctaaggcatagtttattttttcctctttcctttttgtttgttttaatgtattctttagcatgtttttgatataacttttatcctccagatcttaagctttcttttgctctcttcagcaatttaagagactattaagctgtcatcttcctaaaagctattttggtatccactctttttaaaaaaattctccaactttgtgattttttaatgattaaggtaatttgttagctctgcccctcatcttctaaaacctttgtaataaaatgtattaatcatgttatttgatcctttcatttacttttgtaaacacgagccctaatatcttacttagaccaaaaaaaaaaaaaaaaaatagcaaagcaaagccataaatagattagtataaagactgtttctatgtaatcttctttggggcaggagtcagttagtaagcaaggaagagaaataaatttggtttaaaaaggtataccaacagcactacaatgttactctgcctatattctgtcttaatatgatcagaaagtttttgaatattcctttttaaagacaaatttcaccctttccagcttgaatatttct

SEQ ID NO: 418116 - DNA, 3572 bp, Homo sapiens
cggggcagtaggaacgccgagtcggctgccgtggctgtgctgagggtggcggccggataggtgcggagcttcctgaacgaggcaggaggggtgcgaggttcaggggcagggcccgggcagccgaagtcgttagggaggcggttacctgacggtgggcggcggacatctcgcagcagggtcgagggctgtgaaagcggtttagtgattgaagcgctacgtttgtgtgaggaattcttgtcgttgtcagcgcctgagaacttagttgggagcggacgtttacgtcgaatctctcgtttgggaccccattcttgaatgtgggaagaagggagaacgcatgtttgctcatctagagacagccgtattaataacgataggatacaaaccatcaccccaccaagtgatagcagctgttaacctgtgggcgggttacgtgccggtcactgttccaagcccctcacatatcgcgtcactgaatctttatagggacccagaactccatttgacagatgaggaaacggcgaggcagacagctgatgttctaatcatgtcagataaagatgatattgagactccactgctaactgaagcagcccccatccttgaagatggaaactgtgagccagccaagaattctgagtctgttgaccaaggtgccaaaccagagagtaaatcagaacctgtagtttccactcggaaaagaccagagaccaaaccttccagtgaccttgagacttcaaaagttctccctattcaggataatgtttccaaagatgtaccccagaccagatggggttattgggggagctggggcaagtccatactctcctcagcctcggctacagtagctacagtaggacaaggcatttcaaatgtcatcgagaaggcagagacttcccttggaatccctagtcccagtgaaatttcaactgaagtcaagtatgtagcaggagagacaaatgccaaagagaatgaaaactcctccccagtggctggggcatttggtgtattctctaccatctctactgctgttcagagcacaggaaagagtgttataagtgggggtttggatgccttagaattcattggaaaaaagacaatggatgtgatagcagaaggggatcctggatttaaaagaaccaagggtctgatgaaccgaaatgctacactatctcaggttttacgagaggcgaaggagaaagaagagatacggacctccaatgaggttaccgtggaaacagacaagaaaactcattatgggctactctttgatgaatttcaaggcctttcacatctagaagctctggagatgctttcccaagaaagtgaaataaaggtgaaatctatccttaattctctgagtggagaagaattagagactctaaaagttgaattagagcaactcaaagaaacattttctctagcagaattttgtgaagaagaggaagaagagaaaaaaggggatgaagattttaccaaggacataacagagctgttttcccagctgcacgtttcctccaaaccagagaaacttgccagggcaagaaataccgcccacgaatggatcaggaagtctctgaccaagccattagcagagaatgaagaaggagaaaaacagtcggaagcagaaaatactgagcaagtcaacaaaaattcaatagaggatatccatgcgtttgcaatccggagcctggctgaactgactgcctgctcaattgaactattccacaaaacagctgcattggttctgcatggcaggaagcaggaagtgacagccatagaaaggagccaaactctttcccagatgacaattgtgttgtgtaaagagttgtcctctctgtctaaagagttcactacctgcctaacaactgctggggtcaaagaaatggcagatgtccttaacccattaatcactgcagtatttctagaggcatcaaacagtgcctcctacatccaggacgcctttcagctactcttacctgtgctagagatctctctcattgagaacaagattgaatcacacagacatgagctgcagggccagaaacctttgttagaacattgaagaatggagatgttttgacctgggacttgtgacggccaaggaatgccaccttattctggctactcctgcagaaatgaaggagtggggttattttagtatataaaaattcaggcaggagagatggtttaaagaggaagattgttgccttcagtgtttgattgaagtattcaggttctcacagtattctttccagttgttgtaattcataaattatttgaaaagaaacttttgtagaaagtccaagaataataactctagataaagattagtgggacactcaggcaaaaatgttggtctttctttgacatgttgcaaaatgttatcaattttgtcatggatataatttgcagcccatggatataactggttgataagccagagaaaaataatttagtgttctaaaattcatggcatgtgtggtttattaatgccatgtactttctcctttctggaataaaatctatggctttaagaaaactgagcatatgtaaactctgtgatgattaccctttatcacatgaattcttggaaatagaaagtttcatctgcttttttaaattcttagtagatatttggcattgaggagaaacttgtagactattatagccatgtgaattaactgtagcaaagtgccctttttcttcaaattgctccccctccccaggatgacacacttcatgtcatagctgaaccctactctactggattcaaggccagtaaatgcaatttagagaagcagttttatgtttgcagatattctgagtctcttcaggatgtgtttcgtgtctaccatatatgcaggataaattctttaacagcaaactccaaaggaatgttgaagctgttttagcaatgaggatttttttgtttgagtgttgaagtgggccatagtcctttagaaatgatgttcatttatgataggatttaacttctaaggcatagtttattttttcctctttcctttttgtttgttttaatgtattctttagcatgtttttgatataacttttatcctccagatcttaagctttcttttgctctcttcagcaatttaagagactattaagctgtcatcttcctaaaagctattttggtatccactctttttaaaaaaattctccaactttgtgattttttaatgattaaggtaatttgttagctctgcccctcatcttctaaaacctttgtaataaaatgtattaatcatgttatttgatcctttcatttacttttgtaaacacgagccctaatatcttacttagaccaaaaaaaaaaaaaaaaaatagcaaagcaaagccataaatagattagtataaagactgtttctatgtaatcttctttggggcaggagtcagttagtaagcaaggaagagaaataaatttggtttaaaaaggtataccaacagcactacaatgttactctgcctatattctgtcttaatatgatcagaaagtttttgaatattcctttttaaagacaaatttcaccctttccagcttgaatatttct

SEQ ID NO: 418117 - DNA, 3632 bp, Homo sapiens
atattatatgcccatatattctgaactccatagtgttgtcttaatctacctttctagcttcatgccttcccattgttcttctctctgccatggtaactactccctactgtaactgtccatgttccatactgtcagacctcaggcctttggctgtaccctcatgttatttccatatccttgaatcctgtcattggcatcatcatctgtcaaaatcataagcttcttttaaggcaggtgttgccaactcagacgcctacagaggttaatcaggtagcataatttgagtgaagtggatttgcgtgggggattgtagggagctggagagcaactgccctagctaaaagggcccagcggctatttagcacaagcctagttattacagagttgaatgtgggcccggtgttgctagatcttttaatttcacaagttagaagttggaagcctatatttttatatgaagtctgatttttaaatgttggcatctagtttttgcaaaggttaaatattgtgcaggccaaataaaaacatctgtaggctggatttggcacttaaattcccagtttgtgaccactactctaggcttatttcagctgatgttctaatcatgtcagataaagatgatattgagactccactgctaactgaagcagcccccatccttgaagatggaaactgtgagccagccaagaattctgagtctgttgaccaaggtgccaaaccagagagtaaatcagaacctgtagtttccactcggaaaagaccagagaccaaaccttccagtgaccttgagacttcaaaagttctccctattcaggataatgtttccaaagatgtaccccagaccagatggggttattgggggagctggggcaagtccatactctcctcagcctcggctacagtagctacagtaggacaaggcatttcaaatgtcatcgagaaggcagagacttcccttggaatccctagtcccagtgaaatttcaactgaagtcaagtatgtagcaggagagacaaatgccaaagagaatgaaaactcctccccagtggctggggcatttggtgtattctctaccatctctactgctgttcagagcacaggaaagagtgttataagtgggggtttggatgccttagaattcattggaaaaaagacaatggatgtgatagcagaaggggatcctggatttaaaagaaccaagggtctgatgaaccgaaatgctacactatctcaggttttacgagaggcgaaggagaaagaagagatacggacctccaatgaggttaccgtggaaacagacaagaaaactcattatgggctactctttgatgaatttcaaggcctttcacatctagaagctctggagatgctttcccaagaaagtgaaataaaggtgaaatctatccttaattctctgagtggagaagaattagagactctaaaagttgaattagagcaactcaaagaaacattttctctagcagaattttgtgaagaagaggaagaagagaaaaaaggggatgaagattttaccaaggacataacagagctgttttcccagctgcacgtttcctccaaaccagagaaacttgccagggcaagaaataccgcccacgaatggatcaggaagtctctgaccaagccattagcagagaatgaagaaggagaaaaacagtcggaagcagaaaatactgagcaagtcaacaaaaattcaatagaggatatccatgcgtttgcaatccggagcctggctgaactgactgcctgctcaattgaactattccacaaaacagctgcattggttctgcatggcaggaagcaggaagtgacagccatagaaaggagccaaactctttcccagatgacaattgtgttgtgtaaagagttgtcctctctgtctaaagagttcactacctgcctaacaactgctggggtcaaagaaatggcagatgtccttaacccattaatcactgcagtatttctagaggcatcaaacagtgcctcctacatccaggacgcctttcagctactcttacctgtgctagagatctctctcattgagaacaagattgaatcacacagacatgagctgcagggccagaaacctttgttagaacattgaagaatggagatgttttgacctgggacttgtgacggccaaggaatgccaccttattctggctactcctgcagaaatgaaggagtggggttattttagtatataaaaattcaggcaggagagatggtttaaagaggaagattgttgccttcagtgtttgattgaagtattcaggttctcacagtattctttccagttgttgtaattcataaattatttgaaaagaaacttttgtagaaagtccaagaataataactctagataaagattagtgggacactcaggcaaaaatgttggtctttctttgacatgttgcaaaatgttatcaattttgtcatggatataatttgcagcccatggatataactggttgataagccagagaaaaataatttagtgttctaaaattcatggcatgtgtggtttattaatgccatgtactttctcctttctggaataaaatctatggctttaagaaaactgagcatatgtaaactctgtgatgattaccctttatcacatgaattcttggaaatagaaagtttcatctgcttttttaaattcttagtagatatttggcattgaggagaaacttgtagactattatagccatgtgaattaactgtagcaaagtgccctttttcttcaaattgctccccctccccaggatgacacacttcatgtcatagctgaaccctactctactggattcaaggccagtaaatgcaatttagagaagcagttttatgtttgcagatattctgagtctcttcaggatgtgtttcgtgtctaccatatatgcaggataaattctttaacagcaaactccaaaggaatgttgaagctgttttagcaatgaggatttttttgtttgagtgttgaagtgggccatagtcctttagaaatgatgttcatttatgataggatttaacttctaaggcatagtttattttttcctctttcctttttgtttgttttaatgtattctttagcatgtttttgatataacttttatcctccagatcttaagctttcttttgctctcttcagcaatttaagagactattaagctgtcatcttcctaaaagctattttggtatccactctttttaaaaaaattctccaactttgtgattttttaatgattaaggtaatttgttagctctgcccctcatcttctaaaacctttgtaataaaatgtattaatcatgttatttgatcctttcatttacttttgtaaacacgagccctaatatcttacttagaccaaaaaaaaaaaaaaaaaatagcaaagcaaagccataaatagattagtataaagactgtttctatgtaatcttctttggggcaggagtcagttagtaagcaaggaagagaaataaatttggtttaaaaaggtataccaacagcactacaatgttactctgcctatattctgtcttaatatgatcagaaagtttttgaatattcctttttaaagacaaatttcaccctttccagcttgaatatttct

SEQ ID NO: 418118 - DNA, 2533 bp, Homo sapiens
cggggcagtaggaacgccgagtcggctgccgtggctgtgctgagggtggcggccggataggtgcggagcttcctgaacgaggcaggaggggtgcgaggttcaggggcagggcccgggcagccgaagtcgttagggaggcggttacctgacggtgggcggcggacatctcgcagcagggtcgagggctgtgaaagcggtttagtgattgaagcgctacgtttgtgtgaggaattcttgtcgttgtcagcgcctgagaacttagttgggagcggacgtttacgtcgaatctctcgtttgggaccccattcttgaatgtgggaagaagggagaacgcatgtttgctcatctagagacagccgtattaataacgataggatacaaaccatcaccccaccaagtgatagcagctgttaacctgtgggcgggttacgtgccggtcactgttccaagcccctcacatatcgcgtcactgaatctttatagggacccagaactccatttgacagatgaggaaacggcgaggcagacagctgatgttctaatcatgtcagataaagatgatattgagactccactgctaactgaagcagcccccatccttgaagatggaaactgtgagccagccaagaattctgagtctgttgaccaaggtgccaaaccagagagtaaatcagaacctgtagtttccactcggaaaagaccagagaccaaaccttccagtgaccttgagacttcaaaagttctccctattcaggataatgtttccaaagatgtaccccagaccagatggggttattgggggagctggggcaagtccatactctcctcagcctcggctacagtagctacagtaggacaaggcatttcaaatgtcatcgagaaggcagagacttcccttggaatccctagtcccagtgaaatttcaactgaagtcaagtatgtagcaggagagacaaatgccaaagagaatgaaaactcctccccagtggctggggcatttggtgtattctctaccatctctactgctgttcagagcacaggaaagagtgttataagtgggggtttggatgccttagaattcattggaaaaaagacaatggatgtgatagcagaaggggatcctggatttaaaagaaccaagggtctgatgaaccgaaatgctacactatctcaggttttacgagaggcgaaggagaaagaagagatacggacctccaatgaggttaccgtggaaacagacaagaaaactcattatgggctactctttgatgaatttcaaggcctttcacatctagaagctctggagatgctttcccaagaaagtgaaataaaggtgaaatctatccttaattctctgagtggagaagaattagagactctaaaagttgaattagagcaactcaaagaaacattttctctagcagaattttgtgaagaagaggaagaagagaaaaaaggggatgaagattttaccaaggacataacagagctgttttcccagctgcacgtttcctccaaaccagagaaacttgccagggcaagaaataccgcccacgaatggatcaggaagtctctgaccaagccattagcagagaatgaagaaggagaaaaacagtcggaagcagaaaatactgagcaagtcaacaaaaattcaatagaggatatccatgcgtttgcaatccggagcctggctgaactgactgcctgctcaattgaactattccacaaaacagctgcattggttctgcatggcaggaagcaggaagtgacagccatagaaaggagccaaactctttcccagatgacaattgtgttgtgtaaagagttgtcctctctgtctaaagagttcactacctgcctaacaactgctggggtcaaagaaatggcagatgtccttaacccattaatcactgcagtatttctagaggcatcaaacagtgcctcctacatccaggacgcctttcagctactcttacctgtgctagagatctctctcattgagaacaagattgaatcacacagacatgagctgcagggccagaaacctttgttagaacattgaagaatggagatgttttgacctgggacttgtgacggccaaggaatgccaccttattctggctactcctgcagaaatgaaggagtggggttattttagtatataaaaattcaggcaggagagatggtttaaagaggaagattgttgccttcagtgtttgattgaagtattcaggttctcacagtattctttccagttgttgtaattcataaattatttgaaaagaaacttttgtagaaagtccaagaataataactctagataaagattagtgggacactcaggcaaaaatgttggtctttctttgacatgttgcaaaatgttatcaattttgtcatggatataatttgcagcccatggatataactggttgataagccagagaaaaataatttagtgttctaaaattcatggcatgtgtggtttattaatgccatgtactttctcctttctggaataaaatctatggcttta

SEQ ID NO: 418119 - DNA, 2034 bp, Homo sapiens
acccttgagttttttgagcacatgttccatatctacatgttttgttttaaaatggttctaaggttttgtggtcaaatgaagataccttttaaagtcaataaaaaggtataaaacaatacactgtcaatatggatagcacagaaagatattaagaaagaagtttaaaacacttagaatttccattctaaagatgacattttgctctcagtccagacttctgtgcttatatttaatatttatgtatgggtgtgtgtgtgtgttttaaagtgtgatcgtactccacttactgttatttaacctactctgctcacttaaaaatgtattcgttattccaggtcaaagaaatggcagatgtccttaacccattaatcactgcagtatttctagaggcatcaaacagtgcctcctacatccaggacgcctttcagctactcttacctgtgctagagatctctctcattgagaacaagattgaatcacacagacatgagctgcagggccagaaacctttgttagaacattgaagaatggagatgttttgacctgggacttgtgacggccaaggaatgccaccttattctggctactcctgcagaaatgaaggagtggggttattttagtatataaaaattcaggcaggagagatggtttaaagaggaagattgttgccttcagtgtttgattgaagtattcaggttctcacagtattctttccagttgttgtaattcataaattatttgaaaagaaacttttgtagaaagtccaagaataataactctagataaagattagtgggacactcaggcaaaaatgttggtctttctttgacatgttgcaaaatgttatcaattttgtcatggatataatttgcagcccatggatataactggttgataagccagagaaaaataatttagtgttctaaaattcatggcatgtgtggtttattaatgccatgtactttctcctttctggaataaaatctatggctttaagaaaactgagcatatgtaaactctgtgatgattaccctttatcacatgaattcttggaaatagaaagtttcatctgcttttttaaattcttagtagatatttggcattgaggagaaacttgtagactattatagccatgtgaattaactgtagcaaagtgccctttttcttcaaattgctccccctccccaggatgacacacttcatgtcatagctgaaccctactctactggattcaaggccagtaaatgcaatttagagaagcagttttatgtttgcagatattctgagtctcttcaggatgtgtttcgtgtctaccatatatgcaggataaattctttaacagcaaactccaaaggaatgttgaagctgttttagcaatgaggatttttttgtttgagtgttgaagtgggccatagtcctttagaaatgatgttcatttatgataggatttaacttctaaggcatagtttattttttcctctttcctttttgtttgttttaatgtattctttagcatgtttttgatataacttttatcctccagatcttaagctttcttttgctctcttcagcaatttaagagactattaagctgtcatcttcctaaaagctattttggtatccactctttttaaaaaaattctccaactttgtgattttttaatgattaaggtaatttgttagctctgcccctcatcttctaaaacctttgtaataaaatgtattaatcatgttatttgatcctttcatttacttttgtaaacacgagccctaatatcttacttagaccaaaaaaaaaaaaaaaaaatagcaaagcaaagccataaatagattagtataaagactgtttctatgtaatcttctttggggcaggagtcagttagtaagcaaggaagagaaataaatttggtttaaaaaggtataccaacagcactacaatgttactctgcctatattctgtcttaatatgatcagaaagtttttgaatattcctttttaaagacaaatttcaccctttccagcttgaatatttct

SEQ ID NO: 418120 - DNA, 618 bp, Homo sapiens
cggggcagtaggaacgccgagtcggctgccgtggctgtgctgagggtggcggccggatagggacccagaactccatttgacagatgaggaaacggcgaggcagacaggtgacctgacttccccacaatcgctgcaggacaggaagaaagtaaactccagagcccgtgctcttagctactaagctgtactgctcttcattttgctgatgttctaatcatgtcagataaagatgatattgagactccactgctaactgaagcagcccccatccttgaagatggaaaattgttgccttcagtgtttgattgaagtattcaggttctcacagtattctttccagttgttgtaattcataaattatttgaaaagaaacttttgtagaaagtccaagaataataactctagataaagattagtgggacactcaggcaaaaatgttggtctttctttgacatgttgcaaaatgttatcaattttgtcatggatataatttgcagcccatggatataactggttgataagccagagaaaaataatttagtgttctaaaattcatggcatgtgtggtttattaatgccatgtactttctcctttctggaataaaatctatggcttta

SEQ ID NO: 418121 - DNA, 356 bp, Homo sapiens
ttcagtttgtagctattacaagcagagctgttatgaacatttttgtgcatgtcttctgatgaacctctgtacttatttctgttaggatgtaaccatgagtggaatttctgggtcatgcagctggagtagatattgacaaacagttttctaatgtggttatacctatttacgttcccacaagcagtgtgtgattgtttcatttgctttacattcttgccagtgcttggtattgttagccactatttttatataataaatacataataaaaatgcataaaaatatgttttcttaatattgttgtaatgaggttgcatgtattttctagggaaagagtgttataagtgggggtttggat

SEQ ID NO: 418122 - DNA, 3667 bp, Homo sapiens
cggggcagtaggaacgccgagtcggctgccgtggctgtgctgagggtggcggccggataggtgcggagcttcctgaacgaggcaggaggggtgcgaggttcaggggcagggcccgggcagccgaagtcgttagggaggcggttacctgacggtgggcggcggacatctcgcagcagggtcgagggctgtgaaagcggtttagtgattgaagcgctacgtttgtgtgaggaattcttgtcgttgtcagcgcctgagaacttagttgggagcggacgtttacgtcgaatctctcgtttgggaccccattcttgaatgtgggaagaagggagaacgcatgtttgctcatctagagacagccgtattaataacgataggatacaaaccatcaccccaccaagtgatagcagctgttaacctgtgggcgggttacgtgccggtcactgttccaagcccctcacatatcgcgtcactgaatctttatagggacccagaactccatttgacagatgaggaaacggcgaggcagacaggtgacctgacttccccacaatcgctgcaggacaggaagaaagtaaactccagagcccgtgctcttagctactaagctgtactgctcttcattttgctgatgttctaatcatgtcagataaagatgatattgagactccactgctaactgaagcagcccccatccttgaagatggaaactgtgagccagccaagaattctgagtctgttgaccaaggtgccaaaccagagagtaaatcagaacctgtagtttccactcggaaaagaccagagaccaaaccttccagtgaccttgagacttcaaaagttctccctattcaggataatgtttccaaagatgtaccccagaccagatggggttattgggggagctggggcaagtccatactctcctcagcctcggctacagtagctacagtaggacaaggcatttcaaatgtcatcgagaaggcagagacttcccttggaatccctagtcccagtgaaatttcaactgaagtcaagtatgtagcaggagagacaaatgccaaagagaatgaaaactcctccccagtggctggggcatttggtgtattctctaccatctctactgctgttcagagcacaggaaagagtgttataagtgggggtttggatgccttagaattcattggaaaaaagacaatggatgtgatagcagaaggggatcctggatttaaaagaaccaagggtctgatgaaccgaaatgctacactatctcaggttttacgagaggcgaaggagaaagaagagatacggacctccaatgaggttaccgtggaaacagacaagaaaactcattatgggctactctttgatgaatttcaaggcctttcacatctagaagctctggagatgctttcccaagaaagtgaaataaaggtgaaatctatccttaattctctgagtggagaagaattagagactctaaaagttgaattagagcaactcaaagaaacattttctctagcagaattttgtgaagaagaggaagaagagaaaaaaggggatgaagattttaccaaggacataacagagctgttttcccagctgcacgtttcctccaaaccagagaaacttgccagggcaagaaataccgcccacgaatggatcaggaagtctctgaccaagccattagcagagaatgaagaaggagaaaaacagtcggaagcagaaaatactgagcaagtcaacaaaaattcaatagaggatatccatgcgtttgcaatccggagcctggctgaactgactgcctgctcaattgaactattccacaaaacagctgcattggttctgcatggcaggaagcaggaagtgacagccatagaaaggagccaaactctttcccagatgacaattgtgttgtgtaaagagttgtcctctctgtctaaagagttcactacctgcctaacaactgctggggtcaaagaaatggcagatgtccttaacccattaatcactgcagtatttctagaggcatcaaacagtgcctcctacatccaggacgcctttcagctactcttacctgtgctagagatctctctcattgagaacaagattgaatcacacagacatgagctgcagggccagaaacctttgttagaacattgaagaatggagatgttttgacctgggacttgtgacggccaaggaatgccaccttattctggctactcctgcagaaatgaaggagtggggttattttagtatataaaaattcaggcaggagagatggtttaaagaggaagattgttgccttcagtgtttgattgaagtattcaggttctcacagtattctttccagttgttgtaattcataaattatttgaaaagaaacttttgtagaaagtccaagaataataactctagataaagattagtgggacactcaggcaaaaatgttggtctttctttgacatgttgcaaaatgttatcaattttgtcatggatataatttgcagcccatggatataactggttgataagccagagaaaaataatttagtgttctaaaattcatggcatgtgtggtttattaatgccatgtactttctcctttctggaataaaatctatggctttaagaaaactgagcatatgtaaactctgtgatgattaccctttatcacatgaattcttggaaatagaaagtttcatctgcttttttaaattcttagtagatatttggcattgaggagaaacttgtagactattatagccatgtgaattaactgtagcaaagtgccctttttcttcaaattgctccccctccccaggatgacacacttcatgtcatagctgaaccctactctactggattcaaggccagtaaatgcaatttagagaagcagttttatgtttgcagatattctgagtctcttcaggatgtgtttcgtgtctaccatatatgcaggataaattctttaacagcaaactccaaaggaatgttgaagctgttttagcaatgaggatttttttgtttgagtgttgaagtgggccatagtcctttagaaatgatgttcatttatgataggatttaacttctaaggcatagtttattttttcctctttcctttttgtttgttttaatgtattctttagcatgtttttgatataacttttatcctccagatcttaagctttcttttgctctcttcagcaatttaagagactattaagctgtcatcttcctaaaagctattttggtatccactctttttaaaaaaattctccaactttgtgattttttaatgattaaggtaatttgttagctctgcccctcatcttctaaaacctttgtaataaaatgtattaatcatgttatttgatcctttcatttacttttgtaaacacgagccctaatatcttacttagaccaaaaaaaaaaaaaaaaaatagcaaagcaaagccataaatagattagtataaagactgtttctatgtaatcttctttggggcaggagtcagttagtaagcaaggaagagaaataaatttggtttaaaaaggtataccaacagcactacaatgttactctgcctatattctgtcttaatatgatcagaaagtttttgaatattcctttttaaagacaaatttcaccctttccagcttgaatatttct

SEQ ID NO: 418123 - DNA, 3254 bp, Homo sapiens
cggggcagtaggaacgccgagtcggctgccgtggctgtgctgagggtggcggccggatagctgatgttctaatcatgtcagataaagatgatattgagactccactgctaactgaagcagcccccatccttgaagatggaaactgtgagccagccaagaattctgagtctgttgaccaaggtgccaaaccagagagtaaatcagaacctgtagtttccactcggaaaagaccagagaccaaaccttccagtgaccttgagacttcaaaagttctccctattcaggataatgtttccaaagatgtaccccagaccagatggggttattgggggagctggggcaagtccatactctcctcagcctcggctacagtagctacagtaggacaaggcatttcaaatgtcatcgagaaggcagagacttcccttggaatccctagtcccagtgaaatttcaactgaagtcaagtatgtagcaggagagacaaatgccaaagagaatgaaaactcctccccagtggctggggcatttggtgtattctctaccatctctactgctgttcagagcacaggaaagagtgttataagtgggggtttggatgccttagaattcattggaaaaaagacaatggatgtgatagcagaaggggatcctggatttaaaagaaccaagggtctgatgaaccgaaatgctacactatctcaggttttacgagaggcgaaggagaaagaagagatacggacctccaatgaggttaccgtggaaacagacaagaaaactcattatgggctactctttgatgaatttcaaggcctttcacatctagaagctctggagatgctttcccaagaaagtgaaataaaggtgaaatctatccttaattctctgagtggagaagaattagagactctaaaagttgaattagagcaactcaaagaaacattttctctagcagaattttgtgaagaagaggaagaagagaaaaaaggggatgaagattttaccaaggacataacagagctgttttcccagctgcacgtttcctccaaaccagagaaacttgccagggcaagaaataccgcccacgaatggatcaggaagtctctgaccaagccattagcagagaatgaagaaggagaaaaacagtcggaagcagaaaatactgagcaagtcaacaaaaattcaatagaggatatccatgcgtttgcaatccggagcctggctgaactgactgcctgctcaattgaactattccacaaaacagctgcattggttctgcatggcaggaagcaggaagtgacagccatagaaaggagccaaactctttcccagatgacaattgtgttgtgtaaagagttgtcctctctgtctaaagagttcactacctgcctaacaactgctggggtcaaagaaatggcagatgtccttaacccattaatcactgcagtatttctagagaaagcatacagttgaagctgcagggtactggaagaagcagtagattgtcattacttagtactaatccttgacagcttaatggacggttcacagtaatgaaacaccttctgaataccagctggtaaacatgaagggctgaaaattataaacaggcatcaaacagtgcctcctacatccaggacgcctttcagctactcttacctgtgctagagatctctctcattgagaacaagattgaatcacacagacatgagctgcagggccagaaacctttgttagaacattgaagaatggagatgttttgacctgggacttgtgacggccaaggaatgccaccttattctggctactcctgcagaaatgaaggagtggggttattttagtatataaaaattcaggcaggagagatggtttaaagaggaagattgttgccttcagtgtttgattgaagtattcaggttctcacagtattctttccagttgttgtaattcataaattatttgaaaagaaacttttgtagaaagtccaagaataataactctagataaagattagtgggacactcaggcaaaaatgttggtctttctttgacatgttgcaaaatgttatcaattttgtcatggatataatttgcagcccatggatataactggttgataagccagagaaaaataatttagtgttctaaaattcatggcatgtgtggtttattaatgccatgtactttctcctttctggaataaaatctatggctttaagaaaactgagcatatgtaaactctgtgatgattaccctttatcacatgaattcttggaaatagaaagtttcatctgcttttttaaattcttagtagatatttggcattgaggagaaacttgtagactattatagccatgtgaattaactgtagcaaagtgccctttttcttcaaattgctccccctccccaggatgacacacttcatgtcatagctgaaccctactctactggattcaaggccagtaaatgcaatttagagaagcagttttatgtttgcagatattctgagtctcttcaggatgtgtttcgtgtctaccatatatgcaggataaattctttaacagcaaactccaaaggaatgttgaagctgttttagcaatgaggatttttttgtttgagtgttgaagtgggccatagtcctttagaaatgatgttcatttatgataggatttaacttctaaggcatagtttattttttcctctttcctttttgtttgttttaatgtattctttagcatgtttttgatataacttttatcctccagatcttaagctttcttttgctctcttcagcaatttaagagactattaagctgtcatcttcctaaaagctattttggtatccactctttttaaaaaaattctccaactttgtgattttttaatgattaaggtaatttgttagctctgcccctcatcttctaaaacctttgtaataaaatgtattaatcatgttatttgatcctttcatttacttttgtaaacacgagccctaatatcttacttagaccaaaaaaaaaaaaaaaaaatagcaaagcaaagccataaatagattagtataaagactgtttctatgtaatcttctttggggcaggagtcagttagtaagcaaggaagagaaataaatttggtttaaaaaggtataccaacagcactacaatgttactctgcctatattctgtcttaatatgatcagaaagtttttgaatattcctttttaaagacaaatttcaccctttccagcttgaatatttct

SEQ ID NO: 418124 - DNA, 1076 bp, Homo sapiens
cggggcagtaggaacgccgagtcggctgccgtggctgtgctgagggtggcggccggatagctgatgttctaatcatgtcagataaagatgatattgagactccactgctaactgaagcagcccccatccttgaagatggaaactgtgagccagccaagaattctgagtctgttgaccaaggtgccaaaccagagagtaaatcagaacctgtagtttccactcggaaaagaccagagaccaaaccttccagtgaccttgagacttcaaaagttctccctattcaggataatgtttccaaagatgtaccccagaccagatggggttattgggggagctggggcaagtccatactctcctcagcctcggctacagtagctacagtaggacaaggcatttcaaatgtcatcgagaaggcagagacttcccttggaatccctagtcccagtgaaatttcaactgaagtcaagtatgtagcaggagagacaaatgccaaagagaatgaaaactcctccccagtggctggggcatttggtgtattctctaccatctctactgctgttcagagcacaggaaagagtgttataagtgggggtttggatgccttagaattcattggaaaaaagacaatggatgtgatagcagaaggggatcctggatttaaaagaaccaagggtctgatgaaccgaaatgctacactatctcaggttttacgagaggcgaaggagaaagaagagatacggacctccaatgaggttaccgtggaaacagacaagaaaactcattatgggctactctttgatgaatttcaaggcctttcacatctagaagctctggagatgctttcccaagaaagtgaaataaaggtgaaatctatccttaattctctgagtggagaagaattagagactctaaaagttgaattagagcaactcaaagaaacattttctctagcagaattttgtgaagaagaggaagaagagaaaaaaggtaatatgaaaatttagtatctgagtggagaggatgcagtgtgtttgtatgcagtgcattgcccttgaaataaattatttactcttaaa

SEQ ID NO: 418125 - DNA, 545 bp, Homo sapiens
atctcccaaagtgctgtgattataagtgtgagccactgtgcctggcctgtaacctttgttttgacaaatggatagtattaaaggaaattttcttgatacgcagtttagtctgttcttggacaagcaatgcagtaggtttgactttgagtgctttattactaacactttctggccaggccacagttaaggtccggttggaaaacacttgttgaggtttgaattgtaacctttttactggatgatagggtattttttagcccatagataaacttgcttaaaaaaccaagaaagacactgaaatctcagtctatacatagtttcatcagtgtttattgggaactgtgttctggataaagcaatcgtatgtatacatttttattatgtaatgtataagtgatttgtaaattataaagatctcctacgatactgtggtgtcttctagatagaaaatatatctttctaaaatgtgtgcctaattctagtgtagtgtcaatttatagtacacaataaatatttaatgaataaacattattctgttgttgatt

SEQ ID NO: 418126 - DNA, 3188 bp, Homo sapiens
gaacccggtggctgcacagacaaaaaagccccgaatggctggagggcgttcagctgttaacagccttttggggcagagcacggatttgacagctccacaacgtgaggatatccactgaccccgcgagacggaggagaacgcttccccgaaattctctgcccaccaaagccagcgctgcaaggttgcaactttcaaactttgtttttccagaaagaagactgccctttcgtgtacaaggagagggtgagagggtgacctagcttgtagatcggctgaaggcaccagtggttccaaatgtcacccagatgtgtgttttcatgacgatttgatttctctgattttatttttacatttttcattttaaaaatacaaagcaatttttttggggcatgctgaaaggtaactgaagaccgcaaaggaaaaactattgtcatggctgaaggagagaatgaagtgagatgggatggactctgcagcagagattcaactactagggagacagcattggaaaacattaggcaaaccattttgaggaaaaccgagtatcttcgttcggtgaaagaaacacctcatcgtccatcagacgggctttcaaataccgagtcttcggatgggttgaataagctacttgctcatctgcttatgctttctaagaggtgtcccttcaaagatgtgagagagaaaagtgagtttattctgaagagcatccaggaacttggcattagaattcctcgaccactaggacagggaccaagcagattcatcccagaaaaggagatcctccaagtggggagtgaagacgcacagatgcatgctttatttgcagattcttttgctgctttgggccgtttggataacattacgttagtgatggttttccacccacaatatttagaaagtttcttaaaaactcagcactatctactgcaaatggatgggccgttacccctacattatcgtcactacattggaataatggctgcggcaagacatcagtgctcctacttagtgaacctgcatgtaaatgatttccttcatgttggtggggaccccaagtggctcaatggtttagagaatgctcctcaaaaactacagaatttaggagaacttaacaaagtgttagcccatagaccttggcttattaccaaagaacacattgagggacttttaaaagctgaagagcacagctggtcccttgcggaattggtacatgcagtagttttactcacacactatcattctcttgcctcattcacattcggctgtggaatcagtccagaaattcattgtgatggtggccacacattcagacctccttctgttagcaactactgcatctgtgacattacaaatggcaatcacagtgtggatgagatgccggtcaactcagcagaaaatgtttctgtaagtgattctttctttgaggttgaagccctcatggaaaagatgaggcagttacaggaatgtcgagatgaagaagaggcaagtcaggaagagatggcttcacgttttgaaatagaaaaaagagagagtatgtttgtcttctcttcagatgatgaagaagttacaccagcaagagctgtatctcgtcattttgaggatactagttatggctataaagatttctctagacatgggatgcatgttccaacatttcgtgtccaggactattgctgggaagatcatggttattctttggtaaatcgcctttatccagatgtgggacagttgattgatgaaaaatttcacattgcttacaatcttacttataatacaatggcaatgcacaaagatgttgatacctcaatgcttagacgggcaatttggaactatattcactgcatgtttggaataagatatgatgattatgactatggtgaaattaaccagctattggatcgtagctttaaagtttatatcaaaactgttgtttgcactcctgaaaaggttaccaaaagaatgtatgatagcttctggaggcagttcaagcactctgagaaggttcatgttaatctgcttcttatagaagctaggatgcaagcagaactcctttatgctctgagagccattacccgctatatgacctgatgcctttccttcattaaagatgattctggaatgatcagcagatatagtctacaagggggaaggtactaagccccaggaccaatggtagacaaaataattcagaaatccattgtgccatgattcctttagtttctgctatttttctgtggaaaaccactgctggcacaagcagtgactgtttggcagcttcaagtttagagctgtgaagacaggctgccattcacagtattttgctttttgacagtacaagatgctgtgtaactgttttaatacagcaaatagtaactctccaaatcctgttgcttttatgttaaataagataacaagaattggagcatgcaaagaatgggacttggataatgacttaagctttatatgtaaagaattttagaagatcttggtgctgctattcctgctggaggaatgaatagatggctgtttcagttaagctattagtaataaaagtgaacattgctactatctgagcctacatacataacttgtgtgatttcaaattaaacttgcattatgtgttaattttcttgcatctaaaaaagcatagaattcctactcacacagctcagcaacaaccattttgatggtaacagttaatttctttcattagttttttaaattcagggttctggatattaaattaaaatggcattcttaaagattttcttcaaaaagcaatcctaaatgaaagtgtgtaaattataagaagctggcgatcttttgatatgctgtttcacaggatcctgacactggagggcagctgtcttgtgcattacttgtgtttccagcaccaaagttgtgggacatgttgctgtagactgctgcgcagtcctgggtgcattcagtctctctgcctctgcctgcctcctggtccccactttaaaggctgtgcagctccttaaataataaagctggaaaatatttttagtcgggttatcaaatttgatttacaaaaacgctaactttgtttgaaatgcaaacaggtttgaaaatatgtattaagtactttgtattctggaagcgtgaattgcttttgaagtctgtcagtattactggtatttttaaataaagaagaatttttctcc

SEQ ID NO: 418127 - DNA, 2679 bp, Homo sapiens
cccccgccgtccgtgctgactgaggcgctgcagccaggagccgcggccggctgcccagcgctcgccgcctccgcgcgtccgcagccgtccccgcgccgacatgcgcttggccgccgccgcgaacgaggcgtacacggcccctttggcggtctcggggctgctgggctgcaagcagtgcggcgggggccgcgaccaggacgaggaacttggcattagaattcctcgaccactaggacagggaccaagcagattcatcccagaaaaggagatcctccaagtggggagtgaagacgcacagatgcatgctttatttgcagattcttttgctgctttgggccgtttggataacattacgttagtgatggttttccacccacaatatttagaaagtttcttaaaaactcagcactatctactgcaaatggatgggccgttacccctacattatcgtcactacattggaataatggctgcggcaagacatcagtgctcctacttagtgaacctgcatgtaaatgatttccttcatgttggtggggaccccaagtggctcaatggtttagagaatgctcctcaaaaactacagaatttaggagaacttaacaaagtgttagcccatagaccttggcttattaccaaagaacacattgagggacttttaaaagctgaagagcacagctggtcccttgcggaattggtacatgcagtagttttactcacacactatcattctcttgcctcattcacattcggctgtggaatcagtccagaaattcattgtgatggtggccacacattcagacctccttctgttagcaactactgcatctgtgacattacaaatggcaatcacagtgtggatgagatgccggtcaactcagcagaaaatgtttctgtaagtgattctttctttgaggttgaagccctcatggaaaagatgaggcagttacaggaatgtcgagatgaagaagaggcaagtcaggaagagatggcttcacgttttgaaatagaaaaaagagagagtatgtttgtcttctcttcagatgatgaagaagttacaccagcaagagctgtatctcgtcattttgaggatactagttatggctataaagatttctctagacatgggatgcatgttccaacatttcgtgtccaggactattgctgggaagatcatggttattctttggtaaatcgcctttatccagatgtgggacagttgattgatgaaaaatttcacattgcttacaatcttacttataatacaatggcaatgcacaaagatgttgatacctcaatgcttagacgggcaatttggaactatattcactgcatgtttggaataagatatgatgattatgactatggtgaaattaaccagctattggatcgtagctttaaagtttatatcaaaactgttgtttgcactcctgaaaaggttaccaaaagaatgtatgatagcttctggaggcagttcaagcactctgagaaggttcatgttaatctgcttcttatagaagctaggatgcaagcagaactcctttatgctctgagagccattacccgctatatgacctgatgcctttccttcattaaagatgattctggaatgatcagcagatatagtctacaagggggaaggtactaagccccaggaccaatggtagacaaaataattcagaaatccattgtgccatgattcctttagtttctgctatttttctgtggaaaaccactgctggcacaagcagtgactgtttggcagcttcaagtttagagctgtgaagacaggctgccattcacagtattttgctttttgacagtacaagatgctgtgtaactgttttaatacagcaaatagtaactctccaaatcctgttgcttttatgttaaataagataacaagaattggagcatgcaaagaatgggacttggataatgacttaagctttatatgtaaagaattttagaagatcttggtgctgctattcctgctggaggaatgaatagatggctgtttcagttaagctattagtaataaaagtgaacattgctactatctgagcctacatacataacttgtgtgatttcaaattaaacttgcattatgtgttaattttcttgcatctaaaaaagcatagaattcctactcacacagctcagcaacaaccattttgatggtaacagttaatttctttcattagttttttaaattcagggttctggatattaaattaaaatggcattcttaaagattttcttcaaaaagcaatcctaaatgaaagtgtgtaaattataagaagctggcgatcttttgatatgctgtttcacaggatcctgacactggagggcagctgtcttgtgcattacttgtgtttccagcaccaaagttgtgggacatgttgctgtagactgctgcgcagtcctgggtgcattcagtctctctgcctctgcctgcctcctggtccccactttaaaggctgtgcagctccttaaataataaagctggaaaatatttttagtcgggttatcaaatttgatttacaaaaacgctaactttgtttgaaatgcaaacaggtttgaaaatatgtattaagtactttgtattctggaagcgtgaattgcttttgaagtctgtcagtattactggtatttttaaataaagaagaatttttctcc

SEQ ID NO: 418128 - DNA, 2875 bp, Homo sapiens
gagacctgcgcaccgtgagtcgtccctgggcagaaaatgctaagctgggagagactgcggccgcggtcatgtaaatgaaagtctccaatacgtaaataacattgtcgtctggacaagtctccacaagtcagaaatccagcagacctcgagtcttgagggtgaaacagcctgtggatatgccccctcgattgtcttgtcttgtgaaaacagattatttagccaccttcatcccctttgcctcctacttaaaagagagagaaagaaaaaaaacacatttgactcagggaagagatgatgttgcctggaataagtgtgtcctgcaagctctatgacgttatgcacagcgtttactcttgcgtattaagccatcccttttctgaattgtcctttagaaagaggaacttggcattagaattcctcgaccactaggacagggaccaagcagattcatcccagaaaaggagatcctccaagtggggagtgaagacgcacagatgcatgctttatttgcagattcttttgctgctttgggccgtttggataacattacgttagtgatggttttccacccacaatatttagaaagtttcttaaaaactcagcactatctactgcaaatggatgggccgttacccctacattatcgtcactacattggaataatggctgcggcaagacatcagtgctcctacttagtgaacctgcatgtaaatgatttccttcatgttggtggggaccccaagtggctcaatggtttagagaatgctcctcaaaaactacagaatttaggagaacttaacaaagtgttagcccatagaccttggcttattaccaaagaacacattgagggacttttaaaagctgaagagcacagctggtcccttgcggaattggtacatgcagtagttttactcacacactatcattctcttgcctcattcacattcggctgtggaatcagtccagaaattcattgtgatggtggccacacattcagacctccttctgttagcaactactgcatctgtgacattacaaatggcaatcacagtgtggatgagatgccggtcaactcagcagaaaatgtttctgtaagtgattctttctttgaggttgaagccctcatggaaaagatgaggcagttacaggaatgtcgagatgaagaagaggcaagtcaggaagagatggcttcacgttttgaaatagaaaaaagagagagtatgtttgtcttctcttcagatgatgaagaagttacaccagcaagagctgtatctcgtcattttgaggatactagttatggctataaagatttctctagacatgggatgcatgttccaacatttcgtgtccaggactattgctgggaagatcatggttattctttggtaaatcgcctttatccagatgtgggacagttgattgatgaaaaatttcacattgcttacaatcttacttataatacaatggcaatgcacaaagatgttgatacctcaatgcttagacgggcaatttggaactatattcactgcatgtttggaataagatatgatgattatgactatggtgaaattaaccagctattggatcgtagctttaaagtttatatcaaaactgttgtttgcactcctgaaaaggttaccaaaagaatgtatgatagcttctggaggcagttcaagcactctgagaaggttcatgttaatctgcttcttatagaagctaggatgcaagcagaactcctttatgctctgagagccattacccgctatatgacctgatgcctttccttcattaaagatgattctggaatgatcagcagatatagtctacaagggggaaggtactaagccccaggaccaatggtagacaaaataattcagaaatccattgtgccatgattcctttagtttctgctatttttctgtggaaaaccactgctggcacaagcagtgactgtttggcagcttcaagtttagagctgtgaagacaggctgccattcacagtattttgctttttgacagtacaagatgctgtgtaactgttttaatacagcaaatagtaactctccaaatcctgttgcttttatgttaaataagataacaagaattggagcatgcaaagaatgggacttggataatgacttaagctttatatgtaaagaattttagaagatcttggtgctgctattcctgctggaggaatgaatagatggctgtttcagttaagctattagtaataaaagtgaacattgctactatctgagcctacatacataacttgtgtgatttcaaattaaacttgcattatgtgttaattttcttgcatctaaaaaagcatagaattcctactcacacagctcagcaacaaccattttgatggtaacagttaatttctttcattagttttttaaattcagggttctggatattaaattaaaatggcattcttaaagattttcttcaaaaagcaatcctaaatgaaagtgtgtaaattataagaagctggcgatcttttgatatgctgtttcacaggatcctgacactggagggcagctgtcttgtgcattacttgtgtttccagcaccaaagttgtgggacatgttgctgtagactgctgcgcagtcctgggtgcattcagtctctctgcctctgcctgcctcctggtccccactttaaaggctgtgcagctccttaaataataaagctggaaaatatttttagtcgggttatcaaatttgatttacaaaaacgctaactttgtttgaaatgcaaacaggtttgaaaatatgtattaagtactttgtattctggaagcgtgaattgcttttgaagtctgtcagtattactggtatttttaaataaagaagaatttttctcc

SEQ ID NO: 418129 - DNA, 1345 bp, Homo sapiens
gagacctgcgcaccgtgagtcgtccctgggcagaaaatgctaagctgggagagactgcggccgcggtcatgtaaatgaaagtctccaatacgtaaataacattgtcgtctggacaagtctccacaagtcagaaatccagcagacctcgagtcttgagggtgaaacagcctgtggatatgccccctcgattgtcttgtcttgtgaaaacagattatttagccaccttcatcccctttgcctcctacttaaaagagagagaaagaaaaaaaacacatttgactcagggaagagatgatgttgcctggaataagtgtgtcctgcaagctctatgacgttatgcacagcgtttactcttgcgtattaagccatcccttttctgaattgtcctttagaaagaggtacttaattgtaacattttgtgtttttttctaagtggttgcaaataggaaaccatttgaaagttactaatgtaaccttaggtaaaactcgaaccttaaatttggattgaaatcaggtgctgtcagagtgttgccttagttcaagaaatctaaatgtgaattattttttctgcagctttactcactaaaatgacgtggtttcgtgatttctttaatggagtctattatcagtatactatgtatattcatagaaacttaaatgaagacactttgtcatgaaggttgtaaagcaccaaatatttttttgagattttaacatttatggacatattagatgttccttgtttacagataataaaacaatctttaaaaatctcttacagtatcgctttggaaactttaccaaaaagtgaaaacagtatgaaagtattgaattaacatttacagtttctgtttgcgggtcataatagatcttttctctttttgagtagaagtgagccccaatcatcatgcttgaatagatctgttatttctgctgatgtttgtgtgcagagtcctggttcttgctcagatctagaatttctaaagatagctttgtaaactaaaagataaagaaatagattttggcttgcatattgttacagcgcttatgggattgtgttgaggaaaccgggaagctttgtatagttgtatttcatttttaatacatcccaacatgtgagaagataacttaggaaggaatgctttataggaaaactattcactttacaaaaagaataacacaattctttcaaatagctagcttccataatgcttttaaattaaacactttcaagaaacggaactcctgagcaaagtatagggcacaaatatggcctaagtattacaaatgcagtaacttaaagtcagtaagttttttttctaaaatatagttcatagaaggcaaa

SEQ ID NO: 418130 - DNA, 2821 bp, Homo sapiens
gagacctgcgcaccgtgagtcgtccctgggcagaaaatgctaagctgggagagactgcggccgcggtcatgtaaatgaaagtctccaatacgtaaataacattgtcgtctggacaagtctccacaagtcagaaatccagcagacctcgagtcttgagggtgaaacagcctgtggatatgccccctcgattgtcttgtcttgtgaaaacagattatttagccaccttcatcccctttgcctcctacttaaaagagagagaaagaaaacaagctctatgacgttatgcacagcgtttactcttgcgtattaagccatcccttttctgaattgtcctttagaaagaggaacttggcattagaattcctcgaccactaggacagggaccaagcagattcatcccagaaaaggagatcctccaagtggggagtgaagacgcacagatgcatgctttatttgcagattcttttgctgctttgggccgtttggataacattacgttagtgatggttttccacccacaatatttagaaagtttcttaaaaactcagcactatctactgcaaatggatgggccgttacccctacattatcgtcactacattggaataatggctgcggcaagacatcagtgctcctacttagtgaacctgcatgtaaatgatttccttcatgttggtggggaccccaagtggctcaatggtttagagaatgctcctcaaaaactacagaatttaggagaacttaacaaagtgttagcccatagaccttggcttattaccaaagaacacattgagggacttttaaaagctgaagagcacagctggtcccttgcggaattggtacatgcagtagttttactcacacactatcattctcttgcctcattcacattcggctgtggaatcagtccagaaattcattgtgatggtggccacacattcagacctccttctgttagcaactactgcatctgtgacattacaaatggcaatcacagtgtggatgagatgccggtcaactcagcagaaaatgtttctgtaagtgattctttctttgaggttgaagccctcatggaaaagatgaggcagttacaggaatgtcgagatgaagaagaggcaagtcaggaagagatggcttcacgttttgaaatagaaaaaagagagagtatgtttgtcttctcttcagatgatgaagaagttacaccagcaagagctgtatctcgtcattttgaggatactagttatggctataaagatttctctagacatgggatgcatgttccaacatttcgtgtccaggactattgctgggaagatcatggttattctttggtaaatcgcctttatccagatgtgggacagttgattgatgaaaaatttcacattgcttacaatcttacttataatacaatggcaatgcacaaagatgttgatacctcaatgcttagacgggcaatttggaactatattcactgcatgtttggaataagatatgatgattatgactatggtgaaattaaccagctattggatcgtagctttaaagtttatatcaaaactgttgtttgcactcctgaaaaggttaccaaaagaatgtatgatagcttctggaggcagttcaagcactctgagaaggttcatgttaatctgcttcttatagaagctaggatgcaagcagaactcctttatgctctgagagccattacccgctatatgacctgatgcctttccttcattaaagatgattctggaatgatcagcagatatagtctacaagggggaaggtactaagccccaggaccaatggtagacaaaataattcagaaatccattgtgccatgattcctttagtttctgctatttttctgtggaaaaccactgctggcacaagcagtgactgtttggcagcttcaagtttagagctgtgaagacaggctgccattcacagtattttgctttttgacagtacaagatgctgtgtaactgttttaatacagcaaatagtaactctccaaatcctgttgcttttatgttaaataagataacaagaattggagcatgcaaagaatgggacttggataatgacttaagctttatatgtaaagaattttagaagatcttggtgctgctattcctgctggaggaatgaatagatggctgtttcagttaagctattagtaataaaagtgaacattgctactatctgagcctacatacataacttgtgtgatttcaaattaaacttgcattatgtgttaattttcttgcatctaaaaaagcatagaattcctactcacacagctcagcaacaaccattttgatggtaacagttaatttctttcattagttttttaaattcagggttctggatattaaattaaaatggcattcttaaagattttcttcaaaaagcaatcctaaatgaaagtgtgtaaattataagaagctggcgatcttttgatatgctgtttcacaggatcctgacactggagggcagctgtcttgtgcattacttgtgtttccagcaccaaagttgtgggacatgttgctgtagactgctgcgcagtcctgggtgcattcagtctctctgcctctgcctgcctcctggtccccactttaaaggctgtgcagctccttaaataataaagctggaaaatatttttagtcgggttatcaaatttgatttacaaaaacgctaactttgtttgaaatgcaaacaggtttgaaaatatgtattaagtactttgtattctggaagcgtgaattgcttttgaagtctgtcagtattactggtatttttaaataaagaagaatttttctcc

SEQ ID NO: 418131 - DNA, 2252 bp, Homo sapiens
tttaattaaaaattcacaaaatttggccagatctggtggctcccacgtgtaatcccagcactttgagagaccaagatgggaaaatcactgaggccaagcattcaagactagcatgggcagcaaaacaagaccctatctctacaaataattttaaaagtagccaagcaaggtggcctgtgcctatagttccagttactcaggaggctgaggcagggaggatcgcttgagcccagcagttggagactgcagtgagctgtgatcataccattgtactctagcctggacaacatagtgagaccttgtctcttaaaacacacacacacacacacacactcataatttgaagaccactttgaatggctgcagcaatggaaaaggagaggggactcccaagctggtcacatctggggggctgagtggagagagagtgaaagacataaaggccaatgtgtaaggggaagagactattagtttttttttgttgttgttgttctttttgagatgagactattagtttttaaactcactgagttataaaacacaaccttttgcatgttgcagtatgggaattgaaaaaaagattggagtgtaagtgaagctgggagttagggataaaagccagttggattgtcagccaaatgacaatgatttttaccatgctacagagctatagatatagaactgtacttgaccacatttattcacatttgttctattccctgtatttaggactattgctgggaagatcatggttattctttggtaaatcgcctttatccagatgtgggacagttgattgatgaaaaatttcacattgcttacaatcttacttataatacaatggcaatgcacaaagatgttgatacctcaatgcttagacgggcaatttggaactatattcactgcatgtttggaataagatatgatgattatgactatggtgaaattaaccagctattggatcgtagctttaaagtttatatcaaaactgttgtttgcactcctgaaaaggttaccaaaagaatgtatgatagcttctggaggcagttcaagcactctgagaaggttcatgttaatctgcttcttatagaagctaggatgcaagcagaactcctttatgctctgagagccattacccgctatatgacctgatgcctttccttcattaaagatgattctggaatgatcagcagatatagtctacaagggggaaggtactaagccccaggaccaatggtagacaaaataattcagaaatccattgtgccatgattcctttagtttctgctatttttctgtggaaaaccactgctggcacaagcagtgactgtttggcagcttcaagtttagagctgtgaagacaggctgccattcacagtattttgctttttgacagtacaagatgctgtgtaactgttttaatacagcaaatagtaactctccaaatcctgttgcttttatgttaaataagataacaagaattggagcatgcaaagaatgggacttggataatgacttaagctttatatgtaaagaattttagaagatcttggtgctgctattcctgctggaggaatgaatagatggctgtttcagttaagctattagtaataaaagtgaacattgctactatctgagcctacatacataacttgtgtgatttcaaattaaacttgcattatgtgttaattttcttgcatctaaaaaagcatagaattcctactcacacagctcagcaacaaccattttgatggtaacagttaatttctttcattagttttttaaattcagggttctggatattaaattaaaatggcattcttaaagattttcttcaaaaagcaatcctaaatgaaagtgtgtaaattataagaagctggcgatcttttgatatgctgtttcacaggatcctgacactggagggcagctgtcttgtgcattacttgtgtttccagcaccaaagttgtgggacatgttgctgtagactgctgcgcagtcctgggtgcattcagtctctctgcctctgcctgcctcctggtccccactttaaaggctgtgcagctccttaaataataaagctggaaaatatttttagtcgggttatcaaatttgatttacaaaaacgctaactttgtttgaaatgcaaacaggtttgaaaatatgtattaagtactttgtattctggaagcgtgaattgcttttgaagtctgtcagtattactggtatttttaaataaagaagaatttttctcc

SEQ ID NO: 418132 - DNA, 1275 bp, Homo sapiens
cttattttatgtgttcattagattcactgaaaaactgattgtgaatgcttgtaacccttccttatatgatgttgtattttatattcaggttcatgttaatctgcttcttatagaagctaggatgcaagcagaactcctttatgctctgagagccattacccgctatatgacctgatgcctttccttcattaaagatgattctggaatgatcagcagatatagtctacaagggggaaggtactaagccccaggaccaatggtagacaaaataattcagaaatccattgtgccatgattcctttagtttctgctatttttctgtggaaaaccactgctggcacaagcagtgactgtttggcagcttcaagtttagagctgtgaagacaggctgccattcacagtattttgctttttgacagtacaagatgctgtgtaactgttttaatacagcaaatagtaactctccaaatcctgttgcttttatgttaaataagataacaagaattggagcatgcaaagaatgggacttggataatgacttaagctttatatgtaaagaattttagaagatcttggtgctgctattcctgctggaggaatgaatagatggctgtttcagttaagctattagtaataaaagtgaacattgctactatctgagcctacatacataacttgtgtgatttcaaattaaacttgcattatgtgttaattttcttgcatctaaaaaagcatagaattcctactcacacagctcagcaacaaccattttgatggtaacagttaatttctttcattagttttttaaattcagggttctggatattaaattaaaatggcattcttaaagattttcttcaaaaagcaatcctaaatgaaagtgtgtaaattataagaagctggcgatcttttgatatgctgtttcacaggatcctgacactggagggcagctgtcttgtgcattacttgtgtttccagcaccaaagttgtgggacatgttgctgtagactgctgcgcagtcctgggtgcattcagtctctctgcctctgcctgcctcctggtccccactttaaaggctgtgcagctccttaaataataaagctggaaaatatttttagtcgggttatcaaatttgatttacaaaaacgctaactttgtttgaaatgcaaacaggtttgaaaatatgtattaagtactttgtattctggaagcgtgaattgcttttgaagtctgtcagtattactggtatttttaaataaagaagaatttttctcc

SEQ ID NO: 418133 - DNA, 1158 bp, Homo sapiens
gatatagtctacaagggggaaggtactaagccccaggacaatggtagacaatatctgctgatcattccagaatcatctttaatgaaggaaaggcatcagatatagtctacaagggggaaggtactaagccccaggaccaatggtagacaaaataattcagaaatccattgtgccatgattcctttagtttctgctatttttctgtggaaaaccactgctggcacaagcagtgactgtttggcagcttcaagtttagagctgtgaagacaggctgccattcacagtattttgctttttgacagtacaagatgctgtgtaactgttttaatacagcaaatagtaactctccaaatcctgttgcttttatgttaaataagataacaagaattggagcatgcaaagaatgggacttggataatgacttaagctttatatgtaaagaattttagaagatcttggtgctgctattcctgctggaggaatgaatagatggctgtttcagttaagctattagtaataaaagtgaacattgctactatctgagcctacatacataacttgtgtgatttcaaattaaacttgcattatgtgttaattttcttgcatctaaaaaagcatagaattcctactcacacagctcagcaacaaccattttgatggtaacagttaatttctttcattagttttttaaattcagggttctggatattaaattaaaatggcattcttaaagattttcttcaaaaagcaatcctaaatgaaagtgtgtaaattataagaagctggcgatcttttgatatgctgtttcacaggatcctgacactggagggcagctgtcttgtgcattacttgtgtttccagcaccaaagttgtgggacatgttgctgtagactgctgcgcagtcctgggtgcattcagtctctctgcctctgcctgcctcctggtccccactttaaaggctgtgcagctccttaaataataaagctggaaaatatttttagtcgggttatcaaatttgatttacaaaaacgctaactttgtttgaaatgcaaacaggtttgaaaatatgtattaagtactttgtattctggaagcgtgaattgcttttgaagtctgtcagtattactggtatttttaaataaagaagaatttttctcc

SEQ ID NO: 418134 - DNA, 1868 bp, Homo sapiens
cccccgccgtccgtgctgactgaggcgctgcagccaggagccgcggccggctgcccagcgctcgccgcctccgcgcgtccgcagccgtccccgcgccgacatgcgcttggccgccgccgcgaacgaggcgtacacggcccctttggcggtctcggggctgctgggctgcaagcagtgcggcgggggccgcgaccaggacgaggaacttggcattagaattcctcgaccactaggacagggaccaagcagattcatcccagaaaaggagatcctccaagtggggagtgaagacgcacagatgcatgctttatttgcagattcttttgctgctttgggccgtttggataacattacgttagtgatggttttccacccacaatatttagaaagtttcttaaaaactcagcactatctactgcaaatggatgggccgttacccctacattatcgtcactacattggaataatggctgcggcaagacatcagtgctcctacttagtgaacctgcatgtaaatgatttccttcatgttggtggggaccccaagtggctcaatggtttagagaatgctcctcaaaaactacagaatttaggagaacttaacaaagtgttagcccatagaccttggcttattaccaaagaacacattgagggacttttaaaagctgaagagcacagctggtcccttgcggaattggtacatgcagtagttttactcacacactatcattctcttgcctcattcacattcggctgtggaatcagtccagaaattcattgtgatggtggccacacattcagacctccttctgttagcaactactgcatctgtgacattacaaatggcaatcacagtgtggatgagatgccggtcaactcagcagaaaatgtttctgtaagtgattctttctttgaggttgaagccctcatggaaaagatgaggcagttacaggaatgtcgagatgaagaagaggcaagtcaggaagagatggcttcacgttttgaaatagaaaaaagagagagtatgtttgtcttctcttcagatgatgaagaagttacaccagcaagagctgtatctcgtcattttgaggatactagttatggctataaagatttctctagacatgggatgcatgttccaacatttcgtgtccaggactattgctgggaagatcatggttattctttggtaaatcgcctttatccagatgtgggacagttgattgatgaaaaatttcacattgcttacaatcttacttataatacaatggcaatgcacaaagatgttgatacctcaatgcttagacgggcaatttggaactatattcactgcatgtttggaataagatatgatgattatgactatggtgaaattaaccagctattggatcgtagctttaaagtttatatcaaaactgttgtttgcactcctgaaaaggttaccaaaagaatgtatgatagcttctggaggcagttcaagcactctgagaaggtatgtgcctattgtggcttatttactttgtaacttagcaatgattcgtagtctccttcacctaacctaatggtgctgaaaccctttccatcacccctaccaacccaaagaaaaacattccaggacagctgtctcaggtaccccttcagaagggaacctgattatgttgatagagtaaaagaataaagacagggaacacaggtgggctggcccgtcttcagaagtgctggcatggctgtcagcacatagaagactgttttataaaagctgtgtataggtagaagtgtctgttctctttgaaacatctttatagaaattactgaataatgatttggcaggggaagttgctattctgataaaacagtgtctagatttt

SEQ ID NO: 418135 - DNA, 434 bp, Homo sapiens
atgtcgagatgaagaagaggcaagtcaggaagagatggcttcacgttttgaaatagaaaaaagagagagtatgtttgtcttctcttcaggtaagaacaaccattatatagtcaatataattattgcaaactcaactttttatttagagaatttaaataacttttaaagcatcaatctaaatatgtccttccttttagagagactattgcataggtattcctatttacaaataatttttaaagcaagcaactaagaaaaggtcataagtgaaaacatcctagactaagggggaggacatttaatttggattctggcactaaaattacttctaataagctttgtgaacttggcttagtcacttaacatatgagtgccctcttttttctctttttttttttttttttttttttaagaaacagggtcttgctttgttg

SEQ ID NO: 418136 - DNA, 918 bp, Homo sapiens
gaacccggtggctgcacagacaaaaaagccccgaatggctggagggcgttcagctgttaacagccttttggggcagagcacggatttgacagctccacaacgtgaggatatccactgaccccgcgagacggaggagaacgcttccccgaaattctctgcccaccaaagccagcgctgcaaggttgcaactttcaaactttgtttttccagaaagaagactgccctttcgtgtacaaggagagggtgagagggtgacctagcttgtagatcggctgaaggcaccagtggttccaaatgtcacccagatgtgtgttttcatgacgatttgatttctctgattttatttttacatttttcattttaaaaatacaaagcaatttttttggggcatgctgaaaggtaactgaagaccgcaaaggaaaaactattgtcatggctgaaggagagaatgaagtgagatgggatggactctgcagcagagattcaactactagggagacagcattggaaaacattaggcaaaccattttgaggaaaaccgagtatcttcgttcggtgaaagaaacacctcatcgtccatcagacgggctttcaaataccgagtcttcggatgggttgaataagctacttgctcatctgcttatgctttctaagaggtgtcccttcaaagatgtgagagagaaaagtgagtttattctgaagagcatccagtgtactcaaagtgaagaccgtaagaatgaagatcttcatgattatccacgtccacttaatgaatgcatagcaaatgatgtctccattcctacagcatgctattccaggcaccatgtgcagacatgactatctgcagctaagaagaaaagagtttcttcccacgtctctctctcggggaagaaaacctttcccagaaaccctctagca

SEQ ID NO: 418137 - DNA, 2814 bp, Homo sapiens
cccccgccgtccgtgctgactgaggcgctgcagccaggagccgcggccggctgcccagcgctcgccgcctccgcgcgtccgcagccgtccccgcgccgacatgcgcttggccgccgccgcgaacgaggcgtacacggcccctttggcggtctcggggctgctgggctgcaagcagtgcggcgggggccgcgaccaggacgaggaacttggcattagaattcctcgaccactaggacagggaccaagcagattcatcccagaaaaggagatcctccaagtggggagtgaagacgcacagatgcatgctttatttgcagattcttttgctgctttgggccgtttggataacattacgttagtgatggttttccacccacaatatttagaaagtttcttaaaaactcagcactatctactgcaaatggatgggccgttacccctacattatcgtcactacattggaataatggctgcggcaagacatcagtgctcctacttagtgaacctgcatgtaaatgatttccttcatgttggtggggaccccaagtggctcaatggtttagagaatgctcctcaaaaactacagaatttaggagaacttaacaaagtgttagcccatagaccttggcttattaccaaagaacacattgagggacttttaaaagctgaagagcacagctggtcccttgcggaattggtacatgcagtagttttactcacacactatcattctcttgcctcattcacattcggctgtggaatcagtccagaaattcattgtgatggtggccacacattcagacctccttctgttagcaactactgcatctgtgacattacaaatggcaatcacagtgtggatgagatgccggtcaactcagcagaaaatgtttctgtaagtgattctttctttgaggttgaagccctcatggaaaagatgaggcagttacaggaatgtcgagatgaagaagaggcaagtcaggaagagatggcttcacgttttgaaatagaaaaaagagagagtatgtttgtcttctcttcagatgatgaagaagttacaccagcaagagctgtatctcgtcattttgaggatactagttatggctataaagatttctctagacatgggatgcatgttccaacatttcgtgtccaggactattgctgggaagatcatggttattctttggtaaatcgcctttatccagatgtgggacagttgattgatgaaaaatttcacattgcttacaatcttacttataatacaatggcaatgcacaaagatgttgatacctcaatgcttagacgggcaatttggaactatattcactgcatgtttggaataagatatgatgattatgactatggtgaaattaaccagctattggatcgtagctttaaagtttatatcaaaactgttgtttgcactcctgaaaaggttaccaaaagaatgtatgatagcttctggaggcagttcaagcactctgagaaggttcatgttaatctgcttcttatagaagctaggatgcaagcagaactcctttatgctctgagagccattacccgctatatgacctgatgcctttccttcattaaagatgattctggaatgatcagcagatatagtctacaagggggaaggtactaagccccaggaccaatggtagacaaaataattcagaaatccattgtgccatgattcctttagtttctgctatttttctgtggaaaaccactgctggcacaagcagtgactgtttggcagcttcaagtttagagctgtgaagacaggctgccattcacagtattttgctttttgacagtacaagatgctgtgtaactgttttaatacagcaaatagtaactctccaaatcctgttgcttttatgttaaataagataacaagaattggagcatgcaaagaatgggacttggataatgacttaagctttatatgtaaagaattttagaagatcttggtgctgctattcctgctggaggaatgaatagatggctgtttcagttaagctattagtaataaaagtgaacattgctactatctgagcctacatacataacttgtgtgatttcaaattaaacttgcattatgtgttaattttcttgcatctaaaaaagcatagaattcctactcacacagctcagcaacaaccattttgatggtaacagttaatttctttcattagttttttaaattcagggttctggatattaaattaaaatggcattcttaaagattttcttcaaaaagcaatcctaaatgaaagtgtgtaaattataagaagctggcgatcttttgatatgctgtttcacaggatcctgacactggagggcagctgtcttgtgcattacttgtgtttccagcaccaaagttgtgggacatgttgctgtagactgctgcgcagtcctgggtgcattcagtctctctgcctctgcctgcctcctggtccccactttaaaggctgtgcagctccttaaataataaagctggaaaatatttttagtcgggttatcaaatttgatttacaaaaacgctaactttgtttgaaatgcaaacaggtttgaaaatatgtattaagtactttgtattctggaagcgtgaattgcttttgaagtctgtcagtattactggtatttttaaataaagaagaatttttctcccaaaaaaaaaacaaccaccacaccacaacaccaaaacacacaccaaagtcaaaccacaagaaaagcgcatacccacaccacaacaacaccccaacagcgcgcaccacacacccaacaccccccccactaagagaa

SEQ ID NO: 418138 - DNA, 872 bp, Homo sapiens
  misc_feature (750)..(750): n is a, c, g, or t
  misc_feature (779)..(779): n is a, c, g, or t
  misc_feature (807)..(807): n is a, c, g, or t
  misc_feature (860)..(860): n is a, c, g, or t
cccacggatcatcagaaggcgcggacctggaggaggcgccccagaaggcgacgcctcttgcctcctgtctctcgcctctcgaaggaagtttgctcttaatttcagagccgggttcgccgtcggatcaacctccaggagctagcagcgggcgcggaccgggcagtttccgcgctcagcacaggcagctcgcggtcatgggcggctcagcctccagccagctggacgagggcaagtgcgcttacatccgagggaaaactgaggctgccatcaaaaacttcagtccctactacagtcgtcagtactctgtggctttctgcaatcacgtgcgcactgaagtagaacagcaaagagatttaacgtcacagtttttgaagaccaagccaccattggcgcctggaactattttgtatgaagcagagctatcacaattttctgaagacataaagaagtggaaggagagatacgttgtagttaaaaatgattatgctgtggagagctatgagaataaagaggcctatcagagaggagctgctcctaaatgtcgaattcttccagccggtggcaaggtgttaacctcagaagatgaatataatctgttgtctgacaggcatttcccagaccctcttgcctccagtgagaaggagaacactcagccctttgtggtcctgcccaaggaattcccagtgtacctgtggcagcccttcttcagacacggctacttctgcttccacgaggctgctgaccagaaanaaagttttaattggccctccttggaattngacttgccgttcagggcattctccaatncattgaaattaccttgaaaagccagaatgaacatttttggaaagccccaaagnccctttttttaa

SEQ ID NO: 418139 - DNA, 579 bp, Homo sapiens
  misc_feature (543)..(543): n is a, c, g, or t
cccacggatcatcagaaggcgcggacctggaggaggcgccccagaaggcgacgcctcttgcctcctgtctctcgcctctcgaaggaagtttgctcttaatttcagagccgggttcgccgtcggatcaacctccaggagctagcagcgggcgcggaccgggcagtttccgcgctcagcacaggcagctcgcggtcatgggcggctcagcctccagccagctggacgagggcaagtgcgcttacatccgagggaaaactgaggctgccatcaaaaacttcagtccctactacagtcgtcagtactctgtggctttctgcaatcacgtgcgcactgaagtagaacagcaaagagatttaacgtcacagtttttgaagaccaagccaccattggcgcctggaactattttgtatgaagcagagctatcacaattttctgaagacataaagaagtggaaggagagatacgttgtagttaaaaatgattatgctgtggagagctatgagaataaagagggcctatcagaggagggagctgcccttcagngggagttaaaggggccaattttggtgaagtctttct

SEQ ID NO: 418140 - DNA, 6451 bp, Homo sapiens
cccacggatcatcagaaggcgcggacctggaggaggcgccccagaaggcgacgcctcttgcctcctgtctctcgcctctcgaaggaagtttgctcttaatttcagagccgggttcgccgtcggatcaacctccaggagctagcagcgggcgcggaccgggcagtttccgcgctcagcacaggcagctcgcggtcatgggcggctcagcctccagccagctggacgagggcaagtgcgcttacatccgagggaaaactgaggctgccatcaaaaacttcagtccctactacagtcgtcagtactctgtggctttctgcaatcacgtgcgcactgaagtagaacagcaaagagatttaacgtcacagtttttgaagaccaagccaccattggcgcctggaactattttgtatgaagcagagctatcacaattttctgaagacataaagaagtggaaggagagatacgttgtagttaaaaatgattatgctgtggagagctatgagaataaagaggcctatcagagaggagctgctcctaaatgtcgaattcttccagccggtggcaaggtgttaacctcagaagatgaatataatctgttgtctgacaggcatttcccagaccctcttgcctccagtgagaaggagaacactcagccctttgtggtcctgcccaaggaattcccagtgtacctgtggcagcccttcttcagacacggctacttctgcttccacgaggctgctgaccagaagaggtttagtgccctcctgagtgactgcgtcaggcatctcaatcatgattacatgaagcagatgacatttgaagcccaagcctttttagaagctgtgcaattcttccgacaggagaagggtcactatggttcctgggaaatgatcactggggatgaaatccagatcctgagtaacctggtgatggaggagctcctgcccactcttcagacagacctgctgcctaagatgaaggggaagaagaatgacagaaagaggacgtggcttggtctcctcgaggaggcctacaccctggttcagcatcaagtttcagaaggattaagtgccttgaaggaggaatgcagagctctgacaaagggcctggaaggaacgatccgttctgacatggatcagattgtgaactcaaagaactatttaattggaaagatcaaagcgatggtggcccagccggcggagaaaagctgcttggagagtgtgcagccattcctggcatccatcctggaggagctcatgggaccagtgagctcgggattcagtgaagtacgtgtactctttgagaaagaggtgaatgaagtcagccagaacttccagaccaccaaagacagtgtccagctaaaggagcatctagaccggcttatgaatcttccgctgcattccgtgaagatggaaccttgttatactaaagtcaacctgcttcacgagcgcctgcaggatctcaagagccgcttcagattcccccacattgatctggtggttcagaggacacagaactacatgcaggagctaatggagaatgcagtgttcacttttgagcagttgctttccccacatctccaaggagaggcctccaaaactgcagttgccattgagaaggttaaactccgagtcttaaagcaatatgattatgacagcagcaccatccgaaagaagatatttcaagaggcactagttcaaatcacacttcccactgtgcagaaggcactggcgtccacatgcaaaccagagcttcagaaatacgagcagttcatctttgcagatcataccaatatgattcacgttgaaaatgtctatgaggagattttacatcagatcctgcttgatgaaactctgaaagtgataaaggaagctgctatcttgaagaaacacaacttatttgaagataacatggccttgcccagtgaaagtgtgtccagcttaacagatctaaagccccccacagggtcaaaccaggccagccctgccaggagagcttctgccattctgccaggagttctgggtagtgagaccctcagtaacgaagtattccaggagtcagaggaagagaagcagcctgaggtccctagctcgttggccaaaggagaaagcctttctctccctgggccaagcccacccccagatgggactgagcaggtgattatttcaagagtggatgaccccgtggtgaatcctgtggcaacagaggacacagcaggactcccgggcacatgctcatcagagctggagtttggagggacccttgaggatgaagaacccgcccaggaagagccagaacccatcactgcctcgggttctttgaaggcgctcagaaagttgctgacagcgtccgtggaagtaccagtggactctgctccagtgatggaagaagatacgaatggggagagccacgttccccaagaaaatgaagaagaagaggaaaaagagcccagtcaggcagctgccatccaccccgacaactgtgaagaaagtgaagtcagcgagagggaggcccaacctccctgtcccgaggcccatggggaggagttggggggatttccagaggtaggcagcccagcctctccgccagccagtggagggctcaccgaggagcccctggggcccatggagggggagctcccaggagaggcctgcacactcactgcccatgaaggaagagggggcaagtgtaccgaggaaggggatgcctcacagcaagagggctgcaccttaggttctgaccccatctgcctcagtgagagccaggtttctgaggaacaagaagagatgggagggcaaagcagcgcggcccaggccacggccagtgtgaatgcagaggagatcaaggtagcccgtattcatgagtgtcagtgggtggtggaggatgctccaaacccggatgtcctgctgtcacacaaagatgacgtgaaggagggagaaggtggtcaggagagtttcccagagctgccctcagaggagtgaaagggacaatttggctgaagtctttctctgaaaaaagccaaagggttataggggtacacttaggggttgcatgcaagctgttaccaaaaaatttttaagtattttcttaatttgaataataaaaccagaggaaatgcatacagggcatgagcaactgaggcaaacctttgtggacatgaattgttctacgatgaatttttgctttagtattttaataagaattacaaagacaatggcatacttggggtgagagggagctgaggatgtctgaggagggaatagtattgcagggaagactgagaaaacagtaggatgacagttttgagtatactctgcacttttcaattgtgcaatcttcttgtgcactttaaggctttttaattttgtttgagaatgcaaatgtatactgtaagtctacctttactatctactatgcctacttcaccatctcttaaggactcggcatttgtccacagtcagactgcaagagagggtaggtcatgaacagtcacccgtgctggctgtagcccccacagaggcaatcatgcccaatagattcaagagaagctaagcggaaatggagggtggaaggtgtgatctgtgggactgtctgggcctgttactcatcctgctatcaatttcttattaattaatcttgatgattcttattaattaatcacatttgcaggaaattcagatgaggcaagaaaattttattggcctgggtaagactgaaagcattccaaattaggcttagactgtgcaaagggcttagctaagttatcgagcttaaaacccgtcaattaaacaaacattatttgaacagttactgcatgccacgcactgtgttgggcttagtaataaaaaaaagaaaagataagtgcttgttctagcataaattaaaaggtccaagggaatttaatctggaagagaacatatgccaatttttaaactatgacagcttttttttttctctttccattcaaatagtcctggttcattcccagaagggcacaaaatgaatgaataaataaataaatgaataaagacaaaagccaaggtgtatgctctcaagttccaaagatgttatcaaaagctgaaatcatttgtttggtcattcagcaagctaattgagtctctgttatataccaagcactggggataccatggcgaaaaacaactttgttccttcctcctagaacttacattttaatggaaatagacaaaacacatcttcttaacggatggtgacctataaccattaatgttgaaaatggaagagacttgcttccaaaagattaaaaggagttgttcttttctccttcagaaaaataccagatcatttcctaaaatctccagtcccaagtattacatcgtggtttccctccccgactttttattttattttattctatttttttgagatggagtctcgctctgtcgccaaggctggagtgcagtggtgtgatctcggctcactgcaacctccgcctcctgggttcaggagattctcctctgtcagcgtcccaagtagctggaattacagccatgcggcaccattcccggctaatttttgtatttttggtggagatgggttttcaccatgttggccaggctggtctcaaactcctgatttcaggcgatccacccacctcgacttcccaaagtgctgggattacagcgtgagctacctggcccctccccaaattttaacatcagatctcaacatatttgttgagaacttgtttagatcatcactatcgagtaaatttatgtcagttctttagagcatttgcttcacacacagttcaaccatttaaccagaaattaaaatatcacccttttcagccctcccatgaagaatttctaggtcataaacatgaataatactcagtatatgtataatatcatatttaattgttgcaacttttcttggcgtgtttaaatcctcatgtctttgagggatcccaccacaggtgaaggaagtaaagaccacttctcccccagtctctgctttctgcagtgctcactcatatcctggcatttagcatggtgtgttgaaattaggtttacttcttgtctctccaagtggctcctctcttaaaagacagaaactagggtttagtcatcatttgtgcttcctgctagaaacccacagccttgaataatggcttcctgcctccttgagtcactttaatatccctggtgcataggacctggcatgcgtcaggctgctcgggaaatgtgggaactggacacccagaacactgctgtgctggggctatttggggcctgctgtcaggcagaaagacgttttgaattgggctttctgcccttgttgagttttctcttaagtaaagtccaaagtccaaggggcagatggccagatgcactgcccagtaaggcaggaagccaaagaggcagtgcccagccccacaaaggctgcccgactccctgggacagtagtgtggagtcccagcccaggctgacctcacaccggagcttcctagcttcctttctttgctcaatgcagggcttcttgcaccccctggaaagctaagagatttttttcaaccctaaaagagagtacctttcactgcattggatggatgaacatcagtgccctaactttatccatcatgtaggtcagggaggactgggcactatttggcaggatgtactccagaatataatcaaagaattttctgtacatatttcactaaagacaagtttttgggctggatgtggtagcttacacctataatcccagcactttgggaggctgaggtgagagggtcacttgagcccaggagttctagacaagcctgggaaacatagcaagatctcatccttacaaaaaataataatggtgtgtgcctgcagtcctagctacttgggtggttgaggcaggaggattgtttgagtgagggaagttgaggctgcagtgaactatgattttaccactgcactccagcttgggcaacaaaatgagaccctgtctcaaaaaaaaaaaaaagttttctagaataagcaggatgattgtttaatttgaagatggaacaggaaactagagtgcatttaaaatactctgtcttcattttaacatgttgaatggaataactgcatatcaccatgagtttgttttgcttttcatacagacttgtatgtgtcatttgagtggtttccagattggagcgaggttattctgatctaaatgaacagcatttttttccttagcctctgtttgccactctgggtatctctcctatgggcaaagccattagaaatgcataaaacctcgagacatggtttttggcaaaaactccatgactttaaactagctcttttactactgacctttcacagagaaaaaatatttcccttgaaaaaaactgggcttgtcattttttcccttgtagctttaagcagagacataagtgccttgcattacacatagtaaactttcttta

SEQ ID NO: 418141 - DNA, 6823 bp, Homo sapiens
cccacggatcatcagaaggcgcggacctggaggaggcgccccagaaggcgacgcctcttgcctcctgtctctcgcctctcgaaggaagtttgctcttaatttcagagccgggttcgccgtcggatcaacctccaggagctagcagcgggcgcggaccgggcagtttccgcgctcagcacaggcagctcgcggtcatgggcggctcagcctccagccagctggacgagggcaagtgcgcttacatccgagggaaaactgaggctgccatcaaaaacttcagtccctactacagtcgtcagtactctgtggctttctgcaatcacgtgcgcactgaagtagaacagcaaagagatttaacgtcacagtttttgaagaccaagccaccattggcgcctggaactattttgtatgaagcagagctatcacaattttctgaagacataaagaagtggaaggagagatacgttgtagttaaaaatgattatgctgtggagagctatgagaataaagaggcctatcagagaggagctgctcctaaatgtcgaattcttccagccggtggcaaggtgttaacctcagaagatgaatataatctgttgtctgacaggcatttcccagaccctcttgcctccagtgagaaggagaacactcagccctttgtggtcctgcccaaggaattcccagtgtacctgtggcagcccttcttcagacacggctacttctgcttccacgaggctgctgaccagaagaggtttagtgccctcctgagtgactgcgtcaggcatctcaatcatgattacatgaagcagatgacatttgaagcccaagcctttttagaagctgtgcaattcttccgacaggagaagggtcactatggttcctgggaaatgatcactggggatgaaatccagatcctgagtaacctggtgatggaggagctcctgcccactcttcagacagacctgctgcctaagatgaaggggaagaagaatgacagaaagaggacgtggcttggtctcctcgaggaggcctacaccctggttcagcatcaagtttcagaaggattaagtgccttgaaggaggaatgcagagctctgacaaagggcctggaaggaacgatccgttctgacatggatcagattgtgaactcaaagaactatttaattggaaagatcaaagcgatggtggcccagccggcggagaaaagctgcttggagagtgtgcagccattcctggcatccatcctggaggagctcatgggaccagtgagctcgggattcagtgaagtacgtgtactctttgagaaagaggtgaatgaagtcagccagaacttccagaccaccaaagacagtgtccagctaaaggagcatctagaccggcttatgaatcttccgctgcattccgtgaagatggaaccttgttatactaaagtcaacctgcttcacgagcgcctgcaggatctcaagagccgcttcagattcccccacattgatctggtggttcagaggacacagaactacatgcaggagcaatatgattatgacagcagcaccatccgaaagaagatatttcaagaggcactagttcaaatcacacttcccactgtgcagaaggcactggcgtccacatgcaaaccagagcttcagaaatacgagcagttcatctttgcagatcataccaatatgattcacgttgaaaatgtctatgaggagattttacatcagatcctgcttgatgaaactctgaaagtgataaaggaagctgctatcttgaagaaacacaacttatttgaagataacatggccttgcccagtgaaagtgtgtccagcttaacagatctaaagccccccacagggtcaaaccaggccagccctgccaggagagcttctgccattctgccaggagttctgggtagtgagaccctcagtaacgaagtattccaggagtcagaggaagagaagcagcctgaggtccctagctcgttggccaaaggagaaagcctttctctccctgggccaagcccacccccagatgggactgagcaggtgattatttcaagagtggatgaccccgtggtgaatcctgtggcaacagaggacacagcaggactcccgggcacatgctcatcagagctggagtttggagggacccttgaggatgaagaacccgcccaggaagagccagaacccatcactgcctcgggttctttgaaggcgctcagaaagttgctgacagcgtccgtggaagtaccagtggactctgctccagtgatggaagaagatacgaatggggagagccacgttccccaagaaaatgaagaagaagaggaaaaagagcccagtcaggcagctgccatccaccccgacaactgtgaagaaagtgaagtcagcgagagggaggcccaacctccctgtcccgaggcccatggggaggagttggggggatttccagaggtaggcagcccagcctctccgccagccagtggagggctcaccgaggagcccctggggcccatggagggggagctcccaggagaggcctgcacactcactgcccatgaaggaagagggggcaagtgtaccgaggaaggggatgcctcacagcaagagggctgcaccttaggttctgaccccatctgcctcagtgagagccaggtttctgaggaacaagaagagatgggagggcaaagcagcgcggcccaggccacggccagtgtgaatgcagaggagatcaaggtagcccgtattcatgagtgtcagtgggtggtggaggatgctccaaacccggatgtcctgctgtcacacaaagatgacgtgaaggagggagaaggtggtcaggagagtttcccagagctgccctcagaggagtgaaagggacaatttggctgaagtctttctctgaaaaaagccaaagggttataggggtacacttaggggttgcatgcaagctgttaccaaaaaatttttaagtattttcttaatttgaataataaaaccagaggaaatgcatacagggcatgagcaactgaggcaaacctttgtggacatgaattgttctacgatgaatttttgctttagtattttaataagaattacaaagacaatggcatacttggggtgagagggagctgaggatgtctgaggagggaatagtattgcagggaagactgagaaaacagtaggatgacagttttgagtatactctgcacttttcaattgtgcaatcttcttgtgcactttaaggctttttaattttgtttgagaatgcaaatgtatactgtaagtctacctttactatctactatgcctacttcaccatctcttaaggactcggcatttgtccacagtcagactgcaagagagggtaggtcatgaacagtcacccgtgctggctgtagcccccacagaggcaatcatgcccaatagattcaagagaagctaagcggaaatggagggtggaaggtgtgatctgtgggactgtctgggcctgttactcatcctgctatcaatttcttattaattaatcttgatgattcttattaattaatcacatttgcaggaaattcagatgaggcaagaaaattttattggcctgggtaagactgaaagcattccaaattaggcttagactgtgcaaagggcttagctaagttatcgagcttaaaacccgtcaattaaacaaacattatttgaacagttactgcatgccacgcactgtgttgggcttagtaataaaaaaaagaaaagataagtgcttgttctagcataaattaaaaggtccaagggaatttaatctggaagagaacatatgccaatttttaaactatgacagcttttttttttctctttccattcaaatagtcctggttcattcccagaagggcacaaaatgaatgaataaataaataaatgaataaagacaaaagccaaggtgtatgctctcaagttccaaagatgttatcaaaagctgaaatcatttgtttggtcattcagcaagctaattgagtctctgttatataccaagcactggggataccatggcgaaaaacaactttgttccttcctcctagaacttacattttaatggaaatagacaaaacacatcttcttaacggatggtgacctataaccattaatgttgaaaatggaagagacttgcttccaaaagattaaaaggagttgttcttttctccttcagaaaaataccagatcatttcctaaaatctccagtcccaagtattacatcgtggtttccctccccgactttttattttattttattctatttttttgagatggagtctcgctctgtcgccaaggctggagtgcagtggtgtgatctcggctcactgcaacctccgcctcctgggttcaggagattctcctctgtcagcgtcccaagtagctggaattacagccatgcggcaccattcccggctaatttttgtatttttggtggagatgggttttcaccatgttggccaggctggtctcaaactcctgatttcaggcgatccacccacctcgacttcccaaagtgctgggattacagcgtgagctacctggcccctccccaaattttaacatcagatctcaacatatttgttgagaacttgtttagatcatcactatcgagtaaatttatgtcagttctttagagcatttgcttcacacacagttcaaccatttaaccagaaattaaaatatcacccttttcagccctcccatgaagaatttctaggtcataaacatgaataatactcagtatatgtataatatcatatttaattgttgcaacttttcttggcgtgtttaaatcctcatgtctttgagggatcccaccacaggtgaaggaagtaaagaccacttctcccccagtctctgctttctgcagtgctcactcatatcctggcatttagcatggtgtgttgaaattaggtttacttcttgtctctccaagtggctcctctcttaaaagacagaaactagggtttagtcatcatttgtgcttcctgctagaaacccacagccttgaataatggcttcctgcctccttgagtcactttaatatccctggtgcataggacctggcatgcgtcaggctgctcgggaaatgtgggaactggacacccagaacactgctgtgctggggctatttggggcctgctgtcaggcagaaagacgttttgaattgggctttctgcccttgttgagttttctcttaagtaaagtccaaagtccaaggggcagatggccagatgcactgcccagtaaggcaggaagccaaagaggcagtgcccagccccacaaaggctgcccgactccctgggacagtagtgtggagtcccagcccaggctgacctcacaccggagcttcctagcttcctttctttgctcaatgcagggcttcttgcaccccctggaaagctaagagatttttttcaaccctaaaagagagtacctttcactgcattggatggatgaacatcagtgccctaactttatccatcatgtaggtcagggaggactgggcactatttggcaggatgtactccagaatataatcaaagaattttctgtacatatttcactaaagacaagtttttgggctggatgtggtagcttacacctataatcccagcactttgggaggctgaggtgagagggtcacttgagcccaggagttctagacaagcctgggaaacatagcaagatctcatccttacaaaaaataataatggtgtgtgcctgcagtcctagctacttgggtggttgaggcaggaggattgtttgagtgagggaagttgaggctgcagtgaactatgattttaccactgcactccagcttgggcaacaaaatgagaccctgtctcaaaaaaaaaaaaaagttttctagaataagcaggatgattgtttaatttgaagatggaacaggaaactagagtgcatttaaaatactctgtcttcattttaacatgttgaatggaataactgcatatcaccatgagtttgttttgcttttcatacagacttgtatgtgtcatttgagtggtttccagattggagcgaggttattctgatctaaatgaacagcatttttttccttagcctctgtttgccactctgggtatctctcctatgggcaaagccattagaaatgcataaaacctcgagacatggtttttggcaaaaactccatgactttaaactagctcttttactactgacctttcacagagaaaaaatatttcccttgaaaaaaactgggcttgtcattttttcccttgtagctttaagcagagacataagtgccttgcattacacatagtaaactttctttaaaaaaaaaaaaaaaagattttggagactaccagggtaagattccaacttgtccaaaagctttctggccttacatattttattataaaaattctcaagtctggtaatcttctatgtcagagctagtgatttcaaaaggtttcacaattccccaagacaaaagtgattttcgttcattataataaggttaagtgatatgtgattcatagcaattttgatgtgaagaagggaaggacatcattgacttaataatagtatcagtcggtgcaacagttggcaacatgtgccttcacactttaccataaagagacgggtttgagggtttgccttctaaagtctgcaacttcaagaaaaaaaatcgacactgtggattgactttcccggtcactatataaagcaaataaacttaaaacactttgtaaccatgtatttactctgccaggtgcctatattccaataaaatgttcatccttgaaaaaaaaaaa

SEQ ID NO: 418142 - DNA, 1918 bp, Homo sapiens
tcctgcaaaaacatttattcacaggtgggctggggtcagctgagatttattcacaggtgggccagggtcagctgagcgtgaagtgctgggcacagagttcacccggccgtcccagcaggccctgggctgggataaactccagtggcaccggctcgggccccttcttcttcaggtcccgctcaaagatctcgtaggccgtgagctccagcagtggcgcgatgctgacctcaggcatggacagggcctggttgatgacgctgctgtcaggcagaaagacgttttgaattgggctttctgcccttgttgagttttctcttaagtaaagtccaaagtccaaggggcagatggccagatgcactgcccagtaaggcaggaagccaaagaggcagtgcccagccccacaaaggctgcccgactccctgggacagtagtgtggagtcccagcccaggctgacctcacaccggagcttcctagcttcctttctttgctcaatgcagggcttcttgcaccccctggaaagctaagagatttttttcaaccctaaaagagagtacctttcactgcattggatggatgaacatcagtgccctaactttatccatcatgtaggtcagggaggactgggcactatttggcaggatgtactccagaatataatcaaagaattttctgtacatatttcactaaagacaagtttttgggctggatgtggtagcttacacctataatcccagcactttgggaggctgaggtgagagggtcacttgagcccaggagttctagacaagcctgggaaacatagcaagatctcatccttacaaaaaataataatggtgtgtgcctgcagtcctagctacttgggtggttgaggcaggaggattgtttgagtgagggaagttgaggctgcagtgaactatgattttaccactgcactccagcttgggcaacaaaatgagaccctgtctcaaaaaaaaaaaaaagttttctagaataagcaggatgattgtttaatttgaagatggaacaggaaactagagtgcatttaaaatactctgtcttcattttaacatgttgaatggaataactgcatatcaccatgagtttgttttgcttttcatacagacttgtatgtgtcatttgagtggtttccagattggagcgaggttattctgatctaaatgaacagcatttttttccttagcctctgtttgccactctgggtatctctcctatgggcaaagccattagaaatgcataaaacctcgagacatggtttttggcaaaaactccatgactttaaactagctcttttactactgacctttcacagagaaaaaatatttcccttgaaaaaaactgggcttgtcattttttcccttgtagctttaagcagagacataagtgccttgcattacacatagtaaactttctttaaaaaaaaaaaaaaaagattttggagactaccagggtaagattccaacttgtccaaaagctttctggccttacatattttattataaaaattctcaagtctggtaatcttctatgtcagagctagtgatttcaaaaggtttcacaattccccaagacaaaagtgattttcgttcattataataaggttaagtgatatgtgattcatagcaattttgatgtgaagaagggaaggacatcattgacttaataatagtatcagtcggtgcaacagttggcaacatgtgccttcacactttaccataaagagacgggtttgagggtttgccttctaaagtctgcaacttcaagaaaaaaaatcgacactgtggattgactttcccggtcactatataaagcaaataaacttaaaacactttgtaaccatgtatttactctgccaggtgcctatattccaataaaatgttcatccttgaaaaaaaaaaa

SEQ ID NO: 418143 - DNA, 2313 bp, Homo sapiens
cccacggatcatcagaaggcgcggacctggaggaggcgccccagaaggcgacgcctcttgcctcctgtctctcgcctctcgaaggaagtttgctcttaatttcagagccgggttcgccgtcggatcaacctccaggagctagcagcgggcgcggaccgggcagtttccgcgctcagcacaggcagctcgcggtcatgggcggctcagcctccagccagctggacgagggcaagtgcgcttacatccgagggaaaactgaggctgccatcaaaaacttcagtccctactacagtcgtcagtactctgtggctttctgcaatcacgtgcgcactgaagtagaacagcaaagagatttaacgtcacagtttttgaagaccaagccaccattggcgcctggaactattttgtatgaagcagagctatcacaattttctgaagacataaagaagtggaaggagagatacgttgtagttaaaaatgattatgctgtggagagctatgagaataaagaggcctatcagagaggagctgctcctaaatgtcgaattcttccagccggtggcaaggtgttaacctcagaagatgaatataatctgttgtctgacaggcatttcccagaccctcttgcctccagtgagaaggagaacactcagccctttgtggtcctgcccaaggaattcccagtgtacctgtggcagcccttcttcagacacggctacttctgcttccacgaggctgctgaccagaagaggtttagtgccctcctgagtgactgcgtcaggcatctcaatcatgattacatgaagcagatgacatttgaagcccaagcctttttagaagctgtgcaattcttccgacaggagaagggtcactatggttcctgggaaatgatcactggggatgaaatccagatcctgagtaacctggtgatggaggagctcctgcccactcttcagacagacctgctgcctaagatgaaggggaagaagaatgacagaaagaggacgtggcttggtctcctcgaggaggcctacaccctggttcagcatcaagtttcagaaggattaagtgccttgaaggaggaatgcagagctctgacaaagggcctggaaggaacgatccgttctgacatggatcagattgtgaactcaaagaactatttaattggaaagatcaaagcgatggtggcccagccggcggagaaaagctgcttggagagtgtgcagccattcctggcatccatcctggaggagctcatgggaccagtgagctcgggattcagtgaagtacgtgtactctttgagaaagaggtgaatgaagtcagccagaacttccagaccaccaaagacagtgtccagctaaaggagcatctagaccggcttatgaatcttccgctgcattccgtgaagatggaaccttgttatactaaagtcaacctgcttcacgagcgcctgcaggatctcaagagccgcttcagattcccccacattgatctggtggttcagaggacacagaactacatgcaggagctaatggagaatgcagtgttcacttttgagcagttgctttccccacatctccaaggagaggcctccaaaactgcagttgccattgagaaggttaaactccgagtcttaaagcaatatgattatgacagcagcaccatccgaaagaagatatttcaagaggcactagttcaaatcacacttcccactgtgcagaaggcactggcgtccacatgcaaaccagagcttcagaaatacgagcagttcatctttgcagatcataccaatatgattcacgttgaaaatgtctatgaggagattttacatcagatcctgcttgatgaaactctgaaagcagggtaagattccaacttgtccaaaagctttctggccttacatattttattataaaaattctcaagtctggtaatcttctatgtcagagctagtgatttcaaaaggtttcacaattccccaagacaaaagtgattttcgttcattataataaggttaagtgatatgtgattcatagcaattttgatgtgaagaagggaaggacatcattgacttaataatagtatcagtcggtgcaacagttggcaacatgtgccttcacactttaccataaagagacgggtttgagggtttgccttctaaagtctgcaacttcaagaaaaaaaatcgacactgtggattgactttcccggtcactatataaagcaaataaacttaaaacactttgtaaccatgtatttactctgccaggtgcctatattccaataaaatgttcatccttgaaaaaaaaaaa

SEQ ID NO: 418144 - DNA, 729 bp, Homo sapiens
tggctgtggagaagcaggtcaagcagacaaccttgctgatcttctctgtggtttatccttcaatgtggctgtatctcttggagcatcccctcagactttctccagtgctggatgaaggcactgcatggtgggatgcagtggtacctgggctctggtcggtctagacgtcattctcacttcttcacactgctcctcccttcgtttactaaacattaaagaggatgacaatggggcttgggggacagtggggacgaagagcatggagatactttgataccttgatcatgaagggcttaggaggaatgatagtcccaggggacacagactaagatgcaagccaccaaaaccaagccttgcaattccttcacaattttgctgaagatgtccttatccattattgaactctttcattttactgtatgccctaagttcttctagtttgaatatgtgaagttcgaatttggggaatttgttatttacattgggaaaacaacaaggtgagaatatcagcagatgttactgttccttgcggatgtttaagaatgttcagcctctaagattgtcttagttgagatttctgtggcctctgtagtaggttaaactattaacctactacagagttcatctggtccgggacagggacagccaatcaggacatttttagttggcctgatgctcagatgtagccatcaccgactgaccgactctgggctgtcttctgctgcgcag

SEQ ID NO: 418145 - DNA, 386 bp, Homo sapiens
ctcctgcccactcttcagacagacctgctgcctaagatgaaggggaagaagaatgacagaaagaggacgtggcttggtgtaagcaatggttttgctctacaactgagctactcaaaatgggaacattctcttcccttttcttttagggcatttgttgttgttgttgatattcccttccctgggtgtagaaatgcctacttcgaacctgctgagtctcacttacaagaagactgttccaaacagactccaactttgaaagaaaaattacaatgtgtgtgcagttctgtttgttatgatggcctgtgatgaaggctcctccctccacttgactccatcagtgcttacacgtgacagagccctgatttatgtgttattccttgttgcag

SEQ ID NO: 418146 - DNA, 6934 bp, Homo sapiens
cccacggatcatcagaaggcgcggacctggaggaggcgccccagaaggcgacgcctcttgcctcctgtctctcgcctctcgaaggaagtttgctcttaatttcagagccgggttcgccgtcggatcaacctccaggagctagcagcgggcgcggaccgggcagtttccgcgctcagcacaggcagctcgcggtcatgggcggctcagcctccagccagctggacgagggcaagtgcgcttacatccgagggaaaactgaggctgccatcaaaaacttcagtccctactacagtcgtcagtactctgtggctttctgcaatcacgtgcgcactgaagtagaacagcaaagagatttaacgtcacagtttttgaagaccaagccaccattggcgcctggaactattttgtatgaagcagagctatcacaattttctgaagacataaagaagtggaaggagagatacgttgtagttaaaaatgattatgctgtggagagctatgagaataaagaggcctatcagagaggagctgctcctaaatgtcgaattcttccagccggtggcaaggtgttaacctcagaagatgaatataatctgttgtctgacaggcatttcccagaccctcttgcctccagtgagaaggagaacactcagccctttgtggtcctgcccaaggaattcccagtgtacctgtggcagcccttcttcagacacggctacttctgcttccacgaggctgctgaccagaagaggtttagtgccctcctgagtgactgcgtcaggcatctcaatcatgattacatgaagcagatgacatttgaagcccaagcctttttagaagctgtgcaattcttccgacaggagaagggtcactatggttcctgggaaatgatcactggggatgaaatccagatcctgagtaacctggtgatggaggagctcctgcccactcttcagacagacctgctgcctaagatgaaggggaagaagaatgacagaaagaggacgtggcttggtctcctcgaggaggcctacaccctggttcagcatcaagtttcagaaggattaagtgccttgaaggaggaatgcagagctctgacaaagggcctggaaggaacgatccgttctgacatggatcagattgtgaactcaaagaactatttaattggaaagatcaaagcgatggtggcccagccggcggagaaaagctgcttggagagtgtgcagccattcctggcatccatcctggaggagctcatgggaccagtgagctcgggattcagtgaagtacgtgtactctttgagaaagaggtgaatgaagtcagccagaacttccagaccaccaaagacagtgtccagctaaaggagcatctagaccggcttatgaatcttccgctgcattccgtgaagatggaaccttgttatactaaagtcaacctgcttcacgagcgcctgcaggatctcaagagccgcttcagattcccccacattgatctggtggttcagaggacacagaactacatgcaggagctaatggagaatgcagtgttcacttttgagcagttgctttccccacatctccaaggagaggcctccaaaactgcagttgccattgagaaggttaaactccgagtcttaaagcaatatgattatgacagcagcaccatccgaaagaagatatttcaagaggcactagttcaaatcacacttcccactgtgcagaaggcactggcgtccacatgcaaaccagagcttcagaaatacgagcagttcatctttgcagatcataccaatatgattcacgttgaaaatgtctatgaggagattttacatcagatcctgcttgatgaaactctgaaagtgataaaggaagctgctatcttgaagaaacacaacttatttgaagataacatggccttgcccagtgaaagtgtgtccagcttaacagatctaaagccccccacagggtcaaaccaggccagccctgccaggagagcttctgccattctgccaggagttctgggtagtgagaccctcagtaacgaagtattccaggagtcagaggaagagaagcagcctgaggtccctagctcgttggccaaaggagaaagcctttctctccctgggccaagcccacccccagatgggactgagcaggtgattatttcaagagtggatgaccccgtggtgaatcctgtggcaacagaggacacagcaggactcccgggcacatgctcatcagagctggagtttggagggacccttgaggatgaagaacccgcccaggaagagccagaacccatcactgcctcgggttctttgaaggcgctcagaaagttgctgacagcgtccgtggaagtaccagtggactctgctccagtgatggaagaagatacgaatggggagagccacgttccccaagaaaatgaagaagaagaggaaaaagagcccagtcaggcagctgccatccaccccgacaactgtgaagaaagtgaagtcagcgagagggaggcccaacctccctgtcccgaggcccatggggaggagttggggggatttccagaggtaggcagcccagcctctccgccagccagtggagggctcaccgaggagcccctggggcccatggagggggagctcccaggagaggcctgcacactcactgcccatgaaggaagagggggcaagtgtaccgaggaaggggatgcctcacagcaagagggctgcaccttaggttctgaccccatctgcctcagtgagagccaggtttctgaggaacaagaagagatgggagggcaaagcagcgcggcccaggccacggccagtgtgaatgcagaggagatcaaggtagcccgtattcatgagtgtcagtgggtggtggaggatgctccaaacccggatgtcctgctgtcacacaaagatgacgtgaaggagggagaaggtggtcaggagagtttcccagagctgccctcagaggagtgaaagggacaatttggctgaagtctttctctgaaaaaagccaaagggttataggggtacacttaggggttgcatgcaagctgttaccaaaaaatttttaagtattttcttaatttgaataataaaaccagaggaaatgcatacagggcatgagcaactgaggcaaacctttgtggacatgaattgttctacgatgaatttttgctttagtattttaataagaattacaaagacaatggcatacttggggtgagagggagctgaggatgtctgaggagggaatagtattgcagggaagactgagaaaacagtaggatgacagttttgagtatactctgcacttttcaattgtgcaatcttcttgtgcactttaaggctttttaattttgtttgagaatgcaaatgtatactgtaagtctacctttactatctactatgcctacttcaccatctcttaaggactcggcatttgtccacagtcagactgcaagagagggtaggtcatgaacagtcacccgtgctggctgtagcccccacagaggcaatcatgcccaatagattcaagagaagctaagcggaaatggagggtggaaggtgtgatctgtgggactgtctgggcctgttactcatcctgctatcaatttcttattaattaatcttgatgattcttattaattaatcacatttgcaggaaattcagatgaggcaagaaaattttattggcctgggtaagactgaaagcattccaaattaggcttagactgtgcaaagggcttagctaagttatcgagcttaaaacccgtcaattaaacaaacattatttgaacagttactgcatgccacgcactgtgttgggcttagtaataaaaaaaagaaaagataagtgcttgttctagcataaattaaaaggtccaagggaatttaatctggaagagaacatatgccaatttttaaactatgacagcttttttttttctctttccattcaaatagtcctggttcattcccagaagggcacaaaatgaatgaataaataaataaatgaataaagacaaaagccaaggtgtatgctctcaagttccaaagatgttatcaaaagctgaaatcatttgtttggtcattcagcaagctaattgagtctctgttatataccaagcactggggataccatggcgaaaaacaactttgttccttcctcctagaacttacattttaatggaaatagacaaaacacatcttcttaacggatggtgacctataaccattaatgttgaaaatggaagagacttgcttccaaaagattaaaaggagttgttcttttctccttcagaaaaataccagatcatttcctaaaatctccagtcccaagtattacatcgtggtttccctccccgactttttattttattttattctatttttttgagatggagtctcgctctgtcgccaaggctggagtgcagtggtgtgatctcggctcactgcaacctccgcctcctgggttcaggagattctcctctgtcagcgtcccaagtagctggaattacagccatgcggcaccattcccggctaatttttgtatttttggtggagatgggttttcaccatgttggccaggctggtctcaaactcctgatttcaggcgatccacccacctcgacttcccaaagtgctgggattacagcgtgagctacctggcccctccccaaattttaacatcagatctcaacatatttgttgagaacttgtttagatcatcactatcgagtaaatttatgtcagttctttagagcatttgcttcacacacagttcaaccatttaaccagaaattaaaatatcacccttttcagccctcccatgaagaatttctaggtcataaacatgaataatactcagtatatgtataatatcatatttaattgttgcaacttttcttggcgtgtttaaatcctcatgtctttgagggatcccaccacaggtgaaggaagtaaagaccacttctcccccagtctctgctttctgcagtgctcactcatatcctggcatttagcatggtgtgttgaaattaggtttacttcttgtctctccaagtggctcctctcttaaaagacagaaactagggtttagtcatcatttgtgcttcctgctagaaacccacagccttgaataatggcttcctgcctccttgagtcactttaatatccctggtgcataggacctggcatgcgtcaggctgctcgggaaatgtgggaactggacacccagaacactgctgtgctggggctatttggggcctgctgtcaggcagaaagacgttttgaattgggctttctgcccttgttgagttttctcttaagtaaagtccaaagtccaaggggcagatggccagatgcactgcccagtaaggcaggaagccaaagaggcagtgcccagccccacaaaggctgcccgactccctgggacagtagtgtggagtcccagcccaggctgacctcacaccggagcttcctagcttcctttctttgctcaatgcagggcttcttgcaccccctggaaagctaagagatttttttcaaccctaaaagagagtacctttcactgcattggatggatgaacatcagtgccctaactttatccatcatgtaggtcagggaggactgggcactatttggcaggatgtactccagaatataatcaaagaattttctgtacatatttcactaaagacaagtttttgggctggatgtggtagcttacacctataatcccagcactttgggaggctgaggtgagagggtcacttgagcccaggagttctagacaagcctgggaaacatagcaagatctcatccttacaaaaaataataatggtgtgtgcctgcagtcctagctacttgggtggttgaggcaggaggattgtttgagtgagggaagttgaggctgcagtgaactatgattttaccactgcactccagcttgggcaacaaaatgagaccctgtctcaaaaaaaaaaaaaagttttctagaataagcaggatgattgtttaatttgaagatggaacaggaaactagagtgcatttaaaatactctgtcttcattttaacatgttgaatggaataactgcatatcaccatgagtttgttttgcttttcatacagacttgtatgtgtcatttgagtggtttccagattggagcgaggttattctgatctaaatgaacagcatttttttccttagcctctgtttgccactctgggtatctctcctatgggcaaagccattagaaatgcataaaacctcgagacatggtttttggcaaaaactccatgactttaaactagctcttttactactgacctttcacagagaaaaaatatttcccttgaaaaaaactgggcttgtcattttttcccttgtagctttaagcagagacataagtgccttgcattacacatagtaaactttctttaaaaaaaaaaaaaaaagattttggagactaccagggtaagattccaacttgtccaaaagctttctggccttacatattttattataaaaattctcaagtctggtaatcttctatgtcagagctagtgatttcaaaaggtttcacaattccccaagacaaaagtgattttcgttcattataataaggttaagtgatatgtgattcatagcaattttgatgtgaagaagggaaggacatcattgacttaataatagtatcagtcggtgcaacagttggcaacatgtgccttcacactttaccataaagagacgggtttgagggtttgccttctaaagtctgcaacttcaagaaaaaaaatcgacactgtggattgactttcccggtcactatataaagcaaataaacttaaaacactttgtaaccatgtatttactctgccaggtgcctatattccaataaaatgttcatccttgaaaaaaaaaaa

SEQ ID NO: 418147 - DNA, 6633 bp, Homo sapiens
cccacggatcatcagaaggcgcggacctggaggaggcgccccagaaggcgacgcctcttgcctcctgtctctcgcctctcgaaggaagtttgctcttaatttcagagccgggttcgccgtcggatcaacctccaggagctagcagcgggcgcggaccgggcagtttccgcgctcagcacaggcagctcgcggtcatgggcggctcagcctccagccagctggacgagggcaagtgcgcttacatccgagggaaaactgaggctgccatcaaaaacttcagtccctactacagtcgtcagtactctgtggctttctgcaatcacgtgcgcactgaagtagaacagcaaagagatttaacgtcacagtttttgaagaccaagccaccattggcgcctggaactattttgtatgaagcagagctatcacaattttctgaagacataaagaagtggaaggagagatacgttgtagttaaaaatgattatgctgtggagagctatgagaataaagaggcctatcagagaggagctgctcctaaatgtcgaattcttccagccggtggcaaggtgttaacctcagaagatgaatataatctgttgtctgacaggcatttcccagaccctcttgcctccagtgagaaggagaacactcagccctttgtggtcctgcccaaggaattcccagtgtacctgtggcagcccttcttcagacacggctacttctgcttccacgaggctgctgaccagaagaggtttagtgccctcctgagtgactgcgtcaggcatctcaatcatgattacatgaagcagatgacatttgaagcccaagcctttttagaagctgtgcaattcttccgacaggagaagggtcactatggttcctgggaaatgatcactggggatgaaatccagatcctgagtaacctggtgatggaggagctcctgcccactcttcagacagacctgctgcctaagatgaaggggaagaagaatgacagaaagaggacgtggcttggtctcctcgaggaggcctacaccctggttcagcatcaagtttcagaaggattaagtgccttgaaggaggaatgcagagctctgacaaagggcctggaaggaacgatccgttctgacatggatcagattgtgaactcaaagaactatttaattggaaagatcaaagcgatggtggcccagccggcggagaaaagctgcttggagagtgtgcagccattcctggcatccatcctggaggagctcatgggaccagtgagctcgggattcagtgaagtacgtgtactctttgagaaagaggtgaatgaagtcagccagaacttccagaccaccaaagacagtgtccagctaaaggagcatctagaccggcttatgaatcttccgctgcattccgtgaagatggaaccttgttatactaaagtcaacctgcttcacgagcgcctgcaggatctcaagagccgcttcagattcccccacattgatctggtggttcagaggacacagaactacatgcaggagctaatggagaatgcagtgttcacttttgagcagttgctttccccacatctccaaggagaggcctccaaaactgcagttgccattgagaaggttaaactccgagtcttaaagcaatatgattatgacagcagcaccatccgaaagaagatatttcaagaggcactagttcaaatcacacttcccactgtgcagaaggcactggcgtccacatgcaaaccagagcttcagaaatacgagcagttcatctttgcagatcataccaatatgattcacgttgaaaatgtctatgaggagattttacatcagatcctgcttgatgaaactctgaaagtgataaaggaagctgctatcttgaagaaacacaacttatttgaagataacatggccttgcccagtgaaagtgtgtccagcttaacagatctaaagccccccacagggtcaaaccaggccagccctgccaggagagcttctgccattctgccaggagttctgggtagtgagaccctcagtaacgaagtattccaggagtcagaggaagagaagcagcctgaggtccctagctcgttggccaaaggagaaagcctttctctccctgggccaagcccacccccagatgggactgagcaggtgattatttcaagagtggatgaccccgtggtgaatcctgtggcaacagaggacacagcaggactcccgggcacatgctcatcagagctggagtttggagggacccttgaggatgaagaacccgcccaggaagagccagaacccatcactgcctcgggttctttgaaggcgctcagaaagttgctgacagcgtccgtggaagtaccagtggactctgctccagtgatggaagaagatacgaatggggagagccacgttccccaagaaaatgaagaagaagaggaaaaagagcccagtcaggcagctgccatccaccccgacaactgtgaagaaagtgaagtcagcgagagggaggcccaacctccctgtcccgaggcccatggggaggagttggggggatttccagaggtaggcagcccagcctctccgccagccagtggagggctcaccgaggagcccctggggcccatggagggggagctcccaggagaggcctgcacactcactgcccatgaaggaagagggggcaagtgtaccgaggaaggggatgcctcacagcaagagggctgcaccttaggttctgaccccatctgcctcagtgagagccaggtttctgaggaacaagaagagatgggagggcaaagcagcgcggcccaggccacggccagtgtgaatgcagaggagatcaaggtagcccgtattcatgagtgtcagtgggtggtggaggatgctccaaacccggatgtcctgctgtcacacaaagatgacgtgaaggagggagaaggtggtcaggagagtttcccagagctgccctcagaggagtgaaagggacaatttggctgaagtctttctctgaaaaaagccaaagggttataggggtacacttaggggttgcatgcaagctgttaccaaaaaatttttaagtattttcttaatttgaataataaaaccagaggaaatgcatacagggcatgagcaactgaggcaaacctttgtggacatgaattgttctacgatgaatttttgctttagtattttaataagaattacaaagacaatggcatacttggggtgagagggagctgaggatgtctgaggagggaatagtattgcagggaagactgagaaaacagtaggatgacagttttgagtatactctgcacttttcaattgtgcaatcttcttgtgcactttaaggctttttaattttgtttgagaatgcaaatgtatactgtaagtctacctttactatctactatgcctacttcaccatctcttaaggactcggcatttgtccacagtcagactgcaagagagggtaggtcatgaacagtcacccgtgctggctgtagcccccacagaggcaatcatgcccaatagattcaagagaagctaagcggaaatggagggtggaaggtgtgatctgtgggactgtctgggcctgttactcatcctgctatcaatttcttattaattaatcttgatgattcttattaattaatcacatttgcaggaaattcagatgaggcaagaaaattttattggcctgggtaagactgaaagcattccaaattaggcttagactgtgcaaagggcttagctaagttatcgagcttaaaacccgtcaattaaacaaacattatttgaacagttactgcatgccacgcactgtgttgggcttagtaataaaaaaaagaaaagataagtgcttgttctagcataaattaaaaggtccaagggaatttaatctggaagagaacatatgccaatttttaaactatgacagcttttttttttctctttccattcaaatagtcctggttcattcccagaagggcacaaaatgaatgaataaataaataaatgaataaagacaaaagccaaggtgtatgctctcaagttccaaagatgttatcaaaagctgaaatcatttgtttggtcattcagcaagctaattgagtctctgttatataccaagcactggggataccatggcgaaaaacaactttgttccttcctcctagaacttacattttaatggaaatagacaaaacacatcttcttaacggatggtgacctataaccattaatgttgaaaatggaagagacttgcttccaaaagattaaaaggagttgttcttttctccttcagaaaaataccagatcatttcctaaaatctccagtcccaagtattacatcgtggtttccctccccgactttttattttattttattctatttttttgagatggagtctcgctctgtcgccaaggctggagtgcagtggtgtgatctcggctcactgcaacctccgcctcctgggttcaggagattctcctctgtcagcgtcccaagtagctggaattacagccatgcggcaccattcccggctaatttttgtatttttggtggagatgggttttcaccatgttggccaggctggtctcaaactcctgatttcaggcgatccacccacctcgacttcccaaagtgctgggattacagcgtgagctacctggcccctccccaaattttaacatcagatctcaacatatttgttgagaacttgtttagatcatcactatcgagtaaatttatgtcagttctttagagcatttgcttcacacacagttcaaccatttaaccagaaattaaaatatcacccttttcagccctcccatgaagaatttctaggtcataaacatgaataatactcagtatatgtataatatcatatttaattgttgcaacttttcttggcgtgtttaaatcctcatgtctttgagggatcccaccacaggtgaaggaagtaaagaccacttctcccccagtctctgctttctgcagtgctcactcatatcctggcatttagcatggtgtgttgaaattaggtttacttcttgtctctccaagtggctcctctcttaaaagacagaaactagggtttagtcatcatttgtgcttcctgctagaaacccacagccttgaataatggcttcctgcctccttgagtcactttaatatccctggtgcataggacctggcatgcgtcaggctgctcgggaaatgtgggaactggacacccagaacactgctgtgctggggctatttggggcctgctgtcaggcagaaagacgttttgaattgggctttctgcccttgttgagttttctcttaagtaaagtccaaagtccaaggggcagatggccagatgcactgcccagtaaggcaggaagccaaagaggcagtgcccagccccacaaaggctgcccgactccctgggacagtagtgtggagtcccagcccaggctgacctcacaccggagcttcctagcttcctttctttgctcaatgcagggcttcttgcaccccctggaaagctaagagatttttttcaaccctaaaagagagtacctttcactgcattggatggatgaacatcagtgccctaactttatccatcatgtaggtcagggaggactgggcactatttggcaggatgtactccagaatataatcaaagaaaaaaaaaaaaaaaagttttctagaataagcaggatgattgtttaatttgaagatggaacaggaaactagagtgcatttaaaatactctgtcttcattttaacatgttgaatggaataactgcatatcaccatgagtttgttttgcttttcatacagacttgtatgtgtcatttgagtggtttccagattggagcgaggttattctgatctaaatgaacagcatttttttccttagcctctgtttgccactctgggtatctctcctatgggcaaagccattagaaatgcataaaacctcgagacatggtttttggcaaaaactccatgactttaaactagctcttttactactgacctttcacagagaaaaaatatttcccttgaaaaaaactgggcttgtcattttttcccttgtagctttaagcagagacataagtgccttgcattacacatagtaaactttctttaaaaaaaaaaaaaaaagattttggagactaccagggtaagattccaacttgtccaaaagctttctggccttacatattttattataaaaattctcaagtctggtaatcttctatgtcagagctagtgatttcaaaaggtttcacaattccccaagacaaaagtgattttcgttcattataataaggttaagtgatatgtgattcatagcaattttgatgtgaagaagggaaggacatcattgacttaataatagtatcagtcggtgcaacagttggcaacatgtgccttcacactttaccataaagagacgggtttgagggtttgccttctaaagtctgcaacttcaagaaaaaaaatcgacactgtggattgactttcccggtcactatataaagcaaataaacttaaaacactttgtaaccatgtatttactctgccaggtgcctatattccaataaaatgttcatccttgaaaaaaaaaaa

SEQ ID NO: 418148 - DNA, 6150 bp, Homo sapiens
cccacggatcatcagaaggcgcggacctggaggaggcgccccagaaggcgacgcctcttgcctcctgtctctcgcctctcgaaggaagtttgctcttaatttcagagccgggttcgccgtcggatcaacctccaggagctagcagcgggcgcggaccgggcagtttccgcgctcagcacaggcagctcgcggtcatgggcggctcagcctccagccagctggacgagggcaagtgcgcttacatccgagggaaaactgaggctgccatcaaaaacttcagtccctactacagtcgtcagtactctgtggctttctgcaatcacgtgcgcactgaagtagaacagcaaagagatttaacgtcacagtttttgaagaccaagccaccattggcgcctggaactattttgtatgaagcagagctatcacaattttctgaagacataaagaagtggaaggagagatacgttgtagttaaaaatgattatgctgtggagagctatgagaataaagaggcctatcagagaggagctgctcctaaatgtcgaattcttccagccggtggcaaggtgttaacctcagaagatgaatataatctgttgtctgacaggcatttcccagaccctcttgcctccagtgagaaggagaacactcagccctttgtggtcctgcccaaggaattcccagtgtacctgtggcagcccttcttcagacacggctacttctgcttccacgaggctgctgaccagaagaggtttagtgccctcctgagtgactgcgtcaggcatctcaatcatgattacatgaagcagatgacatttgaagcccaagcctttttagaagctgtgcaattcttccgacaggagaagggtcactatggttcctgggaaatgatcactggggatgaaatccagatcctgagtaacctggtgatggaggagctcctgcccactcttcagacagacctgctgcctaagatgaaggggaagaagaatgacagaaagaggacgtggcttggtctcctcgaggaggcctacaccctggttcagcatcaagtttcagaaggattaagtgccttgaaggaggaatgcagagctctgacaaagggcctggaaggaacgatccgttctgacatggatcagattgtgaactcaaagaactatttaattggaaagatcaaagcgatggtggcccagccggcggagaaaagctgcttggagagtgtgcagccattcctggcatccatcctggaggagctcatgggaccagtgagctcgggattcagtgaagtacgtgtactctttgagaaagaggtgaatgaagtcagccagaacttccagaccaccaaagacagtgtccagctaaaggagcatctagaccggcttatgaatcttccgctgcattccgtgaagatggaaccttgttatactaaagtcaacctgcttcacgagcgcctgcaggatctcaagagccgcttcagattcccccacattgatctggtggttcagaggacacagaactacatgcaggagctaatggagaatgcagtgttcacttttgagcagttgctttccccacatctccaaggagaggcctccaaaactgcagttgccattgagaaggttaaactccgagtcttaaagcaatatgattatgacagcagcaccatccgaaagaagatatttcaagaggcactagttcaaatcacacttcccactgtgcagaaggcactggcgtccacatgcaaaccagagcttcagaaatacgagcagttcatctttgcagatcataccaatatgattcacgttgaaaatgtctatgaggagattttacatcagatcctgcttgatgaaactctgaaagtgataaaggaagctgctatcttgaagaaacacaacttatttgaagataacatggccttgcccagtgaaagtgtgtccagcttaacagatctaaagccccccacagggtcaaaccaggccagccctgccaggagagcttctgccattctgccaggagttctgggtagtgagaccctcagtaacgaagtattccaggagtcagaggaagagaagcagcctgaggtccctagctcgttggccaaaggagaaagcctttctctccctgggccaagcccacccccagatgggactgagcaggtgattatttcaagagtggatgaccccgtggtgaatcctgtggcaacagaggacacagcaggactcccgggcacatgctcatcagagctggagtttggagggacccttgaggatgaagaacccgcccaggaagagccagaacccatcactgcctcgggttctttgaaggcgctcagaaagttgctgacagcgtccgtggaagtaccagtggactctgctccagtgatggaagaagatacgaatggggagagccacgttccccaagaaaatgaagaagaagaggaaaaagagcccagtcaggcagctgccatccaccccgacaactgtgaagaaagtgaagtcagcgagagggaggcccaacctccctgtcccgaggcccatggggaggagttggggggatttccagaggtaggcagcccagcctctccgccagccagtggagggctcaccgaggagcccctggggcccatggagggggagctcccaggagaggcctgcacactcactgcccatgaaggaagagggggcaagtgtaccgaggaaggggatgcctcacagcaagagggctgcaccttaggttctgaccccatctgcctcagtgagagccaggtttctgaggaacaagaagagatgggagggcaaagcagcgcggcccaggccacggccagtgtgaatgcagaggagatcaaggtagcccgtattcatgagtgtcagtgggtggtggaggatgctccaaacccggatgtcctgctgtcacacaaagatgacgtgaaggagggagaaggtggtcaggagagtttcccagagctgccctcagaggagtgaaagggacaatttggctgaagtctttctctgaaaaaagccaaagggttataggggtacacttaggggttgcatgcaagctgttaccaaaaaatttttaagtattttcttaatttgaataataaaaccagaggaaatgcatacagggcatgagcaactgaggcaaacctttgtggacatgaattgttctacgatgaatttttgctttagtattttaataagaattacaaagacaatggcatacttggggtgagagggagctgaggatgtctgaggagggaatagtattgcagggaagactgagaaaacagtaggatgacagttttgagtatactctgcacttttcaattgtgcaatcttcttgtgcactttaaggctttttaattttgtttgagaatgcaaatgtatactgtaagtctacctttactatctactatgcctacttcaccatctcttaaggactcggcatttgtccacagtcagactgcaagagagggtaggtcatgaacagtcacccgtgctggctgtagcccccacagaggcaatcatgcccaatagattcaagagaagctaagcggaaatggagggtggaaggtgtgatctgtgggactgtctgggcctgttactcatcctgctatcaatttcttattaattaatcttgatgattcttattaattaatcacatttgcaggaaattcagatgaggcaagaaaattttattggcctgggtaagactgaaagcattccaaattaggcttagactgtgcaaagggcttagctaagttatcgagcttaaaacccgtcaattaaacaaacattatttgaacagttactgcatgccacgcactgtgttgggcttagtaataaaaaaaagaaaagataagtgcttgttctagcataaattaaaaggtccaagggaatttaatctggaagagaacatatgccaatttttaaactatgacagcttttttttttctctttccattcaaatagtcctggttcattcccagaagggcacaaaatgaatgaataaataaataaatgaataaagacaaaagccaaggtgtatgctctcaagttccaaagatgttatcaaaagctgaaatcatttgtttggtcattcagcaagctaattgagtctctgttatataccaagcactggggataccatggcgaaaaacaactttgttccttcctcctagaacttacattttaatggaaatagacaaaacacatcttcttaacggatggtgacctataaccattaatgttgaaaatggaagagacttgcttccaaaagattaaaaggagttgttcttttctccttcagaaaaataccagatcatttcctaaaatctccagtcccaagtattacatcgtggtttccctccccgactttttattttattttattctatttttttgagatggagtctcgctctgtcgccaaggctggagtgcagtggtgtgatctcggctcactgcaacctccgcctcctgggttcaggagattctcctctgtcagcgtcccaagtagctggaattacagccatgcggcaccattcccggctaatttttgtatttttggtggagatgggttttcaccatgttggccaggctggtctcaaactcctgatttcaggcgatccacccacctcgacttcccaaagtgctgggattacagcgtgagctacctggcccctccccaaattttaacatcagatctcaacatatttgttgagaacttgtttagatcatcactatcgagtaaatttatgtcagttctttagagcatttgcttcacacacagttcaaccatttaaccagaaattaaaatatcacccttttcagccctcccatgaagaatttctaggtcataaacatgaataatactcagtatatgtataatatcatatttaattgttgcaacttttcttggcgtgtttaaatcctcatgtctttgagggatcccaccacaggtgaaggaagtaaagaccacttctcccccagtctctgctttctgcagtgctcactcatatcctggcatttagcatggtgtgttgaaattaggtttacttcttgtctctccaagtggctcctctcttaaaagacagaaactagggtttagtcatcatttgtgcttcctgctagaaacccacagccttgaataatggcttcctgcctccttgagtcactttaatatccctggtgcataggacctggcatgcgtcaggctgctcgggaaatgtgggaactggacacccagaacactgctgtgctggggctatttggggcctgctgtcaggcagaaagacgttttgaattgggctttctgcccttgttgagttttctcttaagtaaagtccaaagtccaaggggcagatggccagatgcactgcccagtaaggcaggaagccaaagaggcagtgcccagccccacaaaggctgcccgactccctgggacagtagtgtggagtcccagcccaggctgacctcacaccggagcttcctagcttcctttctttgctcaatgcagggcttcttgcaccccctggaaagctaagagatttttttcaaccctaaaagagagtacctttcactgcattggatggatgaacatcagtgccctaactttatccatcatgtaggtcagggaggactgggcactatttggcaggatgtactccagaatataatcaaagaaaaaaaaaaaaaaaagttttctagaataagcaggatgattgtttaatttgaagatggaacaggaaactagagtgcatttaaaatactctgtcttcattttaacatgttgaatggaataactgcatatcaccatgagtttgttttgcttttcatacagacttgtatgtgtcatttgagtggtttccagattggagcgaggttattctgatctaaatgaacagcatttttttccttagcctctgtttgccactctgggtatctctcctatgggcaaagccattagaaatgcataaaacctcgagacatggtttttggcaaaaactccatgactttaaactagctcttttactactgacctttcacagagaaaaaatatttcccttgaaaaaaactgggcttgtcattttttcccttgtagctttaagcagagacataagtgccttgcattacacatagtaaactttcttta

SEQ ID NO: 418149 - DNA, 4032 bp, Homo sapiens
cccacggatcatcagaaggcgcggacctggaggaggcgccccagaaggcgacgcctcttgcctcctgtctctcgcctctcgaaggaagtttgctcttaatttcagagccgggttcgccgtcggatcaacctccaggagctagcagcgggcgcggaccgggcagtttccgcgctcagcacaggcagctcgcggtcatgggcggctcagcctccagccagctggacgagggcaagtgcgcttacatccgagggaaaactgaggctgccatcaaaaacttcagtccctactacagtcgtcagtactctgtggctttctgcaatcacgtgcgcactgaagtagaacagcaaagagatttaacgtcacagtttttgaagaccaagccaccattggcgcctggaactattttgtatgaagcagagctatcacaattttctgaagacataaagaagtggaaggagagatacgttgtagttaaaaatgattatgctgtggagagctatgagaataaagaggcctatcagagaggagctgctcctaaatgtcgaattcttccagccggtggcaaggtgttaacctcagaagatgaatataatctgttgtctgacaggcatttcccagaccctcttgcctccagtgagaaggagaacactcagccctttgtggtcctgcccaaggaattcccagtgtacctgtggcagcccttcttcagacacggctacttctgcttccacgaggctgctgaccagaagaggtttagtgccctcctgagtgactgcgtcaggcatctcaatcatgattacatgaagcagatgacatttgaagcccaagcctttttagaagctgtgcaattcttccgacaggagaagggtcactatggttcctgggaaatgatcactggggatgaaatccagatcctgagtaacctggtgatggaggagctcctgcccactcttcagacagacctgctgcctaagatgaaggggaagaagaatgacagaaagaggacgtggcttggtctcctcgaggaggcctacaccctggttcagcatcaagtttcagaaggattaagtgccttgaaggaggaatgcagagctctgacaaagggcctggaaggaacgatccgttctgacatggatcagattgtgaactcaaagaactatttaattggaaagatcaaagcgatggtggcccagccggcggagaaaagctgcttggagagtgtgcagccattcctggcatccatcctggaggagctcatgggaccagtgagctcgggattcagtgaagtacgtgtactctttgagaaagaggtgaatgaagtcagccagaacttccagaccaccaaagacagtgtccagctaaaggagcatctagaccggcttatgaatcttccgctgcattccgtgaagatggaaccttgttatactaaagtcaacctgcttcacgagcgcctgcaggatctcaagagccgcttcagattcccccacattgatctggtggttcagaggacacagaactacatgcaggagctaatggagaatgcagtgttcacttttgagcagttgctttccccacatctccaaggagaggcctccaaaactgcagttgccattgagaaggttaaactccgagtcttaaagcaatatgattatgacagcagcaccatccgaaagaagatatttcaagaggcactagttcaaatcacacttcccactgtgcagaaggcactggcgtccacatgcaaaccagagcttcagaaatacgagcagttcatctttgcagatcataccaatatgattcacgttgaaaatgtctatgaggagattttacatcagatcctgcttgatgaaactctgaaagtgataaaggaagctgctatcttgaagaaacacaacttatttgaagataacatggccttgcccagtgaaagtgtgtccagcttaacagatctaaagccccccacagggtcaaaccaggccagccctgccaggagagcttctgccattctgccaggagttctgggtagtgagaccctcagtaacgaagtattccaggagtcagaggaagagaagcagcctgaggtccctagctcgttggccaaaggagaaagcctttctctccctgggccaagcccacccccagatgggactgagcaggtgattatttcaagagtggatgaccccgtggtgaatcctgtggcaacagaggacacagcaggactcccgggcacatgctcatcagagctggagtttggagggacccttgaggatgaagaacccgcccaggaagagccagaacccatcactgcctcgggttctttgaaggcgctcagaaagttgctgacagcgtccgtggaagtaccagtggactctgctccagtgatggaagaagatacgaatggggagagccacgttccccaagaaaatgaagaagaagaggaaaaagagcccagtcaggcagctgccatccaccccgacaactgtgaagaaagtgaagtcagcgagagggaggcccaacctccctgtcccgaggcccatggggaggagttggggggatttccagaggtaggcagcccagcctctccgccagccagtggagggctcaccgaggagcccctggggcccatggagggggagctcccaggagaggcctgcacactcactgcccatgaaggaagagggggcaagtgtaccgaggaaggggatgcctcacagcaagagggctgcaccttaggttctgaccccatctgcctcagtgagagccaggtttctgaggaacaagaagagatgggagggcaaagcagcgcggcccaggccacggccagtgtgaatgcagaggagatcaaggtagcccgtattcatgagtgtcagtgggtggtggaggatgctccaaacccggatgtcctgctgtcacacaaagatgacgtgaaggagggagaaggtggtcaggagagtttcccagagctgccctcagaggagtgaaagggacaatttggctgaagtctttctctgaaaaaagccaaagggttataggggtacacttaggggttgcatgcaagctgttaccaaaaaatttttaagtattttcttaatttgaataataaaaccagaggaaatgcatacagggcatgagcaactgaggcaaacctttgtggacatgaattgttctacgatgaatttttgctttagtattttaataagaattacaaagacaatggcatacttggggtgagagggagctgaggatgtctgaggagggaatagtattgcagggaagactgagaaaacagtaggatgacagttttgagtatactctgcacttttcaattgtgcaatcttcttgtgcactttaaggctttttaattttgtttgagaatgcaaatgtatactgtaagtctacctttactatctactatgcctacttcaccatctcttaaggactcggcatttgtccacagtcagactgcaagagagggtaggtcatgaacagtcacccgtgctggctgtagcccccacagaggcaatcatgcccaatagattcaagagaagctaagcggaaatggagggtggaaggtgtgatctgtgggactgtctgggcctgttactcatcctgctatcaatttcttattaattaatcttgatgattcttattaattaatcacatttgcaggaaattcagatgaggcaagaaaattttattggcctgggtaagactgaaagcattccaaattaggcttagactgtgcaaagggcttagctaagttatcgagcttaaaacccgtcaattaaacaaacattatttgaacagttactgcatgccacgcactgtgttgggcttagtaataaaaaaaagaaaagataagtgcttgttctagcataaattaaaaggtccaagggaatttaatctggaagagaacatatgccaatttttaaactatgacagcttttttttttctctttccattcaaatagtcctggttcattcccagaagggcacaaaatgaatgaataaataaataaatgaataaagaca

SEQ ID NO: 418150 - DNA, 346 bp, Homo sapiens
catgttttgttttctgatatctctcagtgataaaggaagctgctatcttgaagaaacacaacttatttgaagataacatggccttgcccagtgaaagtgtgtccagcttaacagatctaaagccccccacagggtcaaaccaggccagccctgccaggagagcttctgccattctgccaggagttctgggtagtgagaccctcagtaacgaagtattccaggagtcagaggaagagaagcagcctgaggtccctagctcgttggccaaaggagaaagcctttctctccctgggccaagcccacccccagatgggactgagcaggtgattatttcaagagtggatga

SEQ ID NO: 418151 - DNA, 1179 bp, Homo sapiens
atctaaacgatgtcatttcagacattcaaaactcataataataaatttcaggaaatcaagctcctaaacattaatagccaagataccaaataaattatcatattaaaatatttaagtttatttaaagagagaagtaaacataaacttatgtcaaagagaaattctcttaatctatttcctgacttcacagtcaaaacagtataagatagtgaagtaacttataatcttatttggtcattctgttctataaacagacaaatataatttaggctgctatatgacatgataaattaaaaactgagaaagtaaaattatgtcggggtctacacattaaatgactgttttggcagtttttcacctgaatttaaaaataaaatttgtctgttctatctgtatggacagaatatgacaaccatagaccaaaagatatcattgtatagatgtaaagagacaaaagtcatggttggcatgttctttaatttagggccttgtttatacttgtgagtttaataatttcttggcaatgagcactgctgcctttttaaatcatcaatgcctgtctttaaatgccaatcattagaagtttagaattacatttaaatttctcatatatgaatttttcatctgggaactacccactgtcgtcatttttatgtgcagaaaagatcctttttgaaaaccatatttattgggatcttatttaaatttaaattatcctttacaacttcttaaaatgaatatgctaatagataagactttatccattacatctaagaactttttaacctgtatatcaatctaaataggtttctagaaataatcctagctttcatacaccatgtagttctagactccgtccatatcagtgtaacattgtgtgataaaatgccaaatgtcttgtatctaagctacgctcccactcttccagccacccctacctcccaccttgacacccttaagaaagcaatgctgacttttattctgacaagtggaaatcaatagtggttaatcaagtggattttgtaaatgctaagaagtgtttgtgaaaaccttccctttctgagttaggattgttttttcctgttcatttcaggtgttttattgagcatctgatttgtgtcagcaccatgtaaatatgatgaggagtatttggaatagactttacattcaccagaaaat

SEQ ID NO: 418152 - DNA, 1210 bp, Homo sapiens
tcgaatcgtaaccgttcgtacgagaatcgctgtcctctccttgcggccgccagtgtggtggaattcggtgagtgtgtcggggggcttggcggcttttctcctcagttttctggagtgctttggaggagaggactatggcagccagggacgccacttcaggcagcctgtcagaggagagcagtgctttggacctgccatcagcgtgtgacataagagattacgtcctgcagggacccagccaagaagccaacagcgaggctttcagttctttggaattccattcttttccttattcttctgatgtggatccagacaccagtaacttaaatatagaacaaaataactcctggaccgctgagaacttctggcttgaccctgctgtgaaaggccagtcagagaaggaagaggatgatggccttcggaaatccctggatagattctatgaaatgtttggccatccacagccaggctctgcaaactcactctctgcatctgtctgcaagtgcctgtctcagaaaatcactcaactaagaggccaggagagccaaaagtatgccctccgcagttttcaaatggcccgggtgatcttcaaccgggacggctgctccgtcttacagaggcattccagggacacccacttctacccactggaggaaggaagtacatctttggatgatgaaaagccaaacccaggactgtcaaaggatattactcatttcctcttgcagcagaatgtaatgaaagacctgtaactggtgccgggtggtgtgcagggtagtaatggaggtgctgtgccatgaccagcagtgttggtggccacccagatcccctagggtctctggccagctctgtgtgcccaatcccaattaagtgctttgaggttaaaggctggcacctgtgacctggtattggagccagtcagcccatatggagagccagcagggtctgggagttctccgtcctcttggccaaggccgctgactgactgggctacgagtcaaaagcccagctcccttgcctcaaggaaggacattctctgaggagtaatttatgctctagcactccctttcctctagatcggcctgaggctgggacattacatgaaatcacacccttgctgggcttaatccctttccctaccctcccatttatttactggtgtctctgggagcctttccttaataaacctcttatatctgaaaaaaaaaaa

SEQ ID NO: 418153 - DNA, 1033 bp, Homo sapiens
  misc_feature (18)..(18): n is a, c, g, or t
agtgttaagggggggganaaatagtttatattattgaaaagaagaaaaactggtgggtgcttcgtgctggcttatgagaaaaggaacaccacagcagtgcagaccattgaaaatgacagtgatccaaggttaaagacaccagtaacttaaatatagaacaaaataactcctggaccgctgagaacttctggcttgaccctgctgtgaaaggccagtcagagaaggaagaggatgatggccttcggaaatccctggatagattctatgaaatgtttggccatccacagccaggctctgcaaactcactctctgcatctgtctgcaagtgcctgtctcagaaaatcactcaactaagaggccaggagagccaaaagtatgccctccgcagttttcaaatggcccgggtgatcttcaaccgggacggctgctccgtcttacagaggcattccagggacacccacttctacccactggaggaaggaagtacatctttggatgatgaaaagccaaacccaggactgtcaaaggatattactcatttcctcttgcagcagaatgtaatgaaagacctgtaactggtgccgggtggtgtgcagggtagtaatggaggtgctgtgccatgaccagcagtgttggtggccacccagatcccctagggtctctggccagctctgtgtgcccaatcccaattaagtgctttgaggttaaaggctggcacctgtgacctggtattggagccagtcagcccatatggagagccagcagggtctgggagttctccgtcctcttggccaaggccgctgactgactgggctacgagtcaaaagcccagctcccttgcctcaaggaaggacattctctgaggagtaatttatgctctagcactccctttcctctagatcggcctgaggctgggacattacatgaaatcacacccttgctgggcttaatccctttccctaccctcccatttatttactggtgtctctgggagcctttccttaataaacctcttatatctgaaaaaaaaaaa

SEQ ID NO: 418154 - DNA, 975 bp, Homo sapiens
  misc_feature (61)..(62): n is a, c, g, or t
  misc_feature (64)..(65): n is a, c, g, or t
  misc_feature (72)..(72): n is a, c, g, or t
  misc_feature (74)..(74): n is a, c, g, or t
  misc_feature (77)..(77): n is a, c, g, or t
gatgcttactttatatgttgggagaagagggggaccttgaaggtgactatgactctcttanntnnccaccgntncanacaccagtaacttaaatatagaacaaaataactcctggaccgctgagaacttctggcttgaccctgctgtgaaaggccagtcagagaaggaagaggatgatggccttcggaaatccctggatagattctatgaaatgtttggccatccacagccaggctctgcaaactcactctctgcatctgtctgcaagtgcctgtctcagaaaatcactcaactaagaggccaggagagccaaaagtatgccctccgcagttttcaaatggcccgggtgatcttcaaccgggacggctgctccgtcttacagaggcattccagggacacccacttctacccactggaggaaggaagtacatctttggatgatgaaaagccaaacccaggactgtcaaaggatattactcatttcctcttgcagcagaatgtaatgaaagacctgtaactggtgccgggtggtgtgcagggtagtaatggaggtgctgtgccatgaccagcagtgttggtggccacccagatcccctagggtctctggccagctctgtgtgcccaatcccaattaagtgctttgaggttaaaggctggcacctgtgacctggtattggagccagtcagcccatatggagagccagcagggtctgggagttctccgtcctcttggccaaggccgctgactgactgggctacgagtcaaaagcccagctcccttgcctcaaggaaggacattctctgaggagtaatttatgctctagcactccctttcctctagatcggcctgaggctgggacattacatgaaatcacacccttgctgggcttaatccctttccctaccctcccatttatttactggtgtctctgggagcctttccttaataaacctcttatatctgaaaaaaaaaaa

SEQ ID NO: 418155 - DNA, 1068 bp, Homo sapiens
aattttgatagaagtggaacagaggcctgcagtgttgtcccaggagctgttgagggcagtggcgcctgcttctggccatggacagagagattcagcatcaccatgtcattgcagaatgaagggagagttggctttgttaaccaccttggctgcccgtgatgcactgatcaacaccagtaacttaaatatagaacaaaataactcctggaccgctgagaacttctggcttgaccctgctgtgaaaggccagtcagagaaggaagaggatgatggccttcggaaatccctggatagattctatgaaatgtttggccatccacagccaggctctgcaaactcactctctgcatctgtctgcaagtgcctgtctcagaaaatcactcaactaagaggccaggagagccaaaagtatgccctccgcagttttcaaatggcccgggtgatcttcaaccgggacggctgctccgtcttacagaggcattccagggacacccacttctacccactggaggaaggaagtacatctttggatgatgaaaagccaaacccaggactgtcaaaggatattactcatttcctcttgcagcagaatgtaatgaaagacctgtaactggtgccgggtggtgtgcagggtagtaatggaggtgctgtgccatgaccagcagtgttggtggccacccagatcccctagggtctctggccagctctgtgtgcccaatcccaattaagtgctttgaggttaaaggctggcacctgtgacctggtattggagccagtcagcccatatggagagccagcagggtctgggagttctccgtcctcttggccaaggccgctgactgactgggctacgagtcaaaagcccagctcccttgcctcaaggaaggacattctctgaggagtaatttatgctctagcactccctttcctctagatcggcctgaggctgggacattacatgaaatcacacccttgctgggcttaatccctttccctaccctcccatttatttactggtgtctctgggagcctttccttaataaacctcttatatctgaaaaaaaaaaa

SEQ ID NO: 418156 - DNA, 622 bp, Homo sapiens
tcgaatcgtaaccgttcgtacgagaatcgctgtcctctccttgcggccgccagtgtggtggaattcggtgagtgtgtcggggggcttggcggcttttctcctcagttttctggagtgctttggaggagaggactatggcagccagggacgccacttcaggcagcctgtcagaggagagcagtgctttggacctgccatcagcgtgtgacataagagattacgtcctgcagggacccagccaagaagccaacagcgaggctttcagttctttggaattccattcttttccttattcttctgatgtggatccagcagatctctgagaatgcttcattgtcttaggcagaaaaacatcttacctaagcaaagctttcaggaggaacttcaaaggacagcttacctggcacagcaatgacaaggagctgtttcctggatgtctttttgttattgttgctgttaatctcaggtctctttctaatctccctcaaaatgaattcagaagcaggggaatatttggttcaacaaagagagagtggaatttttttttgttttgttcttttaaaacttcagaaaatagcaatgtgggcctgttatgtgtgatgagtaataaaaatagagactt

SEQ ID NO: 418157 - DNA, 327 bp, Homo sapiens
agccaacagcgaggctttcagttctttggaattccattcttttccttattcttctgatgtggatccaggtaataagcagagtttaaaacaaactaacttaaaaacaactagcagcaatacgggtgtgtgatagtttgtttctctctcttccaatagcagatctctgagaatgcttcattgtcttaggcagaaaaacatcttacctaagcaaagctttcaggaggaacttcaaaggacagcttacctggcacagcaatgacaaggagctgtttcctggatgtctttttgttattgttgctgttaatctcaggtctctttctaatctcc

SEQ ID NO: 418158 - DNA, 1145 bp, Homo sapiens
cctaatcccctcttccgccccccttcccaaccccttccgccttcgccccctcctgagcggcttcggactatggcagccagggacgccacttcaggcagcctgtcagaggagagcagtgctttggacctgccatcagcgtgtgacataagagattacgtcctgcagggacccagccaagaagccaacagcgaggctttcagttctttggaattccattcttttccttattcttctgatgtggatccagacaccagtaacttaaatatagaacaaaataactcctggaccgctgagaacttctggcttgaccctgctgtgaaaggccagtcagagaaggaagaggatgatggccttcggaaatccctggatagattctatgaaatgtttggccatccacagccaggctctgcaaactcactctctgcatctgtctgcaagtgcctgtctcagaaaatcactcaactaagaggccaggagagccaaaagtatgccctccgcagttttcaaatggcccgggtgatcttcaaccgggacggctgctccgtcttacagaggcattccagggacacccacttctacccactggaggaaggaagtacatctttggatgatgaaaagccaaacccaggactgtcaaaggatattactcatttcctcttgcagcagaatgtaatgaaagacctgtaactggtgccgggtggtgtgcagggtagtaatggaggtgctgtgccatgaccagcagtgttggtggccacccagatcccctagggtctctggccagctctgtgtgcccaatcccaattaagtgctttgaggttaaaggctggcacctgtgacctggtattggagccagtcagcccatatggagagccagcagggtctgggagttctccgtcctcttggccaaggccgctgactgactgggctacgagtcaaaagcccagctcccttgcctcaaggaaggacattctctgaggagtaatttatgctctagcactccctttcctctagatcggcctgaggctgggacattacatgaaatcacacccttgctgggcttaatccctttccctaccctcccatttatttactggtgtctctgggagcctttccttaataaacctcttatatctgaaaaaaaaaaa

SEQ ID NO: 418159 - DNA, 1146 bp, Homo sapiens
tcgaatcgtaaccgttcgtacgagaatcgctgtcctctccttgcggccgccagtgtggtggaattcgactatggcagccagggacgccacttcaggcagcctgtcagaggagagcagtgctttggacctgccatcagcgtgtgacataagagattacgtcctgcagggacccagccaagaagccaacagcgaggctttcagttctttggaattccattcttttccttattcttctgatgtggatccagacaccagtaacttaaatatagaacaaaataactcctggaccgctgagaacttctggcttgaccctgctgtgaaaggccagtcagagaaggaagaggatgatggccttcggaaatccctggatagattctatgaaatgtttggccatccacagccaggctctgcaaactcactctctgcatctgtctgcaagtgcctgtctcagaaaatcactcaactaagaggccaggagagccaaaagtatgccctccgcagttttcaaatggcccgggtgatcttcaaccgggacggctgctccgtcttacagaggcattccagggacacccacttctacccactggaggaaggaagtacatctttggatgatgaaaagccaaacccaggactgtcaaaggatattactcatttcctcttgcagcagaatgtaatgaaagacctgtaactggtgccgggtggtgtgcagggtagtaatggaggtgctgtgccatgaccagcagtgttggtggccacccagatcccctagggtctctggccagctctgtgtgcccaatcccaattaagtgctttgaggttaaaggctggcacctgtgacctggtattggagccagtcagcccatatggagagccagcagggtctgggagttctccgtcctcttggccaaggccgctgactgactgggctacgagtcaaaagcccagctcccttgcctcaaggaaggacattctctgaggagtaatttatgctctagcactccctttcctctagatcggcctgaggctgggacattacatgaaatcacacccttgctgggcttaatccctttccctaccctcccatttatttactggtgtctctgggagcctttccttaataaacctcttatatctgaaaaaaaaaaa

SEQ ID NO: 418160 - DNA, 724 bp, Homo sapiens
tgcagcacaccagcatggcacatgtatacatatgtaactaacctgcacattgtgcacatgtaccctaaaacttaaagtataataataatgaaataaaattaaaaaaaaaaaagaaaagtgcctcacctccctgtgaggcttgatgaatattgtggccagtgagtggaaaatgattcttgtcgaatagacagagtattcccaccccaggaatggattaatagaagacacaatttgagcacttctcagaattatctagtatgcctgagtagagactcacatgggtggaatctgtgttgtctcatcagagggaataaaaagacaatgaggtggtaaatgtgaaaaaagcagccttttagaaaaacattattttcaaatacctttataaatcatctaatttatcttcacataatataaagaaaaaactaataaaaattttcgtatttcactttacataatatgttctcccatatttagggatcatacaattgtattgtcttcaaaacacacacacacacacatacacacacacacacacacacacacaccccttccaagaaagctgatccttcagaaaataaatcttatttttaagcacttgggttttcaggccagaaaattaataaatcctaaacctgacccatttttgtaacagctaaaaaggagaagaaaaagctagttaaattttgtgtagaaagatgaccggggatactctagaacagccatg

SEQ ID NO: 418161 - DNA, 4451 bp, Homo sapiens
tgcagcacaccagcatggcacatgtatacatatgtaactaacctgcacattgtgcacatgtaccctaaaacttaaagtataataataatgaaataaaattaaaaaaaaaaaagaaaagtgcctcacctccctgtgaggcttgatgaatattgtggccagtgagtggaaaatgattcttgtcgaatagacagagtattcccaccccaggaatggattaatagaagacacaatttgagcacttctcagaattatctagtatgcctgagtagagactcacatgggtggaatctgtgttgtctcatcagagggaataaaaagacaatgaggtggtaaatgtgaaaaaagcagccttttagaaaaacattattttcaaatacctttataaatcatctaatttatcttcacataatataaagaaaaaactaataaaaattttcgtatttcactttacataatatgttctcccatatttagggatcatacaattgtattgtcttcaaaacacacacacacacacatacacacacacacacacacacacacaccccttccaagaaagctgatccttcagaaaataaatcttatttttaagcacttgggttttcaggccagaaaattaataaatcctaaacctgacccatttttgtaacagctaaaaaggagaagaaaaagctagttaaattttgtgtggatccatttatctcttaaaatatgccaaagcaatttgaggtgggggtggaaacaggtatttatctctcatgcgtgattctctctttatatttctatctgttgggaaaagggtaaagaactattcttggtcattattgatgtattgtgttgccactttgtatggtgcctgctgtgctttatcccgaggcatagcagtaatcgttactatcttgactctttccttcatcacaagagagtaaatatgaagtctgaatgtcgttcctcacccccaaattgtttaactctgcttccaaactagtttaagaaatgcaaaatgggaagagctagcttttcttagatacatttcttccttttttattctttcttgggagacgttaagtataaaagggaaaaagtcagttccttcttctctctctttctctttgggtgacagcaatgctcacttagtaattataaactggaaataggagagtagcttgagcaggttatgatatatctgcccaatgtgtttcattccttcaaacataaactttgagagtaaaagagatttttataatttaaatgccaacgacaggaatggcctcatgttttaactttcaaataataaatggggagttggtatttgggcagagtttgcattttactaatcctatatactttgagcttagtttttagaattgtgtcaaatacatcaacatatcaggattatagtgccaaaaatagttagagtgccttggtcctccctctgtaggcagcaaattgaaactaacatgggaccatgccatccttctagcataatggagaagtctgaactgaggagtatctttgatgaaagacatttaggaccctagaaactaaatcttgtcaccaagactttatagtaaagtagtagcaaaattatttttaaaagactttcttccttttactacccatttcctctcttgggaaagctgatgagcaaattatccaagactcatttctttattaggcaaagtcagaatatttcccctctgaaaatctgaattatgccctcattctttttcaagaaatatctcaaagagcaaatagaattaaacatgacacttgattgtctgattatttggcatgtataaaattatcatgtggcttaatgtgccttaagtgaaaatttaaacttagacctgaaacctttacagttggatgtagcgttgagcttttgcatgttttctgtataataaaccacttttgttttgtttgttttgtcttttaacctacacctttatcattactctaacagatttagggcttctctttctctacagctaagtaagggaatatgtgcaattatgagacatacaaaaaaggaaagggaaaggactttctaagtagcaaatctgtgccatgaagtagatgtggcgtgaagatacagagcctgaggatagtaattttccctgagccacgcacacaggcttttatttcatgccttttctctttctgtgccgtcacctttgagaaaaacgattgcaccttctccaagtctgcctttttaacagctacagttaagttggcaagacttccccagctctgaatatagccatttgccgactccggcctctttgcgagactgactcaaatctgtgatcttctgttcagcatacacatcagcaaagtgagaagatgagcactaaatataggctctattaactttacttttagatttactgccttcaaaaagtgcctattctgagcaacataaacgttattccttacatatgtatgtacacacggtacccagagtcgtactgtgcagccttcaaaaacataccatcagaaagagtaggtgctgagataaggaaactttgccaaatgaaagaaagtcactcacttccaatatcccctctcaagcggctaccgtgaaacgggctgcaaacacattccctgagcatcccttgctgatacagcttctttatatttatatcctactggatggtagcatattgctaaggtttcctgtactctgcttcaagggaatgtaagctttatggcattgaaacatttaggaaaaaaaaagatgtttaagagaattaatagagccgtagtctgtattaggatgtgtgtcatatgtgtgttctataaactaagcatcggtgggtttagagtgttaaagtgtcagcacattccttctccttttgtctctcaggctaacatgagagaaaatagaaaagtcttggctgtggggattggaagctcagggggccaaatgtccttgccagatccttagagcattactttgactcctaaaaatagtagtgtatgttatttgatggcttttgtttccatagttccatcactgacaaaactgtcaatactgttgatggagcagcagcatagcctagagtgatgcattcttacccagaggtggcaataggagagggtccatgtaaataggacgaggtagacagtgcatgattgtaggagaagggttgaagggaggacatgattccaaaaaagatcgttctcaatgtgtcgtctgactcaaccagctggcagattacacttgccaagtcgttccctttccttctaagtcagttggctccatattcacttgaatatgcctctgtttgggcaaagcaagatacctccacttaacctttatccaaggaagctcttggtgtcctcttggtcataaagttgtctcctacctaacccagttttaccaaatggaagtaaaaggggacaaactatggaagatggactccatgccattgcagtcagccaccattctcttttccatataaggagccccattacataagctacgggtgaggttggaacagctatgtttcataatttcaagagtgtgaccaccctgctctagtcatcatcattggatgaatccagttgactctttggcaaaagggtgatacttttcactaaaaatgcctactcttcctgttgatgttccttttctgtttttaccttgtccaatttccacactagtcattttttttattttttagaggatcagattttagcgctggaaaatgagttcaaaaatttcagtgtaatgtcataaggatgttgggatacagagattttttttttccttggaaacaaatggactgggaagaaacacagcatggctttgctctgagtttcaatctgatgattatgaccatggaagatagtcttatgtaaaggttaaatggtgtttacaagtggatagataaggcggagatggtgagaagccgggttttctctatgctaaatgtgtctactaagagcagcacttcctactagctaagcacaatcatagccccaccgtgatgagctgctagtctgaataacattccctgacttagggaaaggcacacaaaaacatataaagaatatgtctattttcatatgtgtgatactgacagagccatggtattcctaaaatataggtttctcttttttcttgtattcttagcaaattgcatttattcactacattacaaaccatcactgatgtatccaaaatagcacacatagttcagtatgaaaataagagaataaaatctgttataagcaagtgatttaggtattttcttttgtgtttatgcattatctgactatattaaaacctgtttttctatttaccttctatcagttttctctaccaattatgttttttcaatgctctataagaatgaatatggaaattatatttcttttttctgtaaaagagttgcaactactttattatatttagaaatccaataaacttcttattacattta

SEQ ID NO: 418162 - DNA, 4393 bp, Homo sapiens
tgcagcacaccagcatggcacatgtatacatatgtaactaacctgcacattgtgcacatgtaccctaaaacttaaagtataataataatgaaataaaattaaaaaaaaaaaagaaaagtgcctcacctccctgtgaggcttgatgaatattgtggccagtgagtggaaaatgattcttgtcgaatagacagagtattcccaccccaggaatggattaatagaagacacaatttgagcacttctcagaattatctagtatgcctgagtagagactcacatgggtggaatctgtgttgtctcatcagagggaataaaaagacaatgaggtggtaaatgtgaaaaaagcagccttttagaaaaacattattttcaaatacctttataaatcatctaatttatcttcacataatataaagaaaaaactaataaaaattttcgtatttcactttacataatatgttctcccatatttagggatcatacaattgtattgtcttcaaaacacacacacacacacatacacacacacacacacacacacacaccccttccaagaaagctgatccttcagaaaataaatcttatttttaagcacttgggttttcaggccagaaaattaataaatcctaaacctgacccatttttgtaacagctaaaaaggagaagaaaaagctagttaaattttgtgtggatccatttatctcttaaaatatgccaaagcaatttgaggtgggggtggaaacaggtatttatctctcatgcgtgattctctctttatatttctatctgttgggaaaagggtaaagaactattcttggtcattattgatgtattgtgttgccactttgtatggtgcctgctgtgctttatcccgaggcatagcagtaatcgttactatcttgactctttccttcatcacaagagagtaaatatgaagtctgaatgtcgttcctcacccccaaattgtttaactctgcttccaaactagtttaagaaatgcaaaatgggaagagctagcttttcttagatacatttcttccttttttattctttcttgggagacgttaagtataaaagggaaaaagtcagttccttcttctctctctttctctttgggtgacagcaatgctcacttagtaattataaactggaaataggagagtagcttgagcaggttatgatatatctgcccaatgtgtttcattccttcaaacataaactttgagagtaaaagagatttttataatttaaatgccaacgacaggaatggcctcatgttttaactttcaaataataaatggggagttggtatttgggcagagtttgcattttactaatcctatatactttgagcttagtttttagaattgtgtcaaatacatcaacatatcaggattatagtgccaaaaatagttagagtgccttggtcctccctctgtaggcagcaaattgaaactaacatgggaccatgccatccttctagcataatggagaagtctgaactgaggagtatctttgatgaaagacatttaggaccctagaaactaaatcttgtcaccaagactttatagtaaagtagtagcaaaattatttttaaaagactttcttccttttactacccatttcctctcttgggaaagctgatgagcaaattatccaagactcatttctttattaggcaaagtcagaatatttcccctctgaaaatctgaattatgccctcattctttttcaagaaatatctcaaagagcaaatagaattaaacatgacacttgattgtctgattatttggcatgtataaaattatcatgtggcttaatgtgccttaagtgaaaatttaaacttagacctgaaacctttacagttggatgtagcgttgagcttttgcatgttttctgtataataaaccacttttgttttgtttgttttgtcttttaacctacacctttatcattactctaacagatttagggcttctctttctctacagctaagtaagggaatatgtgcaattatgagacatacaaaaaaggaaagggaaaggactttctaagtagcaaatctgtgccatgaagtagatgtggcgtgaagatacagagcctgaggatagtaattttccctgagccacgcacacaggcttttatttcatgccttttctctttctgtgccgtcacctttgagaaaaacgattgcaccttctccaagtctgcctttttaacagctacagttaagttggcaagacttccccagctctgaatatagccatttgccgactccggcctctttgcgagactgactcaaatctgtgatcttctgttcagcatacacatcagcaaagtgagaagatgagcactaaatataggctctattaactttacttttagatttactgccttcaaaaagtgcctattctgagcaacataaacgttattccttacatatgtatgtacacacggtacccagagtcgtactgtgcagccttcaaaaacataccatcagaaagagtaggtgctgagataaggaaactttgccaaatgaaagaaagtcactcacttccaatatcccctctcaagcggctaccgtgaaacgggctgcaaacacattccctgagcatcccttgctgatacagcttctttatatttatatcctactggatggtagcatattgctaaggtttcctgtactctgcttcaagggaatgtaagctttatggcattgaaacatttaggatatgtgtgttctataaactaagcatcggtgggtttagagtgttaaagtgtcagcacattccttctccttttgtctctcaggctaacatgagagaaaatagaaaagtcttggctgtggggattggaagctcagggggccaaatgtccttgccagatccttagagcattactttgactcctaaaaatagtagtgtatgttatttgatggcttttgtttccatagttccatcactgacaaaactgtcaatactgttgatggagcagcagcatagcctagagtgatgcattcttacccagaggtggcaataggagagggtccatgtaaataggacgaggtagacagtgcatgattgtaggagaagggttgaagggaggacatgattccaaaaaagatcgttctcaatgtgtcgtctgactcaaccagctggcagattacacttgccaagtcgttccctttccttctaagtcagttggctccatattcacttgaatatgcctctgtttgggcaaagcaagatacctccacttaacctttatccaaggaagctcttggtgtcctcttggtcataaagttgtctcctacctaacccagttttaccaaatggaagtaaaaggggacaaactatggaagatggactccatgccattgcagtcagccaccattctcttttccatataaggagccccattacataagctacgggtgaggttggaacagctatgtttcataatttcaagagtgtgaccaccctgctctagtcatcatcattggatgaatccagttgactctttggcaaaagggtgatacttttcactaaaaatgcctactcttcctgttgatgttccttttctgtttttaccttgtccaatttccacactagtcattttttttattttttagaggatcagattttagcgctggaaaatgagttcaaaaatttcagtgtaatgtcataaggatgttgggatacagagattttttttttccttggaaacaaatggactgggaagaaacacagcatggctttgctctgagtttcaatctgatgattatgaccatggaagatagtcttatgtaaaggttaaatggtgtttacaagtggatagataaggcggagatggtgagaagccgggttttctctatgctaaatgtgtctactaagagcagcacttcctactagctaagcacaatcatagccccaccgtgatgagctgctagtctgaataacattccctgacttagggaaaggcacacaaaaacatataaagaatatgtctattttcatatgtgtgatactgacagagccatggtattcctaaaatataggtttctcttttttcttgtattcttagcaaattgcatttattcactacattacaaaccatcactgatgtatccaaaatagcacacatagttcagtatgaaaataagagaataaaatctgttataagcaagtgatttaggtattttcttttgtgtttatgcattatctgactatattaaaacctgtttttctatttaccttctatcagttttctctaccaattatgttttttcaatgctctataagaatgaatatggaaattatatttcttttttctgtaaaagagttgcaactactttattatatttagaaatccaataaacttcttattacattta

SEQ ID NO: 418163 - DNA, 3518 bp, Homo sapiens
  misc_feature (11)..(11): n is a, c, g, or t
tcataccatgnatcaagagaaagctcaagggaaattttaaaattatgtgaactagtttaagaaatgcaaaatgggaagagctagcttttcttagatacatttcttccttttttattctttcttgggagacgttaagtataaaagggaaaaagtcagttccttcttctctctctttctctttgggtgacagcaatgctcacttagtaattataaactggaaataggagagtagcttgagcaggttatgatatatctgcccaatgtgtttcattccttcaaacataaactttgagagtaaaagagatttttataatttaaatgccaacgacaggaatggcctcatgttttaactttcaaataataaatggggagttggtatttgggcagagtttgcattttactaatcctatatactttgagcttagtttttagaattgtgtcaaatacatcaacatatcaggattatagtgccaaaaatagttagagtgccttggtcctccctctgtaggcagcaaattgaaactaacatgggaccatgccatccttctagcataatggagaagtctgaactgaggagtatctttgatgaaagacatttaggaccctagaaactaaatcttgtcaccaagactttatagtaaagtagtagcaaaattatttttaaaagactttcttccttttactacccatttcctctcttgggaaagctgatgagcaaattatccaagactcatttctttattaggcaaagtcagaatatttcccctctgaaaatctgaattatgccctcattctttttcaagaaatatctcaaagagcaaatagaattaaacatgacacttgattgtctgattatttggcatgtataaaattatcatgtggcttaatgtgccttaagtgaaaatttaaacttagacctgaaacctttacagttggatgtagcgttgagcttttgcatgttttctgtataataaaccacttttgttttgtttgttttgtcttttaacctacacctttatcattactctaacagatttagggcttctctttctctacagctaagtaagggaatatgtgcaattatgagacatacaaaaaaggaaagggaaaggactttctaagtagcaaatctgtgccatgaagtagatgtggcgtgaagatacagagcctgaggatagtaattttccctgagccacgcacacaggcttttatttcatgccttttctctttctgtgccgtcacctttgagaaaaacgattgcaccttctccaagtctgcctttttaacagctacagttaagttggcaagacttccccagctctgaatatagccatttgccgactccggcctctttgcgagactgactcaaatctgtgatcttctgttcagcatacacatcagcaaagtgagaagatgagcactaaatataggctctattaactttacttttagatttactgccttcaaaaagtgcctattctgagcaacataaacgttattccttacatatgtatgtacacacggtacccagagtcgtactgtgcagccttcaaaaacataccatcagaaagagtaggtgctgagataaggaaactttgccaaatgaaagaaagtcactcacttccaatatcccctctcaagcggctaccgtgaaacgggctgcaaacacattccctgagcatcccttgctgatacagcttctttatatttatatcctactggatggtagcatattgctaaggtttcctgtactctgcttcaagggaatgtaagctttatggcattgaaacatttaggaaaaaaaaagatgtttaagagaattaatagagccgtagtctgtattaggatgtgtgtcatatgtgtgttctataaactaagcatcggtgggtttagagtgttaaagtgtcagcacattccttctccttttgtctctcaggctaacatgagagaaaatagaaaagtcttggctgtggggattggaagctcagggggccaaatgtccttgccagatccttagagcattactttgactcctaaaaatagtagtgtatgttatttgatggcttttgtttccatagttccatcactgacaaaactgtcaatactgttgatggagcagcagcatagcctagagtgatgcattcttacccagaggtggcaataggagagggtccatgtaaataggacgaggtagacagtgcatgattgtaggagaagggttgaagggaggacatgattccaaaaaagatcgttctcaatgtgtcgtctgactcaaccagctggcagattacacttgccaagtcgttccctttccttctaagtcagttggctccatattcacttgaatatgcctctgtttgggcaaagcaagatacctccacttaacctttatccaaggaagctcttggtgtcctcttggtcataaagttgtctcctacctaacccagttttaccaaatggaagtaaaaggggacaaactatggaagatggactccatgccattgcagtcagccaccattctcttttccatataaggagccccattacataagctacgggtgaggttggaacagctatgtttcataatttcaagagtgtgaccaccctgctctagtcatcatcattggatgaatccagttgactctttggcaaaagggtgatacttttcactaaaaatgcctactcttcctgttgatgttccttttctgtttttaccttgtccaatttccacactagtcattttttttattttttagaggatcagattttagcgctggaaaatgagttcaaaaatttcagtgtaatgtcataaggatgttgggatacagagattttttttttccttggaaacaaatggactgggaagaaacacagcatggctttgctctgagtttcaatctgatgattatgaccatggaagatagtcttatgtaaaggttaaatggtgtttacaagtggatagataaggcggagatggtgagaagccgggttttctctatgctaaatgtgtctactaagagcagcacttcctactagctaagcacaatcatagccccaccgtgatgagctgctagtctgaataacattccctgacttagggaaaggcacacaaaaacatataaagaatatgtctattttcatatgtgtgatactgacagagccatggtattcctaaaatataggtttctcttttttcttgtattcttagcaaattgcatttattcactacattacaaaccatcactgatgtatccaaaatagcacacatagttcagtatgaaaataagagaataaaatctgttataagcaagtgatttaggtattttcttttgtgtttatgcattatctgactatattaaaacctgtttttctatttaccttctatcagttttctctaccaattatgttttttcaatgctctataagaatgaatatggaaattatatttcttttttctgtaaaagagttgcaactactttattatatttagaaatccaataaacttcttattacattta

SEQ ID NO: 418164 - DNA, 4397 bp, Homo sapiens
tgcagcacaccagcatggcacatgtatacatatgtaactaacctgcacattgtgcacatgtaccctaaaacttaaagtataataataatgaaataaaattaaaaaaaaaaaagaaaagtgcctcacctccctgtgaggcttgatgaatattgtggccagtgagtggaaaatgattcttgtcgaatagacagagtattcccaccccaggaatggattaatagaagacacaatttgagcacttctcagaattatctagtatgcctgagtagagactcacatgggtggaatctgtgttgtctcatcagagggaataaaaagacaatgaggtggtaaatgtgaaaaaagcagccttttagaaaaacattattttcaaatacctttataaatcatctaatttatcttcacataatataaagaaaaaactaataaaaattttcgtatttcactttacataatatgttctcccatatttagggatcatacaattgtattgtcttcaaaacacacacacacacacatacacacacacacacacacacacacaccccttccaagaaagctgatccttcagaaaataaatcttatttttaagcacttgggttttcaggccagaaaattaataaatcctaaacctgacccatttttgtaacagctaaaaaggagaagaaaaagctagttaaattttgtgtggatccatttatctcttaaaatatgccaaagcaatttgaggtgggggtggaaacaggtatttatctctcatgcgtgattctctctttatatttctatctgttgggaaaagggtaaagaactattcttggtcattattgatgtattgtgttgccactttgtatggtgcctgctgtgctttatcccgaggcatagcagtaatcgttactatcttgactctttccttcatcacaagagagtaaatatgaagtctgaatgtcgttcctcacccccaaattgtttaactctgcttccaaactagtttaagaaatgcaaaatgggaagagctagcttttcttagatacatttcttccttttttattctttcttgggagacgttaagtataaaagggaaaaagtcagttccttcttctctctctttctctttgggtgacagcaatgctcacttagtaattataaactggaaataggagagtagcttgagcaggttatgatatatctgcccaatgtgtttcattccttcaaacataaactttgagagtaaaagagatttttataatttaaatgccaacgacaggaatggcctcatgttttaactttcaaataataaatggggagttggtatttgggcagagtttgcattttactaatcctatatactttgagcttagtttttagaattgtgtcaaatacatcaacatatcaggattatagtgccaaaaatagttagagtgccttggtcctccctctgtaggcagcaaattgaaactaacatgggaccatgccatccttctagcataatggagaagtctgaactgaggagtatctttgatgaaagacatttaggaccctagaaactaaatcttgtcaccaagactttatagtaaagtagtagcaaaattatttttaaaagactttcttccttttactacccatttcctctcttgggaaagctgatgagcaaattatccaagactcatttctttattaggcaaagtcagaatatttcccctctgaaaatctgaattatgccctcattctttttcaagaaatatctcaaagagcaaatagaattaaacatgacacttgattgtctgattatttggcatgtataaaattatcatgtggcttaatgtgccttaagtgaaaatttaaacttagacctgaaacctttacagttggatgtagcgttgagcttttgcatgttttctgtataataaaccacttttgttttgtttgttttgtcttttaacctacacctttatcattactctaacagatttagggcttctctttctctacagctaagtaagggaatatgtgcaattatgagacatacaaaaaaggaaagggaaaggactttctaagtagcaaatctgtgccatgaagtagatgtggcgtgaagatacagagcctgaggatagtaattttccctgagccacgcacacaggcttttatttcatgccttttctctttctgtgccgtcacctttgagaaaaacgattgcaccttctccaagtctgcctttttaacagctacagttaagttggcaagacttccccagctctgaatatagccatttgccgactccggcctctttgcgagactgactcaaatctgtgatcttctgttcagcatacacatcagcaaagtgagaagatgagcactaaatataggctctattaactttacttttagatttactgccttcaaaaagtgcctattctgagcaacataaacgttattccttacatatgtatgtacacacggtacccagagtcgtactgtgcagccttcaaaaaaagtcactcacttccaatatcccctctcaagcggctaccgtgaaacgggctgcaaacacattccctgagcatcccttgctgatacagcttctttatatttatatcctactggatggtagcatattgctaaggtttcctgtactctgcttcaagggaatgtaagctttatggcattgaaacatttaggaaaaaaaaagatgtttaagagaattaatagagccgtagtctgtattaggatgtgtgtcatatgtgtgttctataaactaagcatcggtgggtttagagtgttaaagtgtcagcacattccttctccttttgtctctcaggctaacatgagagaaaatagaaaagtcttggctgtggggattggaagctcagggggccaaatgtccttgccagatccttagagcattactttgactcctaaaaatagtagtgtatgttatttgatggcttttgtttccatagttccatcactgacaaaactgtcaatactgttgatggagcagcagcatagcctagagtgatgcattcttacccagaggtggcaataggagagggtccatgtaaataggacgaggtagacagtgcatgattgtaggagaagggttgaagggaggacatgattccaaaaaagatcgttctcaatgtgtcgtctgactcaaccagctggcagattacacttgccaagtcgttccctttccttctaagtcagttggctccatattcacttgaatatgcctctgtttgggcaaagcaagatacctccacttaacctttatccaaggaagctcttggtgtcctcttggtcataaagttgtctcctacctaacccagttttaccaaatggaagtaaaaggggacaaactatggaagatggactccatgccattgcagtcagccaccattctcttttccatataaggagccccattacataagctacgggtgaggttggaacagctatgtttcataatttcaagagtgtgaccaccctgctctagtcatcatcattggatgaatccagttgactctttggcaaaagggtgatacttttcactaaaaatgcctactcttcctgttgatgttccttttctgtttttaccttgtccaatttccacactagtcattttttttattttttagaggatcagattttagcgctggaaaatgagttcaaaaatttcagtgtaatgtcataaggatgttgggatacagagattttttttttccttggaaacaaatggactgggaagaaacacagcatggctttgctctgagtttcaatctgatgattatgaccatggaagatagtcttatgtaaaggttaaatggtgtttacaagtggatagataaggcggagatggtgagaagccgggttttctctatgctaaatgtgtctactaagagcagcacttcctactagctaagcacaatcatagccccaccgtgatgagctgctagtctgaataacattccctgacttagggaaaggcacacaaaaacatataaagaatatgtctattttcatatgtgtgatactgacagagccatggtattcctaaaatataggtttctcttttttcttgtattcttagcaaattgcatttattcactacattacaaaccatcactgatgtatccaaaatagcacacatagttcagtatgaaaataagagaataaaatctgttataagcaagtgatttaggtattttcttttgtgtttatgcattatctgactatattaaaacctgtttttctatttaccttctatcagttttctctaccaattatgttttttcaatgctctataagaatgaatatggaaattatatttcttttttctgtaaaagagttgcaactactttattatatttagaaatccaataaacttcttattacattta

SEQ ID NO: 418165 - DNA, 4397 bp, Homo sapiens
tgcagcacaccagcatggcacatgtatacatatgtaactaacctgcacattgtgcacatgtaccctaaaacttaaagtataataataatgaaataaaattaaaaaaaaaaaagaaaagtgcctcacctccctgtgaggcttgatgaatattgtggccagtgagtggaaaatgattcttgtcgaatagacagagtattcccaccccaggaatggattaatagaagacacaatttgagcacttctcagaattatctagtatgcctgagtagagactcacatgggtggaatctgtgttgtctcatcagagggaataaaaagacaatgaggtggtaaatgtgaaaaaagcagccttttagaaaaacattattttcaaatacctttataaatcatctaatttatcttcacataatataaagaaaaaactaataaaaattttcgtatttcactttacataatatgttctcccatatttagggatcatacaattgtattgtcttcaaaacacacacacacacacatacacacacacacacacacacacacaccccttccaagaaagctgatccttcagaaaataaatcttatttttaagcacttgggttttcaggccagaaaattaataaatcctaaacctgacccatttttgtaacagctaaaaaggagaagaaaaagctagttaaattttgtgtggatccatttatctcttaaaatatgccaaagcaatttgaggtgggggtggaaacaggtatttatctctcatgcgtgattctctctttatatttctatctgttgggaaaagggtaaagaactattcttggtcattattgatgtattgtgttgccactttgtatggtgcctgctgtgctttatcccgaggcatagcagtaatcgttactatcttgactctttccttcatcacaagagagtaaatatgaagtctgaatgtcgttcctcacccccaaattgtttaactctgcttccaaactagtttaagaaatgcaaaatgggaagagctagcttttcttagatacatttcttccttttttattctttcttgggagacgttaagtataaaagggaaaaagtcagttccttcttctctctctttctctttgggtgacagcaatgctcacttagtaattataaactggaaataggagagtagcttgagcaggttatgatatatctgcccaatgtgtttcattccttcaaacataaactttgagagtaaaagagatttttataatttaaatgccaacgacaggaatggcctcatgttttaactttcaaataataaatggggagttggtatttgggcagagtttgcattttactaatcctatatactttgagcttagtttttagaattgtgtcaaatacatcaacatatcaggattatagtgccaaaaatagttagagtgccttggtcctccctctgtaggcagcaaattgaaactaacatgggaccatgccatccttctagcataatggagaagtctgaactgaggagtatctttgatgaaagacatttaggaccctagaaactaaatcttgtcaccaagactttatagtaaagtagtagcaaaattatttttaaaagactttcttccttttactacccatttcctctcttgggaaagctgatgagcaaattatccaagactcatttctttattaggcaaagtcagaatatttcccctctgaaaatctgaattatgccctcattctttttcaagaaatatctcaaagagcaaatagaattaaacatgacacttgattgtctgattatttggcatgtataaaattatcatgtggcttaatgtgccttaagtgaaaatttaaacttagacctgaaacctttacagttggatgtagcgttgagcttttgcatgttttctgtataataaaccacttttgttttgtttgttttgtcttttaacctacacctttatcattactctaacagatttagggcttctctttctctacagctaagtaagggaatatgtgcaattatgagacatacaaaaaaggaaagggaaaggactttctaagtagcaaatctgtgccatgaagtagatgtggcgtgaagatacagagcctgaggatagtaattttccctgagccacgcacacaggcttttatttcatgccttttctctttctgtgccgtcacctttgagaaaaacgattgcaccttctccaagtctgcctttttaacagctacagttaagttggcaagacttccccagctctgaatatagccatttgccgactccggcctctttgcgagactgactcaaatctgtgatcttctgttcagcatacacatcagcaaagtgagaagatgagcactaaatataggctctattaactttacttttagatttactgccttcaaaaagtgcctattctgagcaacataaacgttattccttacatatgtatgtacacacggtacccagagtcgtactgtgcagccttcaaaaacataccatcagaaagagtaggtgctgagataaggaaactttgccaaatgaaagaaagtcactcacttccaatatcccctctcaagcggctaccgtgaaacgggctgcaaacacattccctgagcatcccttgctgatacagcttctttatatttatatcctactggatggtagcatattgctaaggtttcctgtactctgcttcaagggaatgtaagctttatggcattgaaacatttaggaaaaaaaaagatgtttaagagaattaatagagccgtagtctgtattaggatgtgtgtcatatgtgtgttctataaactaagcatcggtgggtttagagtgttaaagtgtcagcacattccttctccttttgtctctcaggctaacatgagagaaaatagaaaagtcttggctgtggggattggaagctcagggggccaaatgtccttgccagatccttagagcattactttgactcctaaaaatagtagtgtatgttatttgatggcttttgtttccatagttccatcactgacaaaactgtcaatactgttgatggagcagcagcatagcctagagtgatgcattcttacccagaggtggcaataggagagggtccatgtaaataggacgaggtagacagtgcatgattgtaggagaagggttgaagggaggacatgattccaaccaagtcgttccctttccttctaagtcagttggctccatattcacttgaatatgcctctgtttgggcaaagcaagatacctccacttaacctttatccaaggaagctcttggtgtcctcttggtcataaagttgtctcctacctaacccagttttaccaaatggaagtaaaaggggacaaactatggaagatggactccatgccattgcagtcagccaccattctcttttccatataaggagccccattacataagctacgggtgaggttggaacagctatgtttcataatttcaagagtgtgaccaccctgctctagtcatcatcattggatgaatccagttgactctttggcaaaagggtgatacttttcactaaaaatgcctactcttcctgttgatgttccttttctgtttttaccttgtccaatttccacactagtcattttttttattttttagaggatcagattttagcgctggaaaatgagttcaaaaatttcagtgtaatgtcataaggatgttgggatacagagattttttttttccttggaaacaaatggactgggaagaaacacagcatggctttgctctgagtttcaatctgatgattatgaccatggaagatagtcttatgtaaaggttaaatggtgtttacaagtggatagataaggcggagatggtgagaagccgggttttctctatgctaaatgtgtctactaagagcagcacttcctactagctaagcacaatcatagccccaccgtgatgagctgctagtctgaataacattccctgacttagggaaaggcacacaaaaacatataaagaatatgtctattttcatatgtgtgatactgacagagccatggtattcctaaaatataggtttctcttttttcttgtattcttagcaaattgcatttattcactacattacaaaccatcactgatgtatccaaaatagcacacatagttcagtatgaaaataagagaataaaatctgttataagcaagtgatttaggtattttcttttgtgtttatgcattatctgactatattaaaacctgtttttctatttaccttctatcagttttctctaccaattatgttttttcaatgctctataagaatgaatatggaaattatatttcttttttctgtaaaagagttgcaactactttattatatttagaaatccaataaacttcttattacattta

SEQ ID NO: 418166 - DNA, 4419 bp, Homo sapiens
tgcagcacaccagcatggcacatgtatacatatgtaactaacctgcacattgtgcacatgtaccctaaaacttaaagtataataataatgaaataaaattaaaaaaaaaaaagaaaagtgcctcacctccctgtgaggcttgatgaatattgtggccagtgagtggaaaatgattcttgtcgaatagacagagtattcccaccccaggaatggattaatagaagacacaatttgagcacttctcagaattatctagtatgcctgagtagagactcacatgggtggaatctgtgttgtctcatcagagggaataaaaagacaatgaggtggtaaatgtgaaaaaagcagccttttagaaaaacattattttcaaatacctttataaatcatctaatttatcttcacataatataaagaaaaaactaataaaaattttcgtatttcactttacataatatgttctcccatatttagggatcatacaattgtattgtcttcaaaacacacacacacacacatacacacacacacacacacacacacaccccttccaagaaagctgatccttcagaaaataaatcttatttttaagcacttgggttttcaggccagaaaattaataaatcctaaacctgacccatttttgtaacagctaaaaaggagaagaaaaagctagttaaattttgtgtggatccatttatctcttaaaatatgccaaagcaatttgaggtgggggtggaaacaggtatttatctctcatgcgtgattctctctttatatttctatctgttgggaaaagggtaaagaactattcttggtcattattgatgtattgtgttgccactttgtatggtgcctgctgtgctttatcccgaggcatagcagtaatcgttactatcttgactctttccttcatcacaagagagtaaatatgaagtctgaatgtcgttcctcacccccaaattgtttaactctgcttccaaactagtttaagaaatgcaaaatgggaagagctagcttttcttagatacatttcttccttttttattctttcttgggagacgttaagtataaaagggaaaaagtcagttccttcttctctctctttctctttgggtgacagcaatgctcacttagtaattataaactggaaataggagagtagcttgagcaggttatgatatatctgcccaatgtgtttcattccttcaaacataaactttgagagtaaaagagatttttataatttaaatgccaacgacaggaatggcctcatgttttaactttcaaataataaatggggagttggtatttgggcagagtttgcattttactaatcctatatactttgagcttagtttttagaattgtgtcaaatacatcaacatatcaggattatagtgccaaaaatagttagagtgccttggtcctccctctgtaggcagcaaattgaaactaacatgggaccatgccatccttctagcataatggagaagtctgaactgaggagtatctttgatgaaagacatttaggaccctagaaactaaatcttgtcaccaagactttatagtaaagtagtagcaaaattatttttaaaagactttcttccttttactacccatttcctctcttgggaaagctgatgagcaaattatccaagactcatttctttattaggcaaagtcagaatatttcccctctgaaaatctgaattatgccctcattctttttcaagaaatatctcaaagagcaaatagaattaaacatgacacttgattgtctgattatttggcatgtataaaattatcatgtggcttaatgtgccttaagtgaaaatttaaacttagacctgaaacctttacagttggatgtagcgttgagcttttgcatgttttctgtataataaaccacttttgttttgtttgttttgtcttttaacctacacctttatcattactctaacagatttagggcttctctttctctacagctaagtaagggaatatgtgcaattatgagacatacaaaaaaggaaagggaaaggactttctaagtagcaaatctgtgccatgaagtagatgtggcgtgaagatacagagcctgaggatagtaattttccctgagccacgcacacaggcttttatttcatgccttttctctttctgtgccgtcacctttgagaaaaacgattgcaccttctccaagtctgcctttttaacagctacagttaagttggcaagacttccccagctctgaatatagccatttgccgactccggcctctttgcgagactgactcaaatctgtgatcttctgttcagcatacacatcagcaaagtgagaagatgagcactaaatataggctctattaactttacttttagatttactgccttcaaaaagtgcctattctgagcaacataaacgttattccttacatatgtatgtacacacggtacccagagtcgtactgtgcagccttcaaaaacataccatcagaaagagtaggtgctgagataaggaaactttgccaaatgaaagaaagtcactcacttccaatatcccctctcaagcggctaccgtgaaacgggctgcaaacacattccctgagcatcccttgctgatacagcttctttatatttatatcctactggatggtagcatattgctaaggtttcctgtactctgcttcaagggaatgtaagctttatggcattgaaacatttaggaaaaaaaaagatgtttaagagaattaatagagccgtagtctgtattaggatgtgtgtcatatgtgtgttctataaactaagcatcggtgggtttagagtgttaaagtgtcagcacattccttctccttttgtctctcaggctaacatgagagaaaatagaaaagtcttggctgtggggattggaagctcagggggccaaatgtccttgccagatccttagagcattactttgactcctaaaaatagtagtgtatgttatttgatggcttttgtttccatagttccatcactgacaaaactgtcaatactgttgatggagcagcagcatagcctagagtgatgcattcttacccagaggtggcaataggagagggtccatgtaaataggacgaggtagacagtgcatgattgtaggagaagggttgaagggaggacatgattccaaaaaagatcgttctcaatgtgtcgtctgactcaaccagctggcagattacacttgccaagtcgttccctttccttctaagtcagttggctccatattcacttgaatatgcctctgtttgggcaaagcaagatacctccacttaacctttatccaaggaagctcttggtgtcctcttggtcataaagttgtctcctacctaacccagttttaccaaatggaagtaaaaggggacaaactatggaagatggactccatgccattgcagtcagccaccattctcttttccatataaggagccccattacataagctacgggtgaggttggaacagctatgtttcataatttcaagagtgtgaccaccctgctctagtcatcatcattggatgaatccagttgactctttggcaaaagggtgatacttttcactaaaaatgcctactcttcctgttgatgttccttttctgtttttaccttgtccaatttccacactagtcattttttttattttttagaggatcagattttagcgctggaaaatgagttcaaaaatttcagtgtaatgtcataaggatgttgggatacagagattttttttttccttggaaacaaatggactgggaagaaacacagcatggctttgctctgagtttcaatctgatgattatgaccatggaagatagtcttatgtaaaggttaaatggtgagaagccgggttttctctatgctaaatgtgtctactaagagcagcacttcctactagctaagcacaatcatagccccaccgtgatgagctgctagtctgaataacattccctgacttagggaaaggcacacaaaaacatataaagaatatgtctattttcatatgtgtgatactgacagagccatggtattcctaaaatataggtttctcttttttcttgtattcttagcaaattgcatttattcactacattacaaaccatcactgatgtatccaaaatagcacacatagttcagtatgaaaataagagaataaaatctgttataagcaagtgatttaggtattttcttttgtgtttatgcattatctgactatattaaaacctgtttttctatttaccttctatcagttttctctaccaattatgttttttcaatgctctataagaatgaatatggaaattatatttcttttttctgtaaaagagttgcaactactttattatatttagaaatccaataaacttcttattacattta

SEQ ID NO: 418167 - DNA, 868 bp, Homo sapiens
agctaaagaagctttaatgctttttattctgttaattaggcttctcatattgaccccaccacatggtgccagaaaccggagttccctttaataagccaatcatccgtataatgtgacccggggccttcttaaagatgaaatggtctgaattaaacacttgccagcataacgtgactcaccattttttttttccttggaaacaaatggactgggaagaaacacagcatggctttgctctgagtttcaatctgatgattatgaccatggaagatagtcttatgtaaaggttaaatggtgtttacaagtggatagataaggcggagatggtgagaagccgggttttctctatgctaaatgtgtctactaagagcagcacttcctactagctaagcacaatcatagccccaccgtgatgagctgctagtctgaataacattccctgacttagggaaaggcacacaaaaacatataaagaatatgtctattttcatatgtgtgatactgacagagccatggtattcctaaaatataggtttctcttttttcttgtattcttagcaaattgcatttattcactacattacaaaccatcactgatgtatccaaaatagcacacatagttcagtatgaaaataagagaataaaatctgttataagcaagtgatttaggtattttcttttgtgtttatgcattatctgactatattaaaacctgtttttctatttaccttctatcagttttctctaccaattatgttttttcaatgctctataagaatgaatatggaaattatatttcttttttctgtaaaagagttgcaactactttattatatttagaaatccaataaacttcttattacattta

SEQ ID NO: 418168 - DNA, 3825 bp, Homo sapiens
tgcagcacaccagcatggcacatgtatacatatgtaactaacctgcacattgtgcacatgtaccctaaaacttaaagtataataataatgaaataaaattaaaaaaaaaaaagaaaagtgcctcacctccctgtgaggcttgatgaatattgtggccagtgagtggaaaatgattcttgtcgaatagacagagtattcccaccccaggaatggattaatagaagacacaatttgagcacttctcagaattatctagtatgcctgagtagagactcacatgggtggaatctgtgttgtctcatcagagggaataaaaagacaatgaggtggtaaatgtgaaaaaagcagccttttagaaaaacattattttcaaatacctttataaatcatctaatttatcttcacataatataaagaaaaaactaataaaaattttcgtatttcactttacataatatgttctcccatatttagggatcatacaattgtattgtcttcaaaacacacacacacacacatacacacacacacacacacacacacaccccttccaagaaagctgatccttcagaaaataaatcttatttttaagcacttgggttttcaggccagaaaattaataaatcctaaacctgacccatttttgtaacagctaaaaaggagaagaaaaagctagttaaattttgtgtggatccatttatctcttaaaatatgccaaagcaatttgaggtgggggtggaaacaggtatttatctctcatgcgtgattctctctttatatttctatctgttgggaaaagggtaaagaactattcttggtcattattgatgtattgtgttgccactttgtatggtgcctgctgtgctttatcccgaggcatagcagtaatcgttactatcttgactctttccttcatcacaagagagtaaatatgaagtctgaatgtcgttcctcacccccaaattgtttaactctgcttccaaactagtttaagaaatgcaaaatgggaagagctagcttttcttagatacatttcttccttttttattctttcttgggagacgttaagtataaaagggaaaaagtcagttccttcttctctctctttctctttgggtgacagcaatgctcacttagtaattataaactggaaataggagagtagcttgagcaggttatgatatatctgcccaatgtgtttcattccttcaaacataaactttgagagtaaaagagatttttataatttaaatgccaacgacaggaatggcctcatgttttaactttcaaataataaatggggagttggtatttgggcagagtttgcattttactaatcctatatactttgagcttagtttttagaattgtgtcaaatacatcaacatatcaggattatagtgccaaaaatagttagagtgccttggtcctccctctgtaggcagcaaattgaaactaacatgggaccatgccatccttctagcataatggagaagtctgaactgaggagtatctttgatgaaagacatttaggaccctagaaactaaatcttgtcaccaagactttatagtaaagtagtagcaaaattatttttaaaagactttcttccttttactacccatttcctctcttgggaaagctgatgagcaaattatccaagactcatttctttattaggcaaagtcagaatatttcccctctgaaaatctgaattatgccctcattctttttcaagaaatatctcaaagagcaaatagaattaaacatgacacttgattgtctgattatttggcatgtataaaattatcatgtggcttaatgtgccttaagtgaaaatttaaacttagacctgaaacctttacagttggatgtagcgttgagcttttgcatgttttctgtataataaaccacttttgttttgtttgttttgtcttttaacctacacctttatcattactctaacagatttagggcttctctttctctacagctaagtaagggaatatgtgcaattatgagacatacaaaaaaggaaagggaaaggactttctaagtagcaaatctgtgccatgaagtagatgtggcgtgaagatacagagcctgaggatagtaattttccctgagccacgcacacaggcttttatttcatgccttttctctttctgtgccgtcacctttgagaaaaacgattgcaccttctccaagtctgcctttttaacagctacagttaagttggcaagacttccccagctctgaatatagccatttgccgactccggcctctttgcgagactgactcaaatctgtgatcttctgttcagcatacacatcagcaaagtgagaagatgagcactaaatataggctctattaactttacttttagatttactgccttcaaaaagtgcctattctgagcaacataaacgttattccttacatatgtatgtacacacggtacccagagtcgtactgtgcagccttcaaaaacataccatcagaaagagtaggtgctgagataaggaaactttgccaaatgaaagaaagtcactcacttccaatatcccctctcaagcggctaccgtgaaacgggctgcaaacacattccctgagcatcccttgctgatacagcttctttatatttatatcctactggatggtagcatattgctaaggtttcctgtactctgcttcaagggaatgtaagctttatggcattgaaacatttaggaaaaaaaaagatgtttaagagaattaatagagccgtagtctgtattaggatgtgtgtcatatgtgtgttctataaactaagcatcggtgggtttagagtgttaaagtgtcagcacattccttctccttttgtctctcaggctaacatgagagaaaatagaaaagtcttggctgtggggattggaagctcagggggccaaatgtccttgccagatccttagagcattactttgactcctaaaaatagtagtgtatgttatttgatggcttttgtttccatagttccatcactgacaaaactgtcaatactgttgatggagcagcagcatagcctagagtgatgcattcttacccagaggtggcaataggagagggtccatgtaaataggacgaggtagacagtgcatgattgtaggagaagggttgaagggaggacatgattccaaaaaagatcgttctcaatgtgtcgtctgactcaaccagctggcagattacacttgccaagtcgttccctttccttctaagtcagttggctccatattcacttgaatatgcctctgtttgggcaaagcaagatacctccacttaacctttatccaaggaagctcttggtgtcctcttggtcataaagttgtctcctacctaacccagttttaccaaatggaagtaaaaggggacaaactatggaagatggactccatgccattgcagtcagccaccattctcttttccatataaggagccccattacataagctacgggtgaggttggaacagctatgtttcataatttcaagagtgtgaccaccctgctctagtcatcatcattggatgaatccagttgactctttggcaaaagggtgatacttttcactaaaaatgcctactcttcctgttgatgttccttttctgtttttaccttgtccaatttccacactagtcattttttttattttttagaggatcagattttagcgctggaaaatgagttcaaaaatttcagtgtaatgtcataaggatgttgggatacagagattttttttttccttggaaacaaaaaaatcatctgtatcccatcaccctatgcataattcgt

SEQ ID NO: 418169 - DNA, 3474 bp, Homo sapiens
tgcagcacaccagcatggcacatgtatacatatgtaactaacctgcacattgtgcacatgtaccctaaaacttaaagtataataataatgaaataaaattaaaaaaaaaaaagaaaagtgcctcacctccctgtgaggcttgatgaatattgtggccagtgagtggaaaatgattcttgtcgaatagacagagtattcccaccccaggaatggattaatagaagacacaatttgagcacttctcagaattatctagtatgcctgagtagagactcacatgggtggaatctgtgttgtctcatcagagggaataaaaagacaatgaggtggtaaatgtgaaaaaagcagccttttagaaaaacattattttcaaatacctttataaatcatctaatttatcttcacataatataaagaaaaaactaataaaaattttcgtatttcactttacataatatgttctcccatatttagggatcatacaattgtattgtcttcaaaacacacacacacacacatacacacacacacacacacacacacaccccttccaagaaagctgatccttcagaaaataaatcttatttttaagcacttgggttttcaggccagaaaattaataaatcctaaacctgacccatttttgtaacagctaaaaaggagaagaaaaagctagttaaattttgtgtggatccatttatctcttaaaatatgccaaagcaatttgaggtgggggtggaaacaggtatttatctctcatgcgtgattctctctttatatttctatctgttgggaaaagggtaaagaactattcttggtcattattgatgtattgtgttgccactttgtatggtgcctgctgtgctttatcccgaggcatagcagtaatcgttactatcttgactctttccttcatcacaagagagtaaatatgaagtctgaatgtcgttcctcacccccaaattgtttaactctgcttccaaactagtttaagaaatgcaaaatgggaagagctagcttttcttagatacatttcttccttttttattctttcttgggagacgttaagtataaaagggaaaaagtcagttccttcttctctctctttctctttgggtgacagcaatgctcacttagtaattataaactggaaataggagagtagcttgagcaggttatgatatatctgcccaatgtgtttcattccttcaaacataaactttgagagtaaaagagatttttataatttaaatgccaacgacaggaatggcctcatgttttaactttcaaataataaatggggagttggtatttgggcagagtttgcattttactaatcctatatactttgagcttagtttttagaattgtgtcaaatacatcaacatatcaggattatagtgccaaaaatagttagagtgccttggtcctccctctgtaggcagcaaattgaaactaacatgggaccatgccatccttctagcataatggagaagtctgaactgaggagtatctttgatgaaagacatttaggaccctagaaactaaatcttgtcaccaagactttatagtaaagtagtagcaaaattatttttaaaagactttcttccttttactacccatttcctctcttgggaaagctgatgagcaaattatccaagactcatttctttattaggcaaagtcagaatatttcccctctgaaaatctgaattatgccctcattctttttcaagaaatatctcaaagagcaaatagaattaaacatgacacttgattgtctgattatttggcatgtataaaattatcatgtggcttaatgtgccttaagtgaaaatttaaacttagacctgaaacctttacagttggatgtagcgttgagcttttgcatgttttctgtataataaaccacttttgttttgtttgttttgtcttttaacctacacctttatcattactctaacagatttagggcttctctttctctacagctaagtaagggaatatgtgcaattatgagacatacaaaaaaggaaagggaaaggactttctaagtagcaaatctgtgccatgaagtagatgtggcgtgaagatacagagcctgaggatagtaattttccctgagccacgcacacaggcttttatttcatgccttttctctttctgtgccgtcacctttgagaaaaacgattgcaccttctccaagtctgcctttttaacagctacagttaagttggcaagacttccccagctctgaatatagccatttgccgactccggcctctttgcgagactgactcaaatctgtgatcttctgttcagcatacacatcagcaaagtgagaagatgagcactaaatataggctctattaactttacttttagatttactgccttcaaaaagtgcctattctgagcaacataaacgttattccttacatatgtatgtacacacggtacccagagtcgtactgtgcagccttcaaaaacataccatcagaaagagtaggtgctgagataaggaaactttgccaaatgaaagaaagtcactcacttccaatatcccctctcaagcggctaccgtgaaacgggctgcaaacacattccctgagcatcccttgctgatacagcttctttatatttatatcctactggatggtagcatattgctaaggtttcctgtactctgcttcaagggaatgtaagctttatggcattgaaacatttaggaaaaaaaaagatgtttaagagaattaatagagccgtagtctgtattaggatgtgtgtcatatgtgtgttctataaactaagcatcggtgggtttagagtgttaaagtgtcagcacattccttctccttttgtctctcaggctaacatgagagaaaatagaaaagtcttggctgtggggattggaagctcagggggccaaatgtccttgccagatccttagagcattactttgactcctaaaaatagtagtgtatgttatttgatggcttttgtttccatagttccatcactgacaaaactgtcaatactgttgatggagcagcagcatagcctagagtgatgcattcttacccagaggtggcaataggagagggtccatgtaaataggacgaggtagacagtgcatgattgtaggagaagggttgaagggaggacatgattccaaaaaagatcgttctcaatgtgtcgtctgactcaaccagctggcagattacacttgccaagtcgttccctttccttctaagtcagttggctccatattcacttgaatatgcctctgtttgggcaaagcaagatacctccacttaacctttatccaaggaagctcttggtgtcctcttggtcataaagttgtctcctacctaacccagttttaccaaatggaagtaaaaggggacaaactatggaagatggactccatgccattgcagtcagcagtcagcgacatgatggaccgagctgata

SEQ ID NO: 418170 - DNA, 1932 bp, Homo sapiens
taaaatattaacacctcaggctacctgctgtattctgtcccattgacccctggaattggatttactgcaagtgattgataattcaattatgtggcttttcccctttaatcttgccatttaaattacagtagaaagacaaaatcaagtaaaataaagtgttagataatagaaagagtgttaagaccagcccacttttctcatgtttatgttctttcatttggaccaagaatctccgcatggaggttgatttgccactggggactttggctaagactattaggtttgctttcaactagatgttcctgagacaagcagagggacactgcaattccccttccatgcctgctgttctcccccatgtaagtcttctttgaaattaacggatgtgtctcctttggaacagccccataacaaaagagaactactgatctgagcataggaaagtagaggctctaccacttttcagttgaaaaagcaagactttctctgtgtttctgaaacaaggcataatgttgtcacagaatcagagatccagtctcacttttccacaaatctccaaatctccagtcttatcttgtgtgctctaatggtttggttcaatccctttccaactcttgttttcaaagcatggggcctgagtgttctccactcctcctaagaaaggagcttgggtggaagggaccatgctgacctcctccatcagagggctcttccagtagtattctcggatgcaacctccatttctcagttaccattatttcctgtatcagctttgtccttcctggagggatgcacagtgatccggcccaccactgttgttgtcttgtgcttctgctctttcctatggtttcaggttattttctgggtttcccctattcttcttttatttctttttttttttatatttgctttcctttctactgcttttagatttgcaggagatgcaagtttcagctcaatgtttggcttctctcaatatggaaatttcagaaggacagaggagaggagggaggaagaagaaagtatactcctccagaatttcagtgatctgttgtggcagtccagtggaaggaaggtcttttgaggtcacttagaagcatctttttgggacatccttttgggatctctgtaggctaggcatctcatatcttgagactcacccccagcctccaagcctctctccatttctctaacctatgcattttagagcgagaggaccgcctcactagtgtcaccatcctgccttttctaaaacatgcaggctcacacattctactcctgcttaatgtctgtgttaaacgttttctaaccatttttgttttatttttctgaaaaagttaacccctcccaactcctcacacattggctcttcctcttgagccacaaagttttgattcttgcgatgtatgtgccttattttatgttaatcttgtcaatgagagggaccagttggtgttgcccaatcagcactccaaggctgtgtgtgcaccagccagagagcgcacggtggtagcagagtcgaggctgtcttgtatcctggtttcatgtgttgttttgaactgataggaggatgttctcttctgacaagttacccttgtgtatcctgcagacatgtaaaataaaatacaagttcatttttttcaccttttttagatttttttaaaaaataaaatgtgtaatcctttttttaaaagaaacacatgtaaatacatttaagtattgtaggcatagcgttcagatgtgactggcccaggcgttcctcggacaagcctgcattccccgtgatcacgcccacctcaagcccaggggctgcagcccagccacagatgaactctacctttgctttcagaaccacttagtccttttgtaacaaagaaaaaaaaatgtttcttacaatgtcaataaaaaattctttgtatggaaaaaaaaaat

SEQ ID NO: 418171 - DNA, 945 bp, Homo sapiens
agatgaggaaatacagactaagaagtctaccagcaagaaggcaagaacccaggacttaacactcattcttctgattaatccatccataagaactccctgagcaccaaggtgatgttttaacttcatgttaaaaacccaggcctcctttatacagttcaagaagcagaaaatcaaggtcttttagcgtcttatctagcacacttggtggccttaagtattttgagtttatgttgctttaaattgcacagtttaattgctctcagttccctaacacttaatttttttacatttatatattttttcagtaacacccgaaaaaacaagaaagtaggaaacattgtctcctagctcattatttgaccgtagtgttggaagtagttcatctgatagaaaatggtttctttctagccaaggttcagaaattgcctctcaaggacgggaactggctaatcatttccaaagtgaaggaactccagttatgatcggtaagctgtttcagacactgtttttggtagagtgagtaatatgcaaaacttatcattgatataaatatttaatgttgcataaaatcagtcatttaaaaaattttgaaattaacttttacaccatatgtatggatctctggatattgaaaaaaatttctaaggtggcttaaaggttacaaaaaagattataataaccagaagaagtaaaggctgagaaatggtagctatgttcaaacatttaaagagctgagaacagtattaaaaagaggaaacggtcactcagctgagcttcgtaagtcatgactctgtcataactgggctggctttgtgagattttgcaattacttacctctgtggattttatttgtaaaataagaagattggattagctgatctaaagatgcttaattctttgaagaacaagacctgtcctgtgatgacagaaggcaaggtgagacta

SEQ ID NO: 418172 - DNA, 1588 bp, Homo sapiens
cccgggccccgcccctgggccgtgcggtgacgccacttcagggccggcccgcggaacttttgggcaggtgtcagcgcccgtgtcaccgccacgtcgcggacatggtgatttcagaaagtatggatatactcttcagaataagaggaggccttgatttggcttttcagctagctactcctaatgaaatttttctcaagaaggcactgaaacatgtgttgagtgacctgtcaactaagctgtcttcaaacgcccttgtgttcagaatttgccacagttcagtgtatatatggcctagcagtgacataaacaccattcctggagaactgactgatgcttctgcttgtaagaacatactgcgctttattcaatttgagccagaagaagatataaaaagaaaattcatgagaaagaaggacaaaaagttatcagacatgcatcaaatagtaaatatagatcttatgctggaaatgtcaacctccctggcagctgtaacgcccatcattgaaagggaaagcggaggacaccattatgttaatatgactttacctgtcgatgcagttatatctgttgctccagaagaaacatggggaaaagttcgtaaactcctggttgatgcaattcataatcaactaactgacatggaaaaatgtattttgaaatatatgaaaggaacatctattgtggtccctgaaccactgcactttttattaccagggaaaaaaaatcttgtaacaatttcatatccttcaggaataccagatggccagctgcaggcctataggaaggagttacatgatcttttcaatctgcctcacgacagaccctatttcaaaaggtctaatgcttatcactttccagatgagccatacaaagatggttacattagaaatccacatacttaccttaatccacctaacatggagactggtatgatttatgtggtccagggcatatatggctatcatcattatatgcaggatcgcatagatgacaatggctggggctgtgcttatcgatctctgcagactatctgctcttggttcaaacatcagggatacacagagaggtccattccaacacacagagaaattcagcaggctctagtcgatgccggggacaaaccagcaacatttgtcggatcgcggcaatggattggatctattgaggtgcagctggtactaaaccaattgatcggtataacgtcaaaaatcctgtttgtcagccaaggttcagaaattgcctctcaaggacgggaactggctaatcatttccaaagtgaaggaactccagttatgatcgggggaggagttttggcccacacaatactaggagttgcatggaatgagattacagggcagataaagtttctgattctagatccacattataccggtgctgaagacctgcaagttattttggaaaagggctggtgcggatggaagggcccagatttttggaacaaggatgcatactataacttatgtcttcctcagcgaccaaatatgatttaaaatatcttggagtcaaagactgcagtagagtggtattataaatttgtgaataaagaatcagtttaatttttcacatt

SEQ ID NO: 418173 - DNA, 2452 bp, Homo sapiens
cccgggccccgcccctgggccgtgcggtgacgccacttcagggccggcccgcggaacttttgggcaggtgtcagcgcccgtgtcaccgccacgtcgcggacatggtgatttcagaaagtatggatatactcttcagaataagaggaggccttgatttggcttttcagctagctactcctaatgaaatttttctcaagaaggcactgaaacatgtgttgagtgacctgtcaactaagctgtcttcaaacgcccttgtgttcagaatttgccacagttcagtgtatatatggcctagcagtgacataaacaccattcctggagaactgactgatgcttctgcttgtaagaacatactgcgctttattcaatttgagccagaagaagatataaaaagaaaattcatgagaaagaaggacaaaaagttatcagacatgcatcaaatagtaaatatagatcttatgctggaaatgtcaacctccctggcagctgtaacgcccatcattgaaagggaaagcggaggacaccattatgttaatatgactttacctgtcgatgcagttatatctgttgctccagaagaaacatggggaaaagttcgtaaactcctggttgatgcaattcataatcaactaactgacatggaaaaatgtattttgaaatatatgaaaggaacatctattgtggtccctgaaccactgcactttttattaccagggaaaaaaaatcttgtaacaatttcatatccttcaggaataccagatggccagctgcaggcctataggaaggagttacatgatcttttcaatctgcctcacgacagaccctatttcaaaaggtctaatgcttatcactttccagatgagccatacaaagatggttacattagaaatccacatacttaccttaatccacctaacatggagactggtatgatttatgtggtccagggcatatatggctatcatcattatatgcaggatcgcatagatgacaatggctggggctgtgcttatcgatctctgcagactatctgctcttggttcaaacatcagggatacacagagaggtccattccaacacacagagaaattcagcaggctctagtcgatgccggggacaaaccagcaacatttgtcggatcgcggcaatggattggatctattgaggtgcagctggtactaaaccaattgatcggtataacgtcaaaaatcctgtttgtcagccaaggttcagaaattgcctctcaaggacgggaactggctaatcatttccaaagtgaaggaactccagttatgatcgggggaggagttttggcccacacaatactaggagttgcatggaatgagattacagggcagataaagtttctgattctagatccacattataccggtgctgaagacctgcaagttattttggaaaagggctggtgcggatggaagggcccagatttttggaacaaggatgcatactataacttatgtcttcctcagcgaccaaatatgatttaaaatatcttggagtcaaagactgcagtagagtggtattataaatttgtgaataaagaatcagtttaatttttcacattaaatcctggttctagtttgacgatttaaattatgacctttttcaaaggttgtaaatactgcacggagaatgtattttttagacgttcctttaataacttaaaagacaaagcatacacaaccagcatattataggcatgtaaatacatgtgttcttaaatggatcttcacttggaagaaagtttttcatccttctcagaaggagattagacacaacatatggtaaagccaaaagcaggagcttatagatttgcatgaaatgaaggcgttcttcagacttcttcataacccacgtgacatctgtttttaaaaacacgttaacattaaaaacttttttttaaaaagagttttatccccaaacttccaccatgcagtcccatttttggtctctagactctggtaaatataaccagtactaaaatgttaatgagaatgaaacaatactactagaaatacgagtgtcagtattaaatggaataataaatgctatgcaaacaagagatcactgcgggaggaaaaaagcagcagctctgagttacttaccagcacttccttttcccactggtattttctacacttccgagactccgtttctgtctgagcacggcaacacaatcattcctgtcagggtgttcacttgcttttattgtctgcatacatttaattgttgtaagaaacttggcacagtctggaaatccacatgaccaagcgagatcttcagctgtttgcccgttcttattacataaactgaaaacaggataaaaacggagtgaaatgaaacattgaacttaagtctttttttttatatcttacaagggaattttgggctcatacaaatgttggttgcagaacagaagaggtaaagg

SEQ ID NO: 418174 - DNA, 1999 bp, Homo sapiens
cccgggccccgcccctgggccgtgcggtgacgccacttcagggccggcccgcggaacttttgggcaggtgtcagcgcccgtgtcaccgccacgtcgcggacatggtgatttcagaaagtatggatatactcttcagaataagaggaggccttgatttggcttttcagctagctactcctaatgaaatttttctcaagaaggcactgaaacatgtgttgagtgacctgtcaactaagctgtcttcaaacgcccttgtgttcagaatttgccacagttcagtgtatatatggcctagcagtgacataaacaccattcctggagaactgactgatgcttctgcttgtaagaacatactgcgctttattcaatttgagccagaagaagatataaaaagaaaattcatgagaaagaaggacaaaaagttatcagacatgcatcaaatagtaaatatagatcttatgctggaaatgtcaacctccctggcagctgtaacgcccatcattgaaagggaaagcggaggacaccattatgttaatatgactttacctgtcgatgcagttatatctgttgctccagaagaaacatggggaaaagttcgtaaactcctggttgatgcaattcataatcaactaactgacatggaaaaatgtattttgaaatatatgaaaggaacatctattgtggtccctgaaccactgcactttttattaccagggaaaaaaaatcttgtaacaatttcatatccttcaggaataccagatggccagctgcaggcctataggaaggagttacatgatcttttcaatctgcctcacgacagaccctatttcaaaaggtctaatgcttatcactttccagatgagccatacaaagatggttacattagaaatccacatacttaccttaatccacctaacatggagactggtatgatttatgtggtccagggcatatatggctatcatcattatatgcaggatcgcatagatgacaatggctggggctgtgcttatcgatctctgcagactatctgctcttggttcaaacatcagggatacacagagaggtccattccaacacacagagaaattcagcaggctctagtcgatgccggggacaaaccagcaacatttgtcggatcgcggcaatggattggatctattgaggtgcagctggtactaaaccaattgatcggtataacgtcaaaaatcctgtttgtcagccaaggttcagaaattgcctctcaaggacgggaactggctaatcatttccaaagtgaaggaactccagttatgatcgggggaggagttttggcccacacaatactaggagttgcatggaatgagattacagggcagataaagtttctgattctagatccacattataccggtgctgaagacctgcaagttattttggaaaagggctggtgcggatggaagggcccagatttttggaacaaggatgcatactataacttatgtcttcctcagcgaccaaatatgatttaaaatatcttggagtcaaagactgcagtagagtggtattataaatttgtgaataaagaatcagtttaatttttcacattaaatcctggttctagtttgacgatttaaattatgacctttttcaaaggttgtaaatactgcacggagaatgtattttttagacgttcctttaataacttaaaagacaaagcatacacaaccagcatattataggcatgtaaatacatgtgttcttaaatggatcttcacttggaagaaagtttttcatccttctcagaaggagattagacacaacatatggtaaagaccgtcgcgacggtctttacctgacaatgaccccagggcggagatcgaaattcttcttcacaatctctaatagctctctctcactcttctgagaggtaccataatggtaaatggagatagataatggatgagtaactccaatagcataagagacctgtactagaaccctaccggcacagacgttc

SEQ ID NO: 418175 - DNA, 2555 bp, Homo sapiens
cccgggccccgcccctgggccgtgcggtgacgccacttcagggccggcccgcggaacttttgggcaggtgtcagcgcccgtgtcaccgccacgtcgcggacatggtgatttcagaaagtatggatatactcttcagaataagaggaggccttgatttggcttttcagctagctactcctaatgaaatttttctcaagaaggcactgaaacatgtgttgagtgacctgtcaactaagctgtcttcaaacgcccttgtgttcagaatttgccacagttcagtgtatatatggcctagcagtgacataaacaccattcctggagaactgactgatgcttctgcttgtaagaacatactgcgctttattcaatttgagccagaagaagatataaaaagaaaattcatgagaaagaaggacaaaaagttatcagacatgcatcaaatagtaaatatagatcttatgctggaaatgtcaacctccctggcagctgtaacgcccatcattgaaagggaaagcggaggacaccattatgttaatatgactttacctgtcgatgcagttatatctgttgctccagaagaaacatggggaaaagttcgtaaactcctggttgatgcaattcataatcaactaactgacatggaaaaatgtattttgaaatatatgaaaggaacatctattgtggtccctgaaccactgcactttttattaccagggaaaaaaaatcttgtaacaatttcatatccttcaggaataccagatggccagctgcaggcctataggaaggagttacatgatcttttcaatctgcctcacgacagaccctatttcaaaaggtctaatgcttatcactttccagatgagccatacaaagatggttacattagaaatccacatacttaccttaatccacctaacatggagactggtatgatttatgtggtccagggcatatatggctatcatcattatatgcaggatcgcatagatgacaatggctggggctgtgcttatcgatctctgcagactatctgctcttggttcaaacatcagggatacacagagaggtccattccaacacacagagaaattcagcaggctctagtcgatgccggggacaaaccagcaacatttgtcggatcgcggcaatggattggatctattgaggtgcagctggtactaaaccaattgatcggtataacgtcaaaaatcctgtttgtcagtaacacccgaaaaaacaagaaagtaggaaacattgtctcctagctcattatttgaccgtagtgttggaagtagttcatctgatagaaaatggtttctttctagccaaggttcagaaattgcctctcaaggacgggaactggctaatcatttccaaagtgaaggaactccagttatgatcgggggaggagttttggcccacacaatactaggagttgcatggaatgagattacagggcagataaagtttctgattctagatccacattataccggtgctgaagacctgcaagttattttggaaaagggctggtgcggatggaagggcccagatttttggaacaaggatgcatactataacttatgtcttcctcagcgaccaaatatgatttaaaatatcttggagtcaaagactgcagtagagtggtattataaatttgtgaataaagaatcagtttaatttttcacattaaatcctggttctagtttgacgatttaaattatgacctttttcaaaggttgtaaatactgcacggagaatgtattttttagacgttcctttaataacttaaaagacaaagcatacacaaccagcatattataggcatgtaaatacatgtgttcttaaatggatcttcacttggaagaaagtttttcatccttctcagaaggagattagacacaacatatggtaaagccaaaagcaggagcttatagatttgcatgaaatgaaggcgttcttcagacttcttcataacccacgtgacatctgtttttaaaaacacgttaacattaaaaacttttttttaaaaagagttttatccccaaacttccaccatgcagtcccatttttggtctctagactctggtaaatataaccagtactaaaatgttaatgagaatgaaacaatactactagaaatacgagtgtcagtattaaatggaataataaatgctatgcaaacaagagatcactgcgggaggaaaaaagcagcagctctgagttacttaccagcacttccttttcccactggtattttctacacttccgagactccgtttctgtctgagcacggcaacacaatcattcctgtcagggtgttcacttgcttttattgtctgcatacatttaattgttgtaagaaacttggcacagtctggaaatccacatgaccaagcgagatcttcagctgtttgcccgttcttattacataaactgaaaacaggataaaaacggagtgaaatgaaacattgaacttaagtctttttttttatatcttacaagggaattttgggctcatacaaatgttggttgcagaacagaagaggtaaagg

SEQ ID NO: 418176 - DNA, 2411 bp, Homo sapiens
cccgggccccgcccctgggccgtgcggtgacgccacttcagggccggcccgcggaacttttgggcaggtgtcagcgcccgtgtcaccgccacgtcgcggacatggtgatttcagaaagtatggatatactcttcagaataagaggaggccttgatttggcttttcagctagctactcctaatgaaatttttctcaagaaggcactgaaacatgtgttgagtgacctgtcaactaagctgtcttcaaacgcccttgtgttcagaatttgccacagttcagtgtatatatggcctagcagtgacataaacaccattcctggagaactgactgatgcttctgcttgtaagaacatactgcgctttattcaatttgagccagaagaagatataaaaagaaaattcatgagaaagaaggacaaaaagttatcagacatgctccctggcagctgtaacgcccatcattgaaagggaaagcggaggacaccattatgttaatatgactttacctgtcgatgcagttatatctgttgctccagaagaaacatggggaaaagttcgtaaactcctggttgatgcaattcataatcaactaactgacatggaaaaatgtattttgaaatatatgaaaggaacatctattgtggtccctgaaccactgcactttttattaccagggaaaaaaaatcttgtaacaatttcatatccttcaggaataccagatggccagctgcaggcctataggaaggagttacatgatcttttcaatctgcctcacgacagaccctatttcaaaaggtctaatgcttatcactttccagatgagccatacaaagatggttacattagaaatccacatacttaccttaatccacctaacatggagactggtatgatttatgtggtccagggcatatatggctatcatcattatatgcaggatcgcatagatgacaatggctggggctgtgcttatcgatctctgcagactatctgctcttggttcaaacatcagggatacacagagaggtccattccaacacacagagaaattcagcaggctctagtcgatgccggggacaaaccagcaacatttgtcggatcgcggcaatggattggatctattgaggtgcagctggtactaaaccaattgatcggtataacgtcaaaaatcctgtttgtcagccaaggttcagaaattgcctctcaaggacgggaactggctaatcatttccaaagtgaaggaactccagttatgatcgggggaggagttttggcccacacaatactaggagttgcatggaatgagattacagggcagataaagtttctgattctagatccacattataccggtgctgaagacctgcaagttattttggaaaagggctggtgcggatggaagggcccagatttttggaacaaggatgcatactataacttatgtcttcctcagcgaccaaatatgatttaaaatatcttggagtcaaagactgcagtagagtggtattataaatttgtgaataaagaatcagtttaatttttcacattaaatcctggttctagtttgacgatttaaattatgacctttttcaaaggttgtaaatactgcacggagaatgtattttttagacgttcctttaataacttaaaagacaaagcatacacaaccagcatattataggcatgtaaatacatgtgttcttaaatggatcttcacttggaagaaagtttttcatccttctcagaaggagattagacacaacatatggtaaagccaaaagcaggagcttatagatttgcatgaaatgaaggcgttcttcagacttcttcataacccacgtgacatctgtttttaaaaacacgttaacattaaaaacttttttttaaaaagagttttatccccaaacttccaccatgcagtcccatttttggtctctagactctggtaaatataaccagtactaaaatgttaatgagaatgaaacaatactactagaaatacgagtgtcagtattaaatggaataataaatgctatgcaaacaagagatcactgcgggaggaaaaaagcagcagctctgagttacttaccagcacttccttttcccactggtattttctacacttccgagactccgtttctgtctgagcacggcaacacaatcattcctgtcagggtgttcacttgcttttattgtctgcatacatttaattgttgtaagaaacttggcacagtctggaaatccacatgaccaagcgagatcttcagctgtttgcccgttcttattacataaactgaaaacaggataaaaacggagtgaaatgaaacattgaacttaagtctttttttttatatcttacaagggaattttgggctcatacaaatgttggttgcagaacagaagaggtaaagg

SEQ ID NO: 418177 - DNA, 2089 bp, Homo sapiens
cccgggccccgcccctgggccgtgcggtgacgccacttcagggccggcccgcggaacttttgggcaggtgtcagcgcccgtgtcaccgccacgtcgcggacatggtgatttcagaaagtatggatatactcttcagaataagaggaggccttgatttggcttttcagctagctactcctaatgaaatttttctcaagaaggcactgaaacatgtgttgagtgacctgtcaactaagctgtcttcaaacgcccttgtgttcagaatttgccacagttcagtgtatatatggcctagcagtgacataaacaccattcctggagaactgactgatgcttctgcttgtaagaacatactgcgctttattcaatttgagccagaagaagatataaaaagaaaattcatgagaaagaaggacaaaaagttatcagacatgcatcaaatagtaaatatagatcttatgctggaaatgtcaacctccctggcagctgtaacgcccatcattgaaagggaaagcggaggacaccattatgttaatatgactttacctgtcgatgcagttatatctgttgctccagaagaaacatggggaaaagttcgtaaactcctggttgatgcaattcataatcaactaactgacatggaaaaatgtattttgaaatatatgaaaggaacatctattgtggtccctgaaccactgcactttttattaccagggaaaaaaaatcttgtaacaatttcatatccttcaggaataccagatggccagctgcaggcctataggaaggagttacatgatcttttcaatctgcctcacgacagaccctatttcaaaaggtctaatgcttatcactttccagatgagccatacaaagatggttacattagaaatccacatacttaccttaatccacctaacatggagactggtatgatttatgtggtccagggcatatatggctatcatcattatatgcaggatcgcatagatgacaatggctggggctgtgcttatcgatctctgcagactatctgctcttggttcaaacatcagggatacacagagaggtccattccaacacacagagaaattcagcaggctctagtcgatgccggggacaaaccagcaacatttgtcggatcgcggcaatggattggatctattgaggtgcagctggtactaaaccaattgatcggtataacgtcaaaaatcctgtttgtcagccaaggttcagaaattgcctctcaaggacgggaactggctaatcatttccaaagtgaaggaactccagttatgatcgggggaggagttttggcccacacaatactaggagttgcatggaatgagattacagggcagataaagtttctgattctagatccacattataccggtgctgaagacctgcaagttattttggaaaagcatttggaatttgaagtctataaaaggttttttgactggtgcatgtatcttactgaatatagtagcaatattcttgttctgtagcaaggtgttcattccattcagtatttattaaagtacctaacaagtgccaggcactgtcctaagcactagtattacacgaggtttttcgggagctaaaacctttagggtaggacagagaaggagagtgcaaaaaggactctcgagaaaaaaaaaatggtatctcaggtgcttctacgaggctggtgctgtggtggcccctgccttgcagaaacagtgaaagccgcactgcaggtagatcagtgcgtccagagctaggcgaagaggtgaggctggaaggacacaccaagctcagtcagaaagggtggtcctttgtgaaccaggcatttcgattttttcttaaaggcagggagaagccttaattattttcatcatcaaatttctcttttctggttgactcaaggggctctgcactacatggcattatctaggtaaggtttctgaacaattagagtaagggattgtccctgatttctttctctgagaattgcaatctccatctttgctagttctatttctatagaacttttcaacagcagaaacctccttgctctatttgtatacacaagaaactgtgcagccaa

SEQ ID NO: 418178 - DNA, 1759 bp, Homo sapiens
cccgggccccgcccctgggccgtgcggtgacgccacttcagggccggcccgcggaacttttgggcaggtgtcagcgcccgtgtcaccgccacgtcgcggacatggtgatttcagaaagtatggatatactcttcagaataagaggaggccttgatttggcttttcagctagctactcctaatgaaatttttctcaagaaggcactgaaacatgtgttgagtgacctgtcaactaagctgtcttcaaacgcccttgtgttcagaatttgccacagttcagtgtatatatggcctagcagtgacataaacaccattcctggagaactgactgatgcttctgcttgtaagaacatactgcgctttattcaatttgagccagaagaagatataaaaagaaaattcatgagaaagaaggacaaaaagttatcagacatgcatcaaatagtaaatatagatcttatgctggaaatgtcaacctccctggcagctgtaacgcccatcattgaaagggaaagcggaggacaccattatgttaatatgactttacctgtcgatgcagttatatctgttgctccagaagaaacatggggaaaagttcgtaaactcctggttgatgcaattcataatcaactaactgacatggaaaaatgtattttgaaatatatgaaaggaacatctattgtggtccctgaaccactgcactttttattaccagggaaaaaaaatcttgtaacaatttcatatccttcaggaataccagatggccagctgcaggcctataggaaggagttacatgatcttttcaatctgcctcacgacagaccctatttcaaaaggtctaatgcttatcactttccagatgagccatacaaagatggttacattagaaatccacatacttaccttaatccacctaacatggagactggtatgatttatgtggtccagggcatatatggctatcatcattatatgcaggatcgcatagatgacaatggctggggctgtgcttatcgatctctgcagactatctgctcttggttcaaacatcagggatacacagagaggtccattccaacacacagagaaattcagcaggctctagtcgatgccggggacaaaccagcaacatttgtcggatcgcggcaatggattggatctattgaggtgcagctggtactaaaccaattgatcggtataacgtcaaaaatcctgtttgtcagccaaggttcagaaattgcctctcaaggacgggaactggctaatcatttccaaagtgaaggaactccagttatgatcggtaagctgtttcagacactgtttttggtagagtgagtaatatgcaaaacttatcattgatataaatatttaatgttgcataaaatcagtcatttaaaaaattttgaaattaacttttacaccatatgtatggatctctggatattgaaaaaaatttctaaggtggcttaaaggttacaaaaaagattataataaccagaagaagtaaaggctgagaaatggtagctatgttcaaacatttaaagagctgagaacagtattaaaaagaggaaacggtcactcagctgagcttcgtaagtcatgactctgtcataactgggctggctttgtgagattttgcaattacttacctctgtggattttatttgtaaaataagaagattggattagctgatctaaagatgcttaattctttgaagaacaagacctgtcctgtgatgacagaaggcaaggtgagacta

SEQ ID NO: 418179 - DNA, 1252 bp, Homo sapiens
cccgggccccgcccctgggccgtgcggtgacgccacttcagggccggcccgcggaacttttgggcaggtgtcagcgcccgtgtcaccgccacgtcgcggacatggtgatttcagaaagtatggatatactcttcagaataagaggaggccttgatttggcttttcagctagctactcctaatgaaatttttctcaagaaggcactgaaacatgtgttgagtgacctgtcaactaagctgtcttcaaacgcccttgtgttcagaatttgccacagttcagtgtatatatggcctagcagtgacataaacaccattcctggagaactgactgatgcttctgcttgtaagaacatactgcgctttattcaatttgagccagaagaagatataaaaagaaaattcatgagaaagaaggacaaaaagttatcagacatgcatcaaatagtaaatatagatcttatgctggaaatgtcaacctccctggcagctgtaacgcccatcattgaaagggaaagcggaggacaccattatgttaatatgactttacctgtcgatgcagttatatctgttgctccagaagaaacatggggaaaagttcgtaaactcctggttgatgcaattcataatcaactaactgacatggaaaaatgtattttgaaatatatgaaaggaacatctattgtggtccctgaaccactgcactttttattaccagggaaaaaaaatcttgtaacaatttcatatccttcaggaataccagatggccagctgcaggcctataggaaggagttacatgatcttttcaatctgcctcacgacagaccctatttcaaaaggtctaatgcttatcactttccagatgagccatacaaagatggttacattagaaatccacatacttaccttaatccacctaacatggagactggtatgatttatgtggtccagggcatatatggctatcatcattatatgcaggatcgcatagatgacaatggctggggctgtgcttatcgatctctgcagactatctgctcttggttcaaacatcagggatacacagagaggtccattccaacacacagagaaattcagcaggctctagtcgatgccggggacaaaccagcaacatttgtcggatcgcggcaatggattggatctattgaggtgcagctggtactaaaccaattgatcggtataacgtcaaaaatcctgtttgtcagccagagtgtcgcggggtcctctagagtcac

SEQ ID NO: 418180 - DNA, 1284 bp, Homo sapiens
tggaataacagttacaggtaaattttttttaatgatttttatgatgaattacatacatagaattaaaagttcaaaaacctaccttaaagggtaagatacgttacttttctatgctagtaggaattcaaatccttgaatgataaagccatttagagtcttattccaaggtcctgctgacagagcctgatgtcacgatttccatgacataatcttgtaactttgtaaaaggctttcctttcccgtcttctctatccagggctggtgcggatggaagggcccagatttttggaacaaggatgcatactataacttatgtcttcctcagcgaccaaatatgatttaaaatatcttggagtcaaagactgcagtagagtggtattataaatttgtgaataaagaatcagtttaatttttcacattaaatcctggttctagtttgacgatttaaattatgacctttttcaaaggttgtaaatactgcacggagaatgtattttttagacgttcctttaataacttaaaagacaaagcatacacaaccagcatattataggcatgtaaatacatgtgttcttaaatggatcttcacttggaagaaagtttttcatccttctcagaaggagattagacacaacatatggtaaagccaaaagcaggagcttatagatttgcatgaaatgaaggcgttcttcagacttcttcataacccacgtgacatctgtttttaaaaacacgttaacattaaaaacttttttttaaaaagagttttatccccaaacttccaccatgcagtcccatttttggtctctagactctggtaaatataaccagtactaaaatgttaatgagaatgaaacaatactactagaaatacgagtgtcagtattaaatggaataataaatgctatgcaaacaagagatcactgcgggaggaaaaaagcagcagctctgagttacttaccagcacttccttttcccactggtattttctacacttccgagactccgtttctgtctgagcacggcaacacaatcattcctgtcagggtgttcacttgcttttattgtctgcatacatttaattgttgtaagaaacttggcacagtctggaaatccacatgaccaagcgagatcttcagctgtttgcccgttcttattacataaactgaaaacaggataaaaacggagtgaaatgaaacattgaacttaagtctttttttttatatcttacaagggaattttgggctcatacaaatgttggttgcagaacagaagaggtaaagg

SEQ ID NO: 418181 - DNA, 1400 bp, Homo sapiens
tcgctattcatcggcaccattccaacacacagagaaattcagcaggctctagtcgatgccggggacaaaccagcaacatttgtcggatcgcggcaatggattggatctattgaggtgcagctggtactaaaccaattgatcggtataacgtcaaaaatcctgtttgtcagccaaggttcagaaattgcctctcaaggacgggaactggctaatcatttccaaagtgaaggaactccagttatgatcgggggaggagttttggcccacacaatactaggagttgcatggaatgagattacagggcagataaagtttctgattctagatccacattataccggtgctgaagacctgcaagttattttggaaaagggctggtgcggatggaagggcccagatttttggaacaaggatgcatactataacttatgtcttcctcagcgaccaaatatgatttaaaatatcttggagtcaaagactgcagtagagtggtattataaatttgtgaataaagaatcagtttaatttttcacattaaatcctggttctagtttgacgatttaaattatgacctttttcaaaggttgtaaatactgcacggagaatgtattttttagacgttcctttaataacttaaaagacaaagcatacacaaccagcatattataggcatgtaaatacatgtgttcttaaatggatcttcacttggaagaaagtttttcatccttctcagaaggagattagacacaacatatggtaaagccaaaagcaggagcttatagatttgcatgaaatgaaggcgttcttcagacttcttcataacccacgtgacatctgtttttaaaaacacgttaacattaaaaacttttttttaaaaagagttttatccccaaacttccaccatgcagtcccatttttggtctctagactctggtaaatataaccagtactaaaatgttaatgagaatgaaacaatactactagaaatacgagtgtcagtattaaatggaataataaatgctatgcaaacaagagatcactgcgggaggaaaaaagcagcagctctgagttacttaccagcacttccttttcccactggtattttctacacttccgagactccgtttctgtctgagcacggcaacacaatcattcctgtcagggtgttcacttgcttttattgtctgcatacatttaattgttgtaagaaacttggcacagtctggaaatccacatgaccaagcgagatcttcagctgtttgcccgttcttattacataaactgaaaacaggataaaaacggagtgaaatgaaacattgaacttaagtctttttttttatatcttacaagggaattttgggctcatacaaatgttggttgcagaacagaagaggtaaagg

SEQ ID NO: 418182 - DNA, 1638 bp, Homo sapiens
agatgaggaaatacagactaagaagtctaccagcaagaaggcaagaacccaggacttaacactcattcttctgattaatccatccataagaactccctgagcaccaaggtgatgttttaacttcatgttaaaaacccaggcctcctttatacagttcaagaagcagaaaatcaaggtcttttagcgtcttatctagcacacttggtggccttaagtattttgagtttatgttgctttaaattgcacagtttaattgctctcagttccctaacacttaatttttttacatttatatattttttcagtaacacccgaaaaaacaagaaagtaggaaacattgtctcctagctcattatttgaccgtagtgttggaagtagttcatctgatagaaaatggtttctttctagccaaggttcagaaattgcctctcaaggacgggaactggctaatcatttccaaagtgaaggaactccagttatgatcgggggaggagttttggcccacacaatactaggagttgcatggaatgagattacagggcagataaagtttctgattctagatccacattataccggtgctgaagacctgcaagttattttggaaaagggctggtgcggatggaagggcccagatttttggaacaaggatgcatactataacttatgtcttcctcagcgaccaaatatgatttaaaatatcttggagtcaaagactgcagtagagtggtattataaatttgtgaataaagaatcagtttaatttttcacattaaatcctggttctagtttgacgatttaaattatgacctttttcaaaggttgtaaatactgcacggagaatgtattttttagacgttcctttaataacttaaaagacaaagcatacacaaccagcatattataggcatgtaaatacatgtgttcttaaatggatcttcacttggaagaaagtttttcatccttctcagaaggagattagacacaacatatggtaaagccaaaagcaggagcttatagatttgcatgaaatgaaggcgttcttcagacttcttcataacccacgtgacatctgtttttaaaaacacgttaacattaaaaacttttttttaaaaagagttttatccccaaacttccaccatgcagtcccatttttggtctctagactctggtaaatataaccagtactaaaatgttaatgagaatgaaacaatactactagaaatacgagtgtcagtattaaatggaataataaatgctatgcaaacaagagatcactgcgggaggaaaaaagcagcagctctgagttacttaccagcacttccttttcccactggtattttctacacttccgagactccgtttctgtctgagcacggcaacacaatcattcctgtcagggtgttcacttgcttttattgtctgcatacatttaattgttgtaagaaacttggcacagtctggaaatccacatgaccaagcgagatcttcagctgtttgcccgttcttattacataaactgaaaacaggataaaaacggagtgaaatgaaacattgaacttaagtctttttttttatatcttacaagggaattttgggctcatacaaatgttggttgcagaacagaagaggtaaagg

SEQ ID NO: 418183 - DNA, 1510 bp, Homo sapiens
cccgggccccgcccctgggccgtgcggtgacgccacttcagggccggcccgcggaacttttgggcaggtgtcagcgcccgtgtcaccgccacgtcgcggacatggtgatttcagaaagtatggatatactcttcagaataagaggaggccttgatttggcttttcagctagctactcctaatgaaatttttctcaagaaggcactgaaacatgtgttgagtgacctgtcaactaagctgtcttcaaacgcccttgtgttcagaatttgccacagttcagtgtatatatggcctagcagtgacataaacaccattcctggagaactgactgatgcttctgcttgtaagaacatactgcgctttattcaatttgagccagaagaagatataaaaagaaaattcatgagaaagaaggacaaaaagttatcagacatgcatcaaatagtaaatatagatcttatgctggaaatgtcaacctccctggcagctgtaacgcccatcattgaaagggaaagcggaggacaccattatgttaatatgactttacctgtcgatgcagttatatctgttgctccagaagaaacatggggaaaagttcgtaaactcctggttgatgcaattcataatcaactaactgacatggaaaaatgtattttgaaatatatgaaaggaacatctattgtggtccctgaaccactgcactttttattaccagggaaaaaaaatcttgagttacatgatcttttcaatctgcctcacgacagaccctatttcaaaaggtctaatgcttatcactttccagatgagccatacaaagatggttacattagaaatccacatacttaccttaatccacctaacatggagactggtatgatttatgtgagtccaaagcaagaaaaaacaaacaaacataaaaaagcaggatcgcatagatgacaatggctggggctgtgcttatcgatctctgcagactatctgctcttggttcaaacatcagggatacacagagaggtccattccaacacacagagaaattcagcaggctcaagtacgatagccgagaggacaaaccagcaacaaaaaacggatacgcgacaaaaaaaaagaaacgacatagaaaaacaacaaaaacaaaaccaaagaaacagagaagaaacagtacaaaaaaccgattagtacagccaagagtaacagaaaaagccgacacaagagaacgaaaaacaaagcgaaacaaaaccaaaagaaaaaaaacaccaagaaagagaacaaaagaaagaaagagaggaatcgccagcacaagaacaaaaaagaatcaaaaacagataaaacaatgagcgaagaaaaaataaacgaagaaaccagaaccagcagaaaaaaccaaaactaaaaaaaccaatcaagagagaggattaaaaaagcgaaagatcgaaaagaaagagcccaggaagatgaggaacaggaaaaacgaacaaaaaggaaatatacaaccacattcgatcaaaaaaaaa

SEQ ID NO: 418184 - DNA, 776 bp, Homo sapiens
gtgcctcagggcgcggaatacccgcgtacaaccagcatattataggcatgtaaatacatgtgttcttaaatggatcttcacttggaagaaagtttttcatccttctcagaaggagattagacacaacatatggtaaagccaaaagcaggagcttatagatttgcatgaaatgaaggcgttcttcagacttcttcataacccacgtgacatctgtttttaaaaacacgttaacattaaaaacttttttttaaaaagagttttatccccaaacttccaccatgcagtcccatttttggtctctagactctggtaaatataaccagtactaaaatgttaatgagaatgaaacaatactactagaaatacgagtgtcagtattaaatggaataataaatgctatgcaaacaagagatcactgcgggaggaaaaaagcagcagctctgagttacttaccagcacttccttttcccactggtattttctacacttccgagactccgtttctgtctgagcacggcaacacaatcattcctgtcagggtgttcacttgcttttattgtctgcatacatttaattgttgtaagaaacttggcacagtctggaaatccacatgaccaagcgagatcttcagctgtttgcccgttcttattacataaactgaaaacaggataaaaacggagtgaaatgaaacattgaacttaagtctttttttttatatcttacaagggaattttgggctcatacaaatgttggttgcagaacagaagaggtaaagg

SEQ ID NO: 418185 - DNA, 364 bp, Homo sapiens
agttatatctgttgctccagaagaaacatggggaaagtaagtatttttatagtaccactgccacatttgaatgagggcccttccccaaacccatgtttgtatatcctgtaggtatacctaaggtgtgattttctccttgtttattattaacctaagagccatctattaattaaatggttatttggaggaagtagggtagcatgctaaaacctggaggatttccctttatccacaaagagcaaatacacagtttcttttataatgtataattcagacttcctttagcaaacctggtccaatcaagttttttactatactaaggatatattagctctgtacttttctttattgtagtcactataac

SEQ ID NO: 418186 - DNA, 387 bp, Homo sapiens
gaactaaagtaacagtctaactctaagaacattaaacataattcgggagcatatatagaatatgtacttctatcctaagttaatattttactgtgtttcttctctgtatatagatttatgtggtccagggcatatatggctatcatcattatatgcaggatcgcatagatgacaatggctggggctgtgcttatcgatctctgcagactatctgctcttggttcaaacatcagggatacacagagaggtccattccaacacacagagaaattcagcaggtacagaacataccgttttaaattataatcaactgtatgtttcattagcccttaatataccattgataatttttgttacctcatggtgcagacttatttctgttttgaa

SEQ ID NO: 418187 - DNA, 697 bp, Homo sapiens
tcgctattcatcggcaccattccaacacacagagaaattcagcaggctctagtcgatgccggggacaaaccagcaacatttgtcggatcgcggcaatggattggatctattgaggtgcagctggtactaaaccaattgatcggtataacgtcaaaaatcctgtttgtcagccaaggttcagaaattgcctctcaaggacgggaactggctaatcatttccaaagtgaaggaactccagttatgatcgggggaggagttttggcccacacaatactaggagttgcatggaatgagattacagggcagataaagtttctgattctagatccacattataccggtgctgaagacctgcaagttattttggaaaagggctggtgcggatggaagggcccagatttttggaacaaggatgcatactataacttatgtcttcctcagcgaccaaatatgatttaaaatatcttggagtcaaagactgcagtagagtggtattataaatttgtgaataaagaatcagtttaatttttcacattctctattactccatcttcttatccccctctctctttccctcttcctcttcctctatcttcactctcctccatatgctctttctttctcatccctctccatactctgctcccctctctcccatcttctcttactccccgcctcttgtttcccgcctctctcc

SEQ ID NO: 418188 - DNA, 2209 bp, Homo sapiens
cccgggccccgcccctgggccgtgcggtgacgccacttcagggccggcccgcggaacttttgggcaggtgtcagcgcccgtgtcaccgccacgtcgcggacatggtgatttcagaaagtatggatatactcttcagaataagaggaggccttgatttggcttttcagctagctactcctaatgaaatttttctcaagaaggcactgaaacatgtgttgagtgacctgtcaactaagctgtcttcaaacgcccttgtgttcagaatttgccacagttcagtgtatatatggcctagcagtgacataaacaccattcctggagaactgactgatgcttctgcttgtaagaacatactgcgctttattcaatttgagccagaagaagatataaaaagaaaattcatgagaaagaaggacaaaaagttatcagacatgcatcaaatagtaaatatagatcttatgctggaaatgtcaacctccctggcagctgtaacgcccatcattgaaagggaaagcggaggacaccattatgttaatatgactttacctgtcgatgcagttatatctgttgctccagaagaaacatggggaaaagttcgtaaactcctggttgatgcaattcataatcaactaactgacatggaaaaatgtattttgaaatatatgaaaggaacatctattgtggtccctgaaccactgcactttttattaccagggaaaaaaaatcttgtaacaatttcatatccttcaggaataccagatggccagctgcaggcctataggaaggagttacatgatcttttcaatctgcctcacgacagaccctatttcaaaaggtctaatgcttatcactttccagatgagccatacaaagatggttacattagaaatccacatacttaccttaatccacctaacatggagactggtatgatttatgtggtccagggcatatatggctatcatcattatatgcaggatcgcatagatgacaatggctggggctgtgcttatcgatctctgcagactatctgctcttggttcaaacatcagggatacacagagaggtccattccaacacacagagaaattcagcaggctctagtcgatgccggggacaaaccagcaacatttgtcggatcgcggcaatggattggatctattgaggtgcagctggtactaaaccaattgatcggtataacgtcaaaaatcctgtttgtcagccaaggttcagaaattgcctctcaaggacgggaactggctaatcatttccaaagtgaaggaactccagttatgatcgggggaggagttttggcccacacaatactaggagttgcatggaatgagattacagggcagataaagtttctgattctagatccacattataccggtgctgaagacctgcaagttattttggaaaagggctggtgcggatggaagggcccagatttttggaacaaggatgcatactataacttatgtcttcctcagcgaccaaatatgatttaaaatatcttggagtcaaagactgcagtagagtggtattataaatttgtgaataaagaatcagtttaatttttcacattaaatcctggttctagtttgacgatttaaattatgacctttttcaaaggttgtaaatactgcacggagaatgtattttttagacgttcctttaataacttaaaagacaaagcatacacaaccagcatattataggcatgtaaatacatgtgttcttaaatggatcttcacttggaagaaagtttttcatccttctcagaaggagattagacacaacatatggtaaagccaaaagcaggagcttatagatttgcatgaaatgaaggcgttcttcagacttcttcataacccacgtgacatcagcacttccttttcccactggtattttctacacttccgagactccgtttctgtctgagcacggcaacacaatcattcctgtcagggtgttcacttgcttttattgtctgcatacatttaattgttgtaagaaacttggcacagtctggaaatccacatgaccaagcgagatcttcagctgtttgcccgttcttattacataaactgaaaacaggataaaaacggagtgaaatgaaacattgaacttaagtctttttttttatatcttacaagggaattttgggctcatacaaatgttggttgcagaacagaagaggtaaagg

SEQ ID NO: 418189 - DNA, 2395 bp, Homo sapiens
cccgggccccgcccctgggccgtgcggtgacgccacttcagggccggcccgcggaacttttgggcaggtgtcagcgcccgtgtcaccgccacgtcgcggacatggtgatttcagaaagtatggatatactcttcagaataagaggaggccttgatttggcttttcagctagctactcctaatgaaatttttctcaagaaggcactgaaacatgtgttgagtgacctgtcaactaagctgtcttcaaacgcccttgtgttcagaatttgccacagttcagtgtatatatggcctagcagtgacataaacaccattcctggagaactgactgatgcttctgcttgtaagaacatactgcgctttattcaatttgagccagaagaagatataaaaagaaaattcatgagaaagaaggacaaaaagttatcagacatgcatcaaatagtaaatatagatcttatgctggaaatgtcaacctccctggcagctgtaacgcccatcattgaaagggaaagcggaggacaccattatgttaatatgactttacctgtcgatgcagttatatctgttgctccagaagaaacatggggaaaagttcgtaaactcctggttgatgcaattcataatcaactaactgacatggaaaaatgtattttgaaatatatgaaaggaacatctattgtggtccctgaaccactgcactttttattaccagggaaaaaaaatcttgagttacatgatcttttcaatctgcctcacgacagaccctatttcaaaaggtctaatgcttatcactttccagatgagccatacaaagatggttacattagaaatccacatacttaccttaatccacctaacatggagactggtatgatttatgtggtccagggcatatatggctatcatcattatatgcaggatcgcatagatgacaatggctggggctgtgcttatcgatctctgcagactatctgctcttggttcaaacatcagggatacacagagaggtccattccaacacacagagaaattcagcaggctctagtcgatgccggggacaaaccagcaacatttgtcggatcgcggcaatggattggatctattgaggtgcagctggtactaaaccaattgatcggtataacgtcaaaaatcctgtttgtcagccaaggttcagaaattgcctctcaaggacgggaactggctaatcatttccaaagtgaaggaactccagttatgatcgggggaggagttttggcccacacaatactaggagttgcatggaatgagattacagggcagataaagtttctgattctagatccacattataccggtgctgaagacctgcaagttattttggaaaagggctggtgcggatggaagggcccagatttttggaacaaggatgcatactataacttatgtcttcctcagcgaccaaatatgatttaaaatatcttggagtcaaagactgcagtagagtggtattataaatttgtgaataaagaatcagtttaatttttcacattaaatcctggttctagtttgacgatttaaattatgacctttttcaaaggttgtaaatactgcacggagaatgtattttttagacgttcctttaataacttaaaagacaaagcatacacaaccagcatattataggcatgtaaatacatgtgttcttaaatggatcttcacttggaagaaagtttttcatccttctcagaaggagattagacacaacatatggtaaagccaaaagcaggagcttatagatttgcatgaaatgaaggcgttcttcagacttcttcataacccacgtgacatctgtttttaaaaacacgttaacattaaaaacttttttttaaaaagagttttatccccaaacttccaccatgcagtcccatttttggtctctagactctggtaaatataaccagtactaaaatgttaatgagaatgaaacaatactactagaaatacgagtgtcagtattaaatggaataataaatgctatgcaaacaagagatcactgcgggaggaaaaaagcagcagctctgagttacttaccagcacttccttttcccactggtattttctacacttccgagactccgtttctgtctgagcacggcaacacaatcattcctgtcagggtgttcacttgcttttattgtctgcatacatttaattgttgtaagaaacttggcacagtctggaaatccacatgaccaagcgagatcttcagctgtttgcccgttcttattacataaactgaaaacaggataaaaacggagtgaaatgaaacattgaacttaagtctttttttttatatcttacaagggaattttgggctcatacaaatgttggttgcagaacagaagaggtaaagg

SEQ ID NO: 418190 - DNA, 2071 bp, Homo sapiens
acgccttagacgaggaaacagctgtgaccgatggtcacaaagttatagacatgcatcaaatagtaaatatagatcttatgctggaaatgtcaacctccctggcagctgtaacgcccatcattgaaagggaaagcggaggacaccattatgttaatatgactttacctgtcgatgcagttatatctgttgctccagaagaaacatggggaaaagttcgtaaactcctggttgatgcaattcataatcaactaactgacatggaaaaatgtattttgaaatatatgaaaggaacatctattgtggtccctgaaccactgcactttttattaccagggaaaaaaaatcttgtaacaatttcatatccttcaggaataccagatggccagctgcaggcctataggaaggagttacatgatcttttcaatctgcctcacgacagaccctatttcaaaaggtctaatgcttatcactttccagatgagccatacaaagatggttacattagaaatccacatacttaccttaatccacctaacatggagactggtatgatttatgtggtccagggcatatatggctatcatcattatatgcaggatcgcatagatgacaatggctggggctgtgcttatcgatctctgcagactatctgctcttggttcaaacatcagggatacacagagaggtccattccaacacacagagaaattcagcaggctctagtcgatgccggggacaaaccagcaacatttgtcggatcgcggcaatggattggatctattgaggtgcagctggtactaaaccaattgatcggtataacgtcaaaaatcctgtttgtcagccaaggttcagaaattgcctctcaaggacgggaactggctaatcatttccaaagtgaaggaactccagttatgatcgggggaggagttttggcccacacaatactaggagttgcatggaatgagattacagggcagataaagtttctgattctagatccacattataccggtgctgaagacctgcaagttattttggaaaagggctggtgcggatggaagggcccagatttttggaacaaggatgcatactataacttatgtcttcctcagcgaccaaatatgatttaaaatatcttggagtcaaagactgcagtagagtggtattataaatttgtgaataaagaatcagtttaatttttcacattaaatcctggttctagtttgacgatttaaattatgacctttttcaaaggttgtaaatactgcacggagaatgtattttttagacgttcctttaataacttaaaagacaaagcatacacaaccagcatattataggcatgtaaatacatgtgttcttaaatggatcttcacttggaagaaagtttttcatccttctcagaaggagattagacacaacatatggtaaagccaaaagcaggagcttatagatttgcatgaaatgaaggcgttcttcagacttcttcataacccacgtgacatctgtttttaaaaacacgttaacattaaaaacttttttttaaaaagagttttatccccaaacttccaccatgcagtcccatttttggtctctagactctggtaaatataaccagtactaaaatgttaatgagaatgaaacaatactactagaaatacgagtgtcagtattaaatggaataataaatgctatgcaaacaagagatcactgcgggaggaaaaaagcagcagctctgagttacttaccagcacttccttttcccactggtattttctacacttccgagactccgtttctgtctgagcacggcaacacaatcattcctgtcagggtgttcacttgcttttattgtctgcatacatttaattgttgtaagaaacttggcacagtctggaaatccacatgaccaagcgagatcttcagctgtttgcccgttcttattacataaactgaaaacaggataaaaacggagtgaaatgaaacattgaacttaagtctttttttttatatcttacaagggaattttgggctcatacaaatgttggttgcagaacagaagaggtaaagg

SEQ ID NO: 418191 - DNA, 1691 bp, Homo sapiens
cccgggccccgcccctgggccgtgcggtgacgccacttcagggccggcccgcggaacttttgggcaggtgtcagcgcccgtgtcaccgccacgtcgcggacatggtgatttcagaaagtatggatatactcttcagaataagaggaggccttgatttggcttttcagctagctactcctaatgaaatttttctcaagaaggcactgaaacatgtgttgagtgacctgtcaactaagctgtcttcaaacgcccttgtgttcagaatttgccacagttcagtgtatatatggcctagcagtgacataaacaccattcctggagaactgactgatgcttctgcttgtaagaacatactgcgctttattcaatttgagccagaagaagatataaaaagaaaattcatgagaaagaaggacaaaaagttatcagacatgcatcaaatagtaaatatagatcttatgctggaaatgtcaacctccctggcagctgtaacgcccatcattgaaagggaaagcggaggacaccattatgttaatatgactttacctgtcgatgcagttatatctgttgctccagaagaaacatggggaaaagttcgtaaactcctggttgatgcaattcataatcaactaactgacatggaaaaatgtattttgaaatatatgaaaggaacatctattgtggtccctgaaccactgcactttttattaccagggaaaaaaaatcttgtaacaatttcatatccttcaggaataccagatggccagctgcaggcctataggaaggagttacatgatcttttcaatctgcctcacgacagaccctatttcaaaaggtctaatgcttatcactttccagatgagccatacaaagatggttacattagaaatccacatacttaccttaatccacctaacatggagactggtatgatttatgtggtccagggcatatatggctatcatcattatatgcaggatcgcatagatgacaatggctggggctgtgcttatcgatctctgcagactatctgctcttggttcaaacatcagggatacacagagaggtccattccaacacacagagaaattcagcaggctctagtcgatgccggggacaaaccagcaacatttgtcggatcgcggcaatggattggatctattgaggtgcagctggtactaaaccaattgatcggtataacgtcaaaaatcctgtttgtcagtaacacccgaaaaaacaagaaagtaggaaacattgtctcctagctcattatttgaccgtagtgttggaagtagttcatctgatagaaaatggtttctttctagccaaggttcagaaattgcctctcaaggacgggaactggctaatcatttccaaagtgaaggaactccagttatgatcgggggaggagttttggcccacacaatactaggagttgcatggaatgagattacagggcagataaagtttctgattctagatccacattataccggtgctgaagacctgcaagttattttggaaaagggctggtgcggatggaagggcccagatttttggaacaaggatgcatactataacttatgtcttcctcagcgaccaaatatgatttaaaatatcttggagtcaaagactgcagtagagtggtattataaatttgtgaataaagaatcagtttaatttttcacatt

SEQ ID NO: 418192 - DNA, 1862 bp, Homo sapiens
cccgggccccgcccctgggccgtgcggtgacgccacttcagggccggcccgcggaacttttgggcaggtgtcagcgcccgtgtcaccgccacgtcgcggacatggtgatttcagaaagtatggatatactcttcagaataagaggaggccttgatttggcttttcagctagctactcctaatgaaatttttctcaagaaggcactgaaacatgtgttgagtgacctgtcaactaagctgtcttcaaacgcccttgtgttcagaatttgccacagttcagtgtatatatggcctagcagtgacataaacaccattcctggagaactgactgatgcttctgcttgtaagaacatactgcgctttattcaatttgagccagaagaagatataaaaagaaaattcatgagaaagaaggacaaaaagttatcagacatgcatcaaatagtaaatatagatcttatgctggaaatgtcaacctccctggcagctgtaacgcccatcattgaaagggaaagcggaggacaccattatgttaatatgactttacctgtcgatgcagttatatctgttgctccagaagaaacatggggaaaagttcgtaaactcctggttgatgcaattcataatcaactaactgacatggaaaaatgtattttgaaatatatgaaaggaacatctattgtggtccctgaaccactgcactttttattaccagggaaaaaaaatcttgtaacaatttcatatccttcaggaataccagatggccagctgcaggcctataggaaggagttacatgatcttttcaatctgcctcacgacagaccctatttcaaaaggtctaatgcttatcactttccagatgagccatacaaagatggttacattagaaatccacatacttaccttaatccacctaacatggagactggtatgatttatgtggtccagggcatatatggctatcatcattatatgcaggatcgcatagatgacaatggctggggctgtgcttatcgatctctgcagactatctgctcttggttcaaacatcagggatacacagagaggtccattccaacacacagagaaattcagcaggctctagtcgatgccggggacaaaccagcaacatttgtcggatcgcggcaatggattggatctattgaggtgcagctggtactaaaccaattgatcggtataacgtcaaaaatcctgtttgtcagtaacacccgaaaaaacaagaaagtaggaaacattgtctcctagctcattatttgaccgtagtgttggaagtagttcatctgatagaaaatggtttctttctagccaaggttcagaaattgcctctcaaggacgggaactggctaatcatttccaaagtgaaggaactccagttatgatcggtaagctgtttcagacactgtttttggtagagtgagtaatatgcaaaacttatcattgatataaatatttaatgttgcataaaatcagtcatttaaaaaattttgaaattaacttttacaccatatgtatggatctctggatattgaaaaaaatttctaaggtggcttaaaggttacaaaaaagattataataaccagaagaagtaaaggctgagaaatggtagctatgttcaaacatttaaagagctgagaacagtattaaaaagaggaaacggtcactcagctgagcttcgtaagtcatgactctgtcataactgggctggctttgtgagattttgcaattacttacctctgtggattttatttgtaaaataagaagattggattagctgatctaaagatgcttaattctttgaagaacaagacctgtcctgtgatgacagaaggcaaggtgagacta

SEQ ID NO: 418193 - DNA, 1319 bp, Homo sapiens
tcgtgcgcatgcgcggcaggcccttcgggacgagctggaggcagagcgtgagtacaaagtgatcggcctcggccgcacgtagtagcccccctactccccggccaagtcagggcctccctcttcccgcggagtcgcaaccacgggtagctcgtgtaggtaacggcaggtccaggcctccgcatgagcggagggccccccgcgcgaccttgaatggcccgggcgcgcgcggtcgtgtgggagttgtagtcctccgtccccgtccgcgcggactccgtttcccgtggtgccccgggcggcccgcttccggcgcagttagttacgagtcggcgcacgcggcctcggtccggttgactttgcggagccatggagggcggcttcggctccgatttcgggggctccggcagcgggaagctggacccagggctcataatggagcaggtgaaagtgcagatcgccgtggccaacgcgcaggagctgctgcagaggatgacggacaagtgtttccggaagtgtatagggaaacctgggggctccctggacaactccgagcagaagtgcatcgccatgtgcatggaccgctacatggacgcctggaacaccgtgtctcgcgcctacaactcgcggctgcagcgggaacgagccaacatgtgaccggcgagcgcgggccaccccaccctgttcatttccataaacgtgctttgagaggcggggtccgcatgtacgtactgcctgcccggggcttaggagggtggcaccggtgctgggacacacgggactgtgtcctcgccaccccccgccctgccccctgccagccagtgcagcttggatctcgggggtgtggggccctgtgccttcctgaagtgctggcagcccagtggcacctccttcaggcctttggggtattcccctagtgtgcccaagtcagcctcatattctgggcggacagcttgtctggacttcggagttgggggtggtcagacaccacaggagctgtcacctcctgcggatgggcaaataaattggtggaggacgggaacaaacacaacacacaccaaacaaacaaaaaacataaaacagcaccaaaaaacaaaccccgaggaaacaaaaaaagcacacacacaaagaaaaacagggccacaaaagaaccaaaagaaaagaaacgaggcacccactacaacacgcccaagggcacacgcaccaggacacaactaagaaaccaaaacggagcggaccagggccacctcacgcaccacgccacgaggcacaacagcacccccccgcacacacagagtggacgagacacggacaaacacaacaca

SEQ ID NO: 418194 - DNA, 707 bp, Homo sapiens
tcgtgcgcatgcgcggcaggcccttcgggacgagctggaggcagagcgtgagtacaaagtgatcggcctcggccgcacgtagtagcccccctactccccggccaagtcagggcctccctcttcccgcggagtcgcaaccacgggtagctcgtgtaggtaacggcaggtccaggcctccgcatgagcggagggccccccgcgcgaccttgaatggcccgggcgcgcgcggtcgtgtgggagttgtagtcctccgtccccgtccgcgcggactccgtttcccgtggtgccccgggcggcccgcttccggcgcagttagttacgagtcggcgcacgcggcctcggtccggttgactttgcggagccatggagggcggcttcggctccgatttcgggggctccggcagcgggaagctggacccagggctcataatggagcaggtgaaagtgcagatcgccgtggccaacgcgcaggagctgctgcagaggatgacggacaagtgtttccggaagtgtatagggaaacctgggggctccctggacaactccgagcagaagtgcatcgccatgtgcatggaccgctacatggacgcctggaacaccgtgtctcgcgcctacaactcgcggctgcagcgggaacgagccaacatgtgaccggcgagcgcgggccaccccaccctgttcatttccataaacgtgctttgagaggc

SEQ ID NO: 418195 - DNA, 659 bp, Homo sapiens
tcgtgcgcatgcgcggcaggcccttcgggacgagctggaggcagagcgtgagtacaaagtgatcggcctcggccgcacgtagtagcccccctactccccggccaagtcagggcctccctcttcccgcggagtcgcaaccacgggtagctcgtgtaggtaacggcaggtccaggcctccgcatgagcggagggccccccgcgcgaccttgaatggcccgggcgcgcgcggtcgtgtgggagttgtagtcctccgtccccgtccgcgcggactccgtttcccgtggtgccccgggcggcccgcttccggcgcagttagttacgagtcggcgcacgcggcctcggtccggttgactttgcggagccatggagggcggcttcggctccgatttcgggggctccggcagcgggaagctggacccagggctcataatggagcaggtgaaagtgcagatcgccgtggccaacgcgcaggagctgctgcagaggatgacggaaaaaaaaaaaaaaaaaaaaaaaaaaaaaaaaaaaaaaaaaaaaaaaaaaaaaaaaaaaaaaccccccccctctcttttttttgggcaaaaaaaaaattttaaaaccccccctttttatattttttttctccaaccccaccttttctttttcaccggggaaatatt

SEQ ID NO: 418196 - DNA, 736 bp, Homo sapiens
gcccaagtcagcctcatattctgggcacactaggggaataccccaaaggcctgaaggaggtgccactggggtattcccctagtgtgcccaagtcagcctcatattctgggcggacagcttgtctggacttcggagttgggggtggtcagacaccacaggagctgtcacctcctgcggatgggcaaataaattggtggaggacggaaaaaaaaaaaaaaaaaaaaacaaaaaaaaaaaaaaaaaaaaaacatgcagcacaaatcccctatccacagctggcgtaataaacaaagaggacagcaaaagatcgcccttcccacccctggggtttttttttttttttttaaaaaatttcccatttttttaaaatttggccccaaaaaaaaggggccattgttttaaaaaatttttttttttttaaaaagggggtggtttttcccccccccgaaaaaaaaaacaagaagaaaaagtttgggacccgaattttttcttttttattcaaggggggcgctggagactttaaaaaggtggttttaaaacccaggagaacttttttttagaaaaatagtttttttacccttctggcaaaagagggcttttttttgggggctggtggggtttttttctaaaagtgggaaataacccaaaacacgttttaggtgtttttttgtgccccggccttgggttcaaaacccaaaaaaaggaagttttttttttggttttcttcttttttcta

SEQ ID NO: 418197 - DNA, 381 bp, Homo sapiens
  misc_feature (17)..(17): n is a, c, g, or t
  misc_feature (38)..(38): n is a, c, g, or t
  misc_feature (50)..(50): n is a, c, g, or t
tgattaccgagattatntgcaccaagcatctgcacgtngtcagaggctcntgcaggcagggtccccagcgtcaccctgttggggagagaagaaagggggttcagaggccggtacctcccctacagcagcccttgggtcattggcccctctaggagtgaccctagtgacttcccctgggagccgcattttcactatctggaaaatgggctcaatgcaaaggtggcagacatttatggacacccgccacgtggtcccggagtggaacggtgcctcccactgcagcctctgcctgctctgccgccgaggcccggggatgggatgcggtgggttgcccaataaacggctgtggagtggaaattcctccagagccaaaaaggcaaa

SEQ ID NO: 418198 - DNA, 1565 bp, Homo sapiens
tcgtgcgcatgcgcggcaggcccttcgggacgagctggaggcagagcgtgagtacaaagtgatcggcctcggccgcacgtagtagcccccctactccccggccaagtcagggcctccctcttcccgcggagtcgcaaccacgggtagctcgtgtaggtaacggcaggtccaggcctccgcatgagcggagggccccccgcgcgaccttgaatggcccgggcgcgcgcggtcgtgtgggagttgtagtcctccgtccccgtccgcgcggactccgtttcccgtggtgccccgggcggcccgcttccggcgcagttagttacgagtcggcgcacgcggcctcggtccggttgactttgcggagccatggagggcggcttcggctccgatttcgggggctccggcagcgggaagctggacccagggctcataatggagcaggtgaaagtgcagatcgccgtggccaacgcgcaggagctgctgcagaggatgacggacaagtgtttccggaagtgtatagggaaacctgggggctccctggacaactccgagcagaagtgcatcgccatgtgcatggaccgctacatggacgcctggaacaccgtgtctcgcgcctacaactcgcggctgcagcgggaacgagccaacatgtgaccggcgagcgcgggccaccccaccctgttcatttccataaacgtgctttgagaggcggggtccgcatgtacgtactgcctgcccggggcttaggagggtggcaccggtgctgggacacacgggactgtgtcctcgccaccccccgccctgccccctgccagccagtgcagcttggatctcgggggtgtggggccctgtgccttcctgaagtgctggcagcccagtggcacctccttcaggcctttggggtattcccctagtgtgcccaagtcagcctcatattctgggcggacagcttgtctggacttcggagttgggggtggtcagacaccacaggagctgtcacctcctgcggatgggcaaataaattggtggaggacggaaaaaaaaaaaaaaaaaaaaacaaaaaaaaaaaaaaaaaaaaaacatgcagcacaaatcccctatccacagctggcgtaataaacaaagaggacagcaaaagatcgcccttcccacccctggggtttttttttttttttttaaaaaatttcccatttttttaaaatttggccccaaaaaaaaggggccattgttttaaaaaatttttttttttttaaaaagggggtggtttttcccccccccgaaaaaaaaaacaagaagaaaaagtttgggacccgaattttttcttttttattcaaggggggcgctggagactttaaaaaggtggttttaaaacccaggagaacttttttttagaaaaatagtttttttacccttctggcaaaagagggcttttttttgggggctggtggggtttttttctaaaagtgggaaataacccaaaacacgttttaggtgtttttttgtgccccggccttgggttcaaaacccaaaaaaaggaagttttttttttggttttcttcttttttcta

SEQ ID NO: 418199 - DNA, 1978 bp, Homo sapiens
tcgtgcgcatgcgcggcaggcccttcgggacgagctggaggcagagcgtgagtacaaagtgatcggcctcggccgcacgtagtagcccccctactccccggccaagtcagggcctccctcttcccgcggagtcgcaaccacgggtagctcgtgtaggtaacggcaggtccaggcctccgcatgagcggagggccccccgcgcgaccttgaatggcccgggcgcgcgcggtcgtgtgggagttgtagtcctccgtccccgtccgcgcggactccgtttcccgtggtgccccgggcggcccgcttccggcgcagttagttacgagtcggcgcacgcggcctcggtccggttgactttgcggagccatggagggcggcttcggctccgatttcgggggctccggcagcgggaagctggacccagggctcataatggagcaggtgaaagtgcagatcgccgtggccaacgcgcaggagctgctgcagaggatgacggacaagtgtttccggaagtgtatagggaaacctgggggctccctggacaactccgagcagaagtgcatcgccatgtgcatggaccgctacatggacgcctggaacaccgtgtctcgcgcctacaactcgcggctgcagcgggaacgagccaacatgtgaccggcgagcgcgggccaccccaccctgttcatttccataaacgtgctttgagaggcggggtccgcatgtacgtactgcctgcccggggcttaggagggtggcaccggtgctgggacacacgggactgtgtcctcgccaccccccgccctgccccctgccagccagtgcagcttggatctcgggggtgtggggccctgtgccttcctgaagtgctggcagcccagtggcacctccttcaggcctttggggtattcccctagtgtgcccaagtcagcctcatattctgggcggacagcttgtctggacttcggagttgggggtggtcagacaccacaggagctgtcacctcctgcggatgggcaaataaattggtggaggacggagagaaacctctttatttccctcctgaggggtctctgggaagaggtgacgcgtgtccctggaaccccagctcggagggtctcagcctcccctgggttgggagaagtccatctttccccttagtgccaccgggctgctgagtcacgaggaatgtgttgctgctgccacccctgccccaaaggctaagggggacagccttccccttgtcagggcttgctttgaccctgcttcgttccaccccgggtcctggtggagcaccaggcaggtggtcctcgctgtgacactgaggtgctgagccagtgagctagggtggaggggctgtgtttattggaacaaagggtggtaccaaaatgcatccccatgacccacagcccccccacacccgtccttgggtagggtacggtggggtggggtgttgggtggcctgctgctcctgttgctttcacgtagagtctcggcctgggcagtcacgtggtggtcactcctggatgtgctgtcctatccagcctctcacagctgccacccgggtatagacacctgggaagtggggccggccacagccatagccccagctagtgaccccagttagcacccaccgtccagagggctccctgcaggccaggggtcccccagcgtcaccctgttggggagagaagaaagggggttcagaggccggtacctcccctacagcagcccttgggtcattggcccctctaggagtgaccctagtgacttcccctgggagccgcattttcactatctggaaaatgggctcaatgcaaaggtggcagacatttatggacacccgccacgtggtcccggagtggaacggtgcctcccactgcagcctctgcctgctctgccgccgaggcccggggatgggatgcggtgggttgcccaataaacggctgtggagtggaaattcctccagagccaaaaaggcaaa

SEQ ID NO: 418200 - DNA, 1033 bp, Homo sapiens
tcgtgcgcatgcgcggcaggcccttcgggacgagctggaggcagagcgtgagtacaaagtgatcggcctcggccgcacgtagtagcccccctactccccggccaagtcagggcctccctcttcccgcggagtcgcaaccacgggtagctcgtgtaggtaacggcaggtccaggcctccgcatgagcggagggccccccgcgcgaccttgaatggcccgggcgcgcgcggtcgtgtgggagttgtagtcctccgtccccgtccgcgcggactccgtttcccgtggtgccccgggcggcccgcttccggcgcagttagttacgagtcggcgcacgcggcctcggtccggttgactttgcggagccatggagggcggcttcggctccgatttcgggggctccggcagcgggaagctggacccagggctcataatggagcaggtgaaagtgcagatcgccgtggccaacgcgcaggagctgctgcagaggatgacggacaagtgtttccggaagtgtatagggaaacctgggggctccctggacaactccgagcagaagtgcatcgccatgtgcatggaccgctacatggacgcctggaacaccgtgtctcgcgcctacaactcgcggctgcagcgggaacgagccaacatgtgaccggcgagcgcgggccaccccaccctgttcatttccataaacgtgctttgagaggcggggtccgcatgtacgtactgcctgcccggggcttaggagggtggcaccggtgctgggacacacgggactgtgtcctcgccaccccccgccctgccccctgccagccagtgcagcttggatctcgggggtgtggggccctgtgccttcctgaagtgctggcagcccagtggcacctccttcaggcctttggggtattcccctagtgtgcccaagtcagcctcatattctgggcggacagcttgtctggacttcggagttgggggtggtcagacaccacaggagctgtcacctcctgcggatgggcaaataaattggtggaggacgg

SEQ ID NO: 418201 - DNA, 6129 bp, Homo sapiens
gagggcataattttttctcaattcatatttgcaaattgtttattgagagtcagtgttgtatagagggataaacatagatttggagatacagtcacttgccaagttgcaccgcagattcctctggtataaaatgaaaataatgtgactctacaggattgaataataattaactgaagtagtatatatagtacccatcacagaataggtttgtaacaaatgttaggtttgtaaaaatgttttgtcctgtcataattttaaaataggtaaattggacattttctgtttttctttataacataaatccgatattcacatgcagtttttttccaacttttattttaagttcatgggtgcatgtgcagatgtgaaggttcgttatataagtaaatgtgtgccatggtggttttgctgcacagatcatcccatcacctaggtattaagcccagcgttcattagcaattcttcctgacagctgcagttttgattatgtgcagctctcaattggcttttccccgtttaagatgttagaccagtggttctcagccttgactaattagaatcatgtgaggagcttttagaactcccattgctcaggccaaccctccaatcaattaaattaccatctctgggacttacacatttgtgttttgttttctcttttttgactccctaagtgatttttatatggagccaagattgaaaacagtgttagacacacactttcccaatttatgctttgaaaacaaagaccttagttcagagacttatgagatagggttatgattaggggaagagtaggccccacaagtttcagggtagtgaagattctgaagggtacaagcgataaaggagcctgagtttctgggtgaactcagaaacaaggaatcctagaagggctgagagcagaacagaacctcggaatagtctctgaaataaaagagtggagagtataagaaacagaatggaggcaggccccaggaggattcaatcaggaattctgaccttggggccataaataggtttcatatcttcacagaaagggtttacacaacttttgtatatcattttctgagatgtctgaatcctagaaaaagataaagaacatcagtatgtgaaaaagccaagggctaaggtaatggtaatcagactacagttctagaaatgcctctggatctttaatacatgactggcagctcttctaaacctctatgttacctctattagaatattatttctgatgtagtttgtggagaaacaaagcaggaatggaggagaacactgtatacagtatactttataagcactaaataaatatgtaaaaactctgaaatataatctgagtttatagtcataatgaagattattagctcaataatctagggtagaggtgtccaatctttcggcttccatgggccacgttggaagaagaattaccttgggccacacataaaatacactaacactaacaataactgatgagttaaaaaaaatcacataaaaatctcataatgttttaagaacatttgtgaatttgtgttgagtcacattcaaagacaccttgggccacatgtggcctgtgggctgcaagttggacaagcttgatctagggcaagtgctcaacagtggctgcacagttaaatcgtgtgtaaagctttcaaaaagtaagggtgcctaattccactcctagagattctgatttaattggtctgacatggagttgtaacatcaatatttttgaatttttccatatgattctaatgtgtaaccagcattgagaaccactaatccagaggaaaccaggactcctgcttatcttgcacaacttgggtaccctcaaaatatatggtattggcaaagttaatctgagcctaagttccagcacctgtaaaagatggtacgaatttcctaaaagaggttgttgtgaatatgtactctcctgggtttagtccttagctttgcaagaagtccaaaatcttcaagatgatcagcctcaaatcagggactcactaaccgcaaacaaacttgaaagtggctgataactaactggaaagatattactttaatatgtttctcacaaagcctgtgataatcatttgccatatttgtgatcatagaaatttcttgtccctgccctagaaacattgaatcatgttctccaggggagagcctgggaatctatatttttaactgacaccccagttgatttttatcaaagaagtctgggaaacattgtactttaagttattgtattgtcattctggtattgatttatggtaagaggagatacatatttccatttcctagtttttcttgatgtctgtcatccagggtatccttttcttggtatcaaagaatatgaaaaaccaattataatcagaaagtgacttagtatgcatgaaattagagcatagaaaaggatagttttgagggaacatttcattcatattttgacataacctgctgagttttcctgggcccgcaatagccagtagtgtgcagcctcattttcttcagagtcagcatctttctttccccttgcaagcagtctcctgtttctatgaatagtctttgctcagacaaggccaatatacttggtaataattaatttagcttctttgaaatgattaggtcactttttggtttaaaagattaccatggttgtccccaaaatctttgcatgtaccaatttatttcctcctccctagggtcagaatgattttatatttggcttatgaaatgtattaatttgcttcttctggtcaaagataagtggaaggatgatgagatttttaaaaaattaatgtatcccttgcttctaattctacctacaaagtggaatagtgtgctagttactatatagttcccagtgtatagcttttgactcttttgaagtggtaactagtagttttgttttagaattttgctttcagcttttatcctgagagtggggctcactgaacctctctcctttctaaaatctgtggaaattacttttggtaactaaggcactgcagtgatctcaggtaagagagtaaaaaatttgcctttatttgtttttaatgttttgggacgtttcaggttttggttgggtggaaacagagttggggcaaacaaaaagaggctggttaagagattcagaggcaaaggttggttggccatgctaaatttcaggtgcctgttgcacctccatgtagcaacagtaagtagacagatagcagattcttagggaagaagttaagctagagaagcagtgtggtgtggtgtaaagaattctgggcattcaattaagaggtgtgggctctgagaggctaacactactactaacttgctctgtgactttgaccaagtcatttgacctctctgggccccatctttattggaaaatgtcaagtagatggtctctaataaatttttgtccagttctaacattatgtgattctaaatgtatttatactgaccttcttaacttgaactctttgttttttcagcatttagtatgagaacctatgtttgccatatttgtagtattgcttttacatctttagatatgttccggtcccacatgcaaggaagtgaacatcaaattaaagaatccattgttatcaatctagtgaagaattcaaggaagacacaagactcttaccaaaatgagtgtgcagattacatcaatgtgcagaaagccagaggactagaggccaagacttgtttcagaaagatggaagagagttctttggaaacccgtagatacagagaagtggtcgattccagacccagacatagaatgtttgaacaaagactcccatttgagactttccggacatacgcagcaccatacaatatttcacaagcaatggaaaagcagttacctcattcaaagaagacatatgactctttccaagatgaacttgaagattacatcaaagtacagaaagccagaggactagatccaaagacttgtttcagaaagatgagagagaactctgtggatactcatgggtacagagaaatggttgattctggacccagatcaagaatgtgtgagcaaagattttcacatgaggcttcccagacctaccaacgaccataccatatttcaccagtggaaagccagttacctcagtggctaccaacccattcaaagaggacatatgattctttccaagatgaacttgaagattacataaaagtgcagaaagccagaggactagagccaaaaacttgtttcagaaagataggagatagctctgtagaaacacacaggaacagagaaatggttgatgtcagacccagacatagaatgttggagcaaaagctcccatgtgagactttccagacctattcaggaccatatagtatttcacaagtagtggaaaaccagttacctcattgcttaccagctcatgatagcaaacagagactagattctattagctactgtcaactcaccagagactgtttcccagaaaaaccagtacccttgagccttaatcagcaagaaaataactctggctcatacagtgtagaatctgaagtttacaagcacctctcttcagaaaacaatactgctgaccatcaagcaggtcataaacggaaacatcagaagagaaaacgacacctagaagaaggcaaagaaaggccagagaaagagcagtccaagcataaaaggaaaaagagttatgaagatacagatttagacaaagacaagagcatcagacaaaggaaaagagaggaggatagagtcaaggtcagttcaggaaagcttaagcatcgaaaaaagaaaaaaagccatgatgtaccctccgagaaagaagaacgtaagcacaggaaagagaaaaagaaatctgttgaagaaaggacagaagaggaaatgctttgggatgagtctattcttggattttgaatgtttagttttgtttacccaaggttgaattgaaaaaaaaaaacagtcaatatggatttagaaaaaggaacacctgatgaagaaaaggagaggtagatacagtcagtgtcacttcaggacacttaggttttttttgtataaaaatttaaattgaattaaaagaaggaaaaaaaaagcccaaacttaacctctgagaaaagaacataagaactcaaggagaacataagagaaaaggaaacctgttacagaaaagacaagaatctgtgttttggaatgagtctattcttgggtattgaacttttagttttgtttgcccaaggattaattgaggaaatcagctaagaaaatggactttagacaaaagcaagaggatcagatgaagaaaaggagaggtagatacagtcagtgtcacttcaggaaagctatttaaaaaaacttgaaatttaattgaaagaagaaacaacaacaaaaaagcctaaacctagcctctgaacaacactaacatgagaacacaagaacttaagagaaaaagaaacctactcaagaaaagacagaagagacagtgatttgggatgagtctactctaggattttcaactttttagttttgttccttcaaagttgaaggaaaaaaagtttggttttataaaattcatgttattgtaatttttctaggtggatggctactttaatctctaaaaaagccaagtgaagtaaaagtattcagtatgccttttcctcaagttactttccttcattttcttaaaaaagaaaaaaaattattaaatgtttctcacatatctcacatataatgtaatttccctaaatgaagttgtctctacttctgctcatcaaattgctgtgatagtgaattatttattcatgggagataatttattttaaaggacagaattaccaagcgttacaaaatcagttctttccttggttttgtgttagtgttggtggtattttattgttgtttttctgtgtttatgtgtctcagctttctccaaggaatatgtatgaaataacttaaactgattttttctttgttaaatctaatttgcagtgtatttttgcattttctagttctgaaagtggaaaatgaaacagtctataataaacttagatgatatatagttttaaaacggtctcaaaaagtactgatataaggtcagtctatattctggaaatgtttatattaaagtgttttaatttctaaatattgtt

SEQ ID NO: 418202 - DNA, 3200 bp, Homo sapiens
cggggagggggggcagtagttttaaagtagacacccgcccttgcctcagagaagatggagtcttgctctgtcaccaggctggagtgcagtggcgcaatctcggctcactgcagcctccacctcccgggttcaagcgattcccctgcctcagcctcccaaatagctgggactacagacgccatttggaatgaacaggaaaaggctgaactttttacagataagttttgtcaagtatgtggagtgatgctacagtttgaatcacaaagaatttcacattatgagggtgaaaaacatgctcaaaatgttagtttttattttcaaatgcatggggaacaaaatgaagtgcctggtaagaaaatgaagatgcatgttgagaattttcaggtgcataggtatgaaggagtggacaaaaacaaattttgtgatctctgcaacatgatgtttagctctccacttattgctcagtctcactatgtgggaaaggtccatgctaaaaaactgaagcaattaatggaggaacatgatcaggcatctccatcaggatttcaaccagagatggcatttagtatgagaacctatgtttgccatatttgtagtattgcttttacatctttagatatgttccggtcccacatgcaaggaagtgaacatcaaattaaagaatccattgttatcaatctagtgaagaattcaaggaagacacaagactcttaccaaaatgagtgtgcagattacatcaatgtgcagaaagccagaggactagaggccaagacttgtttcagaaagatggaagagagttctttggaaacccgtagatacagagaagtggtcgattccagacccagacatagaatgtttgaacaaagactcccatttgagactttccggacatacgcagcaccatacaatatttcacaagcaatggaaaagcagttacctcattcaaagaagacatatgactctttccaagatgaacttgaagattacatcaaagtacagaaagccagaggactagatccaaagacttgtttcagaaagatgagagagaactctgtggatactcatgggtacagagaaatggttgattctggacccagatcaagaatgtgtgagcaaagattttcacatgaggcttcccagacctaccaacgaccataccatatttcaccagtggaaagccagttacctcagtggctaccaacccattcaaagaggacatatgattctttccaagatgaacttgaagattacataaaagtgcagaaagccagaggactagagccaaaaacttgtttcagaaagataggagatagctctgtagaaacacacaggaacagagaaatggttgatgtcagacccagacatagaatgttggagcaaaagctcccatgtgagactttccagacctattcaggaccatatagtatttcacaagtagtggaaaaccagttacctcattgcttaccagctcatgatagcaaacagagactagattctattagctactgtcaactcaccagagactgtttcccagaaaaaccagtacccttgagccttaatcagcaagaaaataactctggctcatacagtgtagaatctgaagtttacaagcacctctcttcagaaaacaatactgctgaccatcaagcaggtcataaacggaaacatcagaagagaaaacgacacctagaagaaggcaaagaaaggccagagaaagagcagtccaagcataaaaggaaaaagagttatgaagatacagatttagacaaagacaagagcatcagacaaaggaaaagagaggaggatagagtcaaggtcagttcaggaaagcttaagcatcgaaaaaagaaaaaaagccatgatgtaccctccgagaaagaagaacgtaagcacaggaaagagaaaaagaaatctgttgaagaaaggacagaagaggaaatgctttgggatgagtctattcttggattttgaatgtttagttttgtttacccaaggttgaattgaaaaaaaaaaacagtcaatatggatttagaaaaaggaacacctgatgaagaaaaggagaggtagatacagtcagtgtcacttcaggacacttaggttttttttgtataaaaatttaaattgaattaaaagaaggaaaaaaaaagcccaaacttaacctctgagaaaagaacataagaactcaaggagaacataagagaaaaggaaacctgttacagaaaagacaagaatctgtgttttggaatgagtctattcttgggtattgaacttttagttttgtttgcccaaggattaattgaggaaatcagctaagaaaatggactttagacaaaagcaagaggatcagatgaagaaaaggagaggtagatacagtcagtgtcacttcaggaaagctatttaaaaaaacttgaaatttaattgaaagaagaaacaacaacaaaaaagcctaaacctagcctctgaacaacactaacatgagaacacaagaacttaagagaaaaagaaacctactcaagaaaagacagaagagacagtgatttgggatgagtctactctaggattttcaactttttagttttgttccttcaaagttgaaggaaaaaaagtttggttttataaaattcatgttattgtaatttttctaggtggatggctactttaatctctaaaaaagccaagtgaagtaaaagtattcagtatgccttttcctcaagttactttccttcattttcttaaaaaagaaaaaaaattattaaatgtttctcacatatctcacatataatgtaatttccctaaatgaagttgtctctacttctgctcatcaaattgctgtgatagtgaattatttattcatgggagataatttattttaaaggacagaattaccaagcgttacaaaatcagttctttccttggttttgtgttagtgttggtggtattttattgttgtttttctgtgtttatgtgtctcagctttctccaaggaatatgtatgaaataacttaaactgattttttctttgttaaatctaatttgcagtgtatttttgcattttctagttctgaaagtggaaaatgaaacagtctataataaacttagatgatatatagttttaaaacggtctcaaaaagtactgatataaggtcagtctatattctggaaatgtttatattaaagtgttttaatttctaaatattgtt

SEQ ID NO: 418203 - DNA, 5692 bp, Homo sapiens
gagggcataattttttctcaattcatatttgcaaattgtttattgagagtcagtgttgtatagagggataaacatagatttggagatacagtcacttgccaagttgcaccgcagattcctctggtataaaatgaaaataatgtgactctacaggattgaataataattaactgaagtagtatatatagtacccatcacagaataggtttgtaacaaatgttaggtttgtaaaaatgttttgtcctgtcataattttaaaataggtaaattggacattttctgtttttctttataacataaatccgatattcacatgcagtttttttccaacttttattttaagttcatgggtgcatgtgcagatgtgaaggttcgttatataagtaaatgtgtgccatggtggttttgctgcacagatcatcccatcacctaggtattaagcccagcgttcattagcaattcttcctgacagctgcagttttgattatgtgcagctctcaattggcttttccccgtttaagatgttagaccagtggttctcagccttgactaattagaatcatgtgaggagcttttagaactcccattgctcaggccaaccctccaatcaattaaattaccatctctgggacttacacatttgtgttttgttttctcttttttgactccctaagtgatttttatatggagccaagattgaaaacagtgttagacacacactttcccaatttatgctttgaaaacaaagaccttagttcagagacttatgagatagggttatgattaggggaagagtaggccccacaagtttcagggtagtgaagattctgaagggtacaagcgataaaggagcctgagtttctgggtgaactcagaaacaaggaatcctagaagggctgagagcagaacagaacctcggaatagtctctgaaataaaagagtggagagtataagaaacagaatggaggcaggccccaggaggattcaatcaggaattctgaccttggggccataaataggtttcatatcttcacagaaagggtttacacaacttttgtatatcattttctgagatgtctgaatcctagaaaaagataaagaacatcagtatgtgaaaaagccaagggctaaggtaatggtaatcagactacagttctagaaatgcctctggatctttaatacatgactggcagctcttctaaacctctatgttacctctattagaatattatttctgatgtagtttgtggagaaacaaagcaggaatggaggagaacactgtatacagtatactttataagcactaaataaatatgtaaaaactctgaaatataatctgagtttatagtcataatgaagattattagctcaataatctagggtagaggtgtccaatctttcggcttccatgggccacgttggaagaagaattaccttgggccacacataaaatacactaacactaacaataactgatgagttaaaaaaaatcacataaaaatctcataatgttttaagaacatttgtgaatttgtgttgagtcacattcaaagacaccttgggccacatgtggcctgtgggctgcaagttggacaagcttgatctagggcaagtgctcaacagtggctgcacagttaaatcgtgtgtaaagctttcaaaaagtaagggtgcctaattccactcctagagattctgatttaattggtctgacatggagttgtaacatcaatatttttgaatttttccatatgattctaatgtgtaaccagcattgagaaccactaatccagaggaaaccaggactcctgcttatcttgcacaacttgggtaccctcaaaatatatggtattggcaaagttaatctgagcctaagttccagcacctgtaaaagatggtacgaatttcctaaaagaggttgttgtgaatatgtactctcctgggtttagtccttagctttgcaagaagtccaaaatcttcaagatgatcagcctcaaatcagggactcactaaccgcaaacaaacttgaaagtggctgataactaactggaaagatattactttaatatgtttctcacaaagcctgtgataatcatttgccatatttgtgatcatagaaatttcttgtccctgccctagaaacattgaatcatgttctccaggggagagcctgggaatctatatttttaactgacaccccagttgatttttatcaaagaagtctgggaaacattgtactttaagttattgtattgtcattctggtattgatttatggtaagaggagatacatatttccatttcctagtttttcttgatgtctgtcatccagggtatccttttcttggtatcaaagaatatgaaaaaccaattataatcagaaagtgacttagtatgcatgaaattagagcatagaaaaggatagttttgagggaacatttcattcatattttgacataacctgctgagttttcctgggcccgcaatagccagtagtgtgcagcctcattttcttcagagtcagcatctttctttccccttgcaagcagtctcctgtttctatgaatagtctttgctcagacaaggccaatatacttggtaataattaatttagcttctttgaaatgattaggtcactttttggtttaaaagattaccatggttgtccccaaaatctttgcatgtaccaatttatttcctcctccctagggtcagaatgattttatatttggcttatgaaatgtattaatttgcttcttctggtcaaagataagtggaaggatgatgagatttttaaaaaattaatgtatcccttgcttctaattctacctacaaagtggaatagtgtgctagttactatatagttcccagtgtatagcttttgactcttttgaagtggtaactagtagttttgttttagaattttgctttcagcttttatcctgagagtggggctcactgaacctctctcctttctaaaatctgtggaaattacttttggtaactaaggcactgcagtgatctcaggtaagagagtaaaaaatttgcctttatttgtttttaatgttttgggacgtttcaggttttggttgggtggaaacagagttggggcaaacaaaaagaggctggttaagagattcagaggcaaaggttggttggccatgctaaatttcaggtgcctgttgcacctccatgtagcaacagtaagtagacagatagcagattcttagggaagaagttaagctagagaagcagtgtggtgtggtgtaaagaattctgggcattcaattaagaggtgtgggctctgagaggctaacactactactaacttgctctgtgactttgaccaagtcatttgacctctctgggccccatctttattggaaaatgtcaagtagatggtctctaataaatttttgtccagttctaacattatgtgattctaaatgtatttatactgaccttcttaacttgaactctttgttttttcagcatttagtatgagaacctatgtttgccatatttgtagtattgcttttacatctttagatatgttccggtcccacatgcaaggaagtgaacatcaaattaaagaatccattgttatcaatctagtgaagaattcaaggaagacacaagactcttaccaaaatgagtgtgcagattacatcaatgtgcagaaagccagaggactagaggccaagacttgtttcagaaagatggaagagagttctttggaaacccgtagatacagagaagtggtcgattccagacccagacatagaatgtttgaacaaagactcccatttgagactttccggacatacgcagcaccatacaatatttcacaagcaatggaaaagcagttacctcattcaaagaagacatatgactctttccaagatgaacttgaagattacatcaaagtacagaaagccagaggactagatccaaagacttgtttcagaaagatgagagagaactctgtggatactcatgggtacagagaaatggttgattctggacccagatcaagaatgtgtgagcaaagattttcacatgaggcttcccagacctaccaacgaccataccatatttcaccagtggaaagccagttacctcagtggctaccaacccattcaaagaggacatatgattctttccaagatgaacttgaagattacataaaagtgcaaagaaaggccagagaaagagcagtccaagcataaaaggaaaaagagttatgaagatacagatttagacaaagacaagagcatcagacaaaggaaaagagaggaggatagagtcaaggtcagttcaggaaagcttaagcatcgaaaaaagaaaaaaagccatgatgtaccctccgagaaagaagaacgtaagcacaggaaagagaaaaagaaatctgttgaagaaaggacagaagaggaaatgctttgggatgagtctattcttggattttgaatgtttagttttgtttacccaaggttgaattgaaaaaaaaaaacagtcaatatggatttagaaaaaggaacacctgatgaagaaaaggagaggtagatacagtcagtgtcacttcaggacacttaggttttttttgtataaaaatttaaattgaattaaaagaaggaaaaaaaaagcccaaacttaacctctgagaaaagaacataagaactcaaggagaacataagagaaaaggaaacctgttacagaaaagacaagaatctgtgttttggaatgagtctattcttgggtattgaacttttagttttgtttgcccaaggattaattgaggaaatcagctaagaaaatggactttagacaaaagcaagaggatcagatgaagaaaaggagaggtagatacagtcagtgtcacttcaggaaagctatttaaaaaaacttgaaatttaattgaaagaagaaacaacaacaaaaaagcctaaacctagcctctgaacaacactaacatgagaacacaagaacttaagagaaaaagaaacctactcaagaaaagacagaagagacagtgatttgggatgagtctactctaggattttcaactttttagttttgttccttcaaagttgaaggaaaaaaagtttggttttataaaattcatgttattgtaatttttctaggtggatggctactttaatctctaaaaaagccaagtgaagtaaaagtattcagtatgccttttcctcaagttactttccttcattttcttaaaaaagaaaaaaaattattaaatgtttctcacatatctcacatataatgtaatttccctaaatgaagttgtctctacttctgctcatcaaattgctgtgatagtgaattatttattcatgggagataatttattttaaaggacagaattaccaagcgttacaaaatcagttctttccttggttttgtgttagtgttggtggtattttattgttgtttttctgtgtttatgtgtctcagctttctccaaggaatatgtatgaaataacttaaactgattttttctttgttaaatctaatttgcagtgtatttttgcattttctagttctgaaagtggaaaatgaaacagtctataataaacttagatgatatatagttttaaaacggtctcaaaaagtactgatataaggtcagtctatattctggaaatgtttatattaaagtgttttaatttctaaatattgtt

SEQ ID NO: 418204 - DNA, 4795 bp, Homo sapiens
gagggcataattttttctcaattcatatttgcaaattgtttattgagagtcagtgttgtatagagggataaacatagatttggagatacagtcacttgccaagttgcaccgcagattcctctggtataaaatgaaaataatgtgactctacaggattgaataataattaactgaagtagtatatatagtacccatcacagaataggtttgtaacaaatgttaggtttgtaaaaatgttttgtcctgtcataattttaaaataggtaaattggacattttctgtttttctttataacataaatccgatattcacatgcagtttttttccaacttttattttaagttcatgggtgcatgtgcagatgtgaaggttcgttatataagtaaatgtgtgccatggtggttttgctgcacagatcatcccatcacctaggtattaagcccagcgttcattagcaattcttcctgacagctgcagttttgattatgtgcagctctcaattggcttttccccgtttaagatgttagaccagtggttctcagccttgactaattagaatcatgtgaggagcttttagaactcccattgctcaggccaaccctccaatcaattaaattaccatctctgggacttacacatttgtgttttgttttctcttttttgactccctaagtgatttttatatggagccaagattgaaaacagtgttagacacacactttcccaatttatgctttgaaaacaaagaccttagttcagagacttatgagatagggttatgattaggggaagagtaggccccacaagtttcagggtagtgaagattctgaagggtacaagcgataaaggagcctgagtttctgggtgaactcagaaacaaggaatcctagaagggctgagagcagaacagaacctcggaatagtctctgaaataaaagagtggagagtataagaaacagaatggaggcaggccccaggaggattcaatcaggaattctgaccttggggccataaataggtttcatatcttcacagaaagggtttacacaacttttgtatatcattttctgagatgtctgaatcctagaaaaagataaagaacatcagtatgtgaaaaagccaagggctaaggtaatggtaatcagactacagttctagaaatgcctctggatctttaatacatgactggcagctcttctaaacctctatgttacctctattagaatattatttctgatgtagtttgtggagaaacaaagcaggaatggaggagaacactgtatacagtatactttataagcactaaataaatatgtaaaaactctgaaatataatctgagtttatagtcataatgaagattattagctcaataatctagggtagaggtgtccaatctttcggcttccatgggccacgttggaagaagaattaccttgggccacacataaaatacactaacactaacaataactgatgagttaaaaaaaatcacataaaaatctcataatgttttaagaacatttgtgaatttgtgttgagtcacattcaaagacaccttgggccacatgtggcctgtgggctgcaagttggacaagcttgatctagggcaagtgctcaacagtggctgcacagttaaatcgtgtgtaaagctttcaaaaagtaagggtgcctaattccactcctagagattctgatttaattggtctgacatggagttgtaacatcaatatttttgaatttttccatatgattctaatgtgtaaccagcattgagaaccactaatccagaggaaaccaggactcctgcttatcttgcacaacttgggtaccctcaaaatatatggtattggcaaagttaatctgagcctaagttccagcacctgtaaaagatggtacgaatttcctaaaagaggttgttgtgaatatgtactctcctgggtttagtccttagctttgcaagaagtccaaaatcttcaagatgatcagcctcaaatcagggactcactaaccgcaaacaaacttgaaagtggctgataactaactggaaagatattactttaatatgtttctcacaaagcctgtgataatcatttgccatatttgtgatcatagaaatttcttgtccctgccctagaaacattgaatcatgttctccaggggagagcctgggaatctatatttttaactgacaccccagttgatttttatcaaagaagtctgggaaacattgtactttaagttattgtattgtcattctggtattgatttatggtaagaggagatacatatttccatttcctagtttttcttgatgtctgtcatccagggtatccttttcttggtatcaaagaatatgaaaaaccaattataatcagaaagtgacttagtatgcatgaaattagagcatagaaaaggatagttttgagggaacatttcattcatattttgacataacctgctgagttttcctgggcccgcaatagccagtagtgtgcagcctcattttcttcagagtcagcatctttctttccccttgcaagcagtctcctgtttctatgaatagtctttgctcagacaaggccaatatacttggtaataattaatttagcttctttgaaatgattaggtcactttttggtttaaaagattaccatggttgtccccaaaatctttgcatgtaccaatttatttcctcctccctagggtcagaatgattttatatttggcttatgaaatgtattaatttgcttcttctggtcaaagataagtggaaggatgatgagatttttaaaaaattaatgtatcccttgcttctaattctacctacaaagtggaatagtgtgctagttactatatagttcccagtgtatagcttttgactcttttgaagtggtaactagtagttttgttttagaattttgctttcagcttttatcctgagagtggggctcactgaacctctctcctttctaaaatctgtggaaattacttttggtaactaaggcactgcagtgatctcaggtaagagagtaaaaaatttgcctttatttgtttttaatgttttgggacgtttcaggttttggttgggtggaaacagagttggggcaaacaaaaagaggctggttaagagattcagaggcaaaggttggttggccatgctaaatttcaggtgcctgttgcacctccatgtagcaacagtaagtagacagatagcagattcttagggaagaagttaagctagagaagcagtgtggtgtggtgtaaagaattctgggcattcaattaagaggtgtgggctctgagaggctaacactactactaacttgctctgtgactttgaccaagtcatttgacctctctgggccccatctttattggaaaatgtcaagtagatggtctctaataaatttttgtccagttctaacattatgtgattctaaatgtatttatactgaccttcttaacttgaactctttgttttttcagcatttagtatgagaacctatgtttgccatatttgtagtattgcttttacatctttagatatgttccggtcccacatgcaaggaagtgaacatcaaattaaagaatccattgttatcaatctagtgaagaattcaaggaagacacaagactcttaccaaaatgagtgtgcagattacatcaatgtgcagaaagccagaggactagaggccaagacttgtttcagaaagatggaagagagttctttggaaacccgtagatacagagaagtggtcgattccagacccagacatagaatgtttgaacaaagactcccatttgagactttccggacatacgcagcaccatacaatatttcacaagcaatggaaaagcagttacctcattcaaagaagacatatgactctttccaagatgaacttgaagattacatcaaagtacagaaagccagaggactagatccaaagacttgtttcagaaagatgagagagaactctgtggatactcatgggtacagagaaatggttgattctggacccagatcaagaatgtgtgagcaaagattttcacatgaggcttcccagacctaccaacgaccataccatatttcaccagtggaaagccagttacctcagtggctaccaacccattcaaagaggacatatgattctttccaagatgaacttgaagattacataaaagtgcagaaagccagaggactagagccaaaaacttgtttcagaaagataggagatagctctgtagaaacacacaggaacagagaaatggttgatgtcagacccagacatagaatgttggagcaaaagctcccatgtgagactttccagacctattcaggaccatatagtatttcacaagtagtggaaaaccagttacctcattgcttaccagctcatgatagcaaacagagactagattctattagctactgtcaactcaccagagactgtttcccagaaaaaccagtacccttgagccttaatcagcaagaaaataactctggctcatacagtgtagaatctgaagtttacaagcacctctcttcagaaaacaatactgctgaccatcaagcaggtcataaacggaaacatcagaagagaaaacgacacctagaagaaggcaaagaaaggccagagaaagagcagtccaagcataaaaggaaaaagagttatgaagatacagatttagacaaaagaaccaagagagccttccagaaccaaaaggggaaaaaaggaagaaagggaagggaataaagaagttccaaaaggggtcccaagtttccaagggaa

SEQ ID NO: 418205 - DNA, 6070 bp, Homo sapiens
gagggcataattttttctcaattcatatttgcaaattgtttattgagagtcagtgttgtatagagggataaacatagatttggagatacagtcacttgccaagttgcaccgcagattcctctggtataaaatgaaaataatgtgactctacaggattgaataataattaactgaagtagtatatatagtacccatcacagaataggtttgtaacaaatgttaggtttgtaaaaatgttttgtcctgtcataattttaaaataggtaaattggacattttctgtttttctttataacataaatccgatattcacatgcagtttttttccaacttttattttaagttcatgggtgcatgtgcagatgtgaaggttcgttatataagtaaatgtgtgccatggtggttttgctgcacagatcatcccatcacctaggtattaagcccagcgttcattagcaattcttcctgacagctgcagttttgattatgtgcagctctcaattggcttttccccgtttaagatgttagaccagtggttctcagccttgactaattagaatcatgtgaggagcttttagaactcccattgctcaggccaaccctccaatcaattaaattaccatctctgggacttacacatttgtgttttgttttctcttttttgactccctaagtgatttttatatggagccaagattgaaaacagtgttagacacacactttcccaatttatgctttgaaaacaaagaccttagttcagagacttatgagatagggttatgattaggggaagagtaggccccacaagtttcagggtagtgaagattctgaagggtacaagcgataaaggagcctgagtttctgggtgaactcagaaacaaggaatcctagaagggctgagagcagaacagaacctcggaatagtctctgaaataaaagagtggagagtataagaaacagaatggaggcaggccccaggaggattcaatcaggaattctgaccttggggccataaataggtttcatatcttcacagaaagggtttacacaacttttgtatatcattttctgagatgtctgaatcctagaaaaagataaagaacatcagtatgtgaaaaagccaagggctaaggtaatggtaatcagactacagttctagaaatgcctctggatctttaatacatgactggcagctcttctaaacctctatgttacctctattagaatattatttctgatgtagtttgtggagaaacaaagcaggaatggaggagaacactgtatacagtatactttataagcactaaataaatatgtaaaaactctgaaatataatctgagtttatagtcataatgaagattattagctcaataatctagggtagaggtgtccaatctttcggcttccatgggccacgttggaagaagaattaccttgggccacacataaaatacactaacactaacaataactgatgagttaaaaaaaatcacataaaaatctcataatgttttaagaacatttgtgaatttgtgttgagtcacattcaaagacaccttgggccacatgtggcctgtgggctgcaagttggacaagcttgatctagggcaagtgctcaacagtggctgcacagttaaatcgtgtgtaaagctttcaaaaagtaagggtgcctaattccactcctagagattctgatttaattggtctgacatggagttgtaacatcaatatttttgaatttttccatatgattctaatgtgtaaccagcattgagaaccactaatccagaggaaaccaggactcctgcttatcttgcacaacttgggtaccctcaaaatatatggtattggcaaagttaatctgagcctaagttccagcacctgtaaaagatggtacgaatttcctaaaagaggttgttgtgaatatgtactctcctgggtttagtccttagctttgcaagaagtccaaaatcttcaagatgatcagcctcaaatcagggactcactaaccgcaaacaaacttgaaagtggctgataactaactggaaagatattactttaatatgtttctcacaaagcctgtgataatcatttgccatatttgtgatcatagaaatttcttgtccctgccctagaaacattgaatcatgttctccaggggagagcctgggaatctatatttttaactgacaccccagttgatttttatcaaagaagtctgggaaacattgtactttaagttattgtattgtcattctggtattgatttatggtaagaggagatacatatttccatttcctagtttttcttgatgtctgtcatccagggtatccttttcttggtatcaaagaatatgaaaaaccaattataatcagaaagtgacttagtatgcatgaaattagagcatagaaaaggatagttttgagggaacatttcattcatattttgacataacctgctgagttttcctgggcccgcaatagccagtagtgtgcagcctcattttcttcagagtcagcatctttctttccccttgcaagcagtctcctgtttctatgaatagtctttgctcagacaaggccaatatacttggtaataattaatttagcttctttgaaatgattaggtcactttttggtttaaaagattaccatggttgtccccaaaatctttgcatgtaccaatttatttcctcctccctagggtcagaatgattttatatttggcttatgaaatgtattaatttgcttcttctggtcaaagataagtggaaggatgatgagatttttaaaaaattaatgtatcccttgcttctaattctacctacaaagtggaatagtgtgctagttactatatagttcccagtgtatagcttttgactcttttgaagtggtaactagtagttttgttttagaattttgctttcagcttttatcctgagagtggggctcactgaacctctctcctttctaaaatctgtggaaattacttttggtaactaaggcactgcagtgatctcaggtaagagagtaaaaaatttgcctttatttgtttttaatgttttgggacgtttcaggttttggttgggtggaaacagagttggggcaaacaaaaagaggctggttaagagattcagaggcaaaggttggttggccatgctaaatttcaggtgcctgttgcacctccatgtagcaacagtaagtagacagatagcagattcttagggaagaagttaagctagagaagcagtgtggtgtggtgtaaagaattctgggcattcaattaagaggtgtgggctctgagaggctaacactactactaacttgctctgtgactttgaccaagtcatttgacctctctgggccccatctttattggaaaatgtcaagtagatggtctctaataaatttttgtccagttctaacattatgtgattctaaatgtatttatactgaccttcttaacttgaactctttgttttttcagcatttagtatgagaacctatgtttgccatatttgtagtattgcttttacatctttagatatgttccggtcccacatgcaaggaagtgaacatcaaattaaagaatccattgttatcaatctagtgaagaattcaaggaagacacaagactcttaccaaaatgagtgtgcagattacatcaatgtgcagaaagccagaggactagaggccaagacttgtttcagaaagatggaagagagttctttggaaacccgtagatacagagaagtggtcgattccagacccagacatagaatgtttgaacaaagactcccatttgagactttccggacatacgcagcaccatacaatatttcacaagcaatggaaaagcagttacctcattcaaagaagacatatgactctttccaagatgaacttgaagattacatcaaagtacagaaagccagaggactagatccaaagacttgtttcagaaagatgagagagaactctgtggatactcatgggtacagagaaatggttgattctggacccagatcaagaatgtgtgagcaaagattttcacatgaggcttcccagacctaccaacgaccataccatatttcaccagtggaaagccagttacctcagtggctaccaacccattcaaagaggacatatgattctttccaagatgaacttgaagattacataaaagtgcagaaagccagaggactagagccaaaaacttgtttcagaaagataggagatagctctgtagaaacacacaggaacagagaaatggttgatgtcagacccagacatagaatgttggagcaaaagctcccatgtgagactttccagacctattcaggaccatatagtatttcacaagtagtggaaaaccagttacctcattgcttaccagctcatgatagcaaacagagactagattctattagctactgtcaactcaccagagactgtttcccagaaaaaccagtacccttgagccttaatcagcaagaaaataactctggctcatacagtgtagaatctgaagtttacaagcacctctcttcagaaaacaatactgctgaccatcaagcaggtcataaacggaaacatcagaagagaaaacgacacctagaagaaggcaaagaaaggccagagaaagagcagtccaagcataaaaggaaaaagagttatgaagatacagatttagacaaagacaagagcatcagacaaaggaaaagagaggaggatagagtcaaggtcagttcaggaaagcttaagcatcgaaaaaagaaaaaaagccatgatgtaccctccgagaaagaagaacgtaagcacaggaaagagaaaaagaaatctgttgaagaaaggacagaagaggaaatgctttgggatgagtctattcttggattttgaatgtttagttttgtttacccaaggttgaattgaaaaaaaaaaacagtcaatatggatttagaaaaaggaacacctgatgaagaaaaggagaggtagatacagtcagtgtcacttcaggacacttaggttttttttgtataaaaatttaaattgaattaaaagaaggaaagaaaaggaaacctgttacagaaaagacaagaatctgtgttttggaatgagtctattcttgggtattgaacttttagttttgtttgcccaaggattaattgaggaaatcagctaagaaaatggactttagacaaaagcaagaggatcagatgaagaaaaggagaggtagatacagtcagtgtcacttcaggaaagctatttaaaaaaacttgaaatttaattgaaagaagaaacaacaacaaaaaagcctaaacctagcctctgaacaacactaacatgagaacacaagaacttaagagaaaaagaaacctactcaagaaaagacagaagagacagtgatttgggatgagtctactctaggattttcaactttttagttttgttccttcaaagttgaaggaaaaaaagtttggttttataaaattcatgttattgtaatttttctaggtggatggctactttaatctctaaaaaagccaagtgaagtaaaagtattcagtatgccttttcctcaagttactttccttcattttcttaaaaaagaaaaaaaattattaaatgtttctcacatatctcacatataatgtaatttccctaaatgaagttgtctctacttctgctcatcaaattgctgtgatagtgaattatttattcatgggagataatttattttaaaggacagaattaccaagcgttacaaaatcagttctttccttggttttgtgttagtgttggtggtattttattgttgtttttctgtgtttatgtgtctcagctttctccaaggaatatgtatgaaataacttaaactgattttttctttgttaaatctaatttgcagtgtatttttgcattttctagttctgaaagtggaaaatgaaacagtctataataaacttagatgatatatagttttaaaacggtctcaaaaagtactgatataaggtcagtctatattctggaaatgtttatattaaagtgttttaatttctaaatattgtt

SEQ ID NO: 418206 - DNA, 815 bp, Homo sapiens
tattgatatcgtctttaatttctttcagcaatgttttgtagttttcagggtataatcatttgacctttttggttaaacttattccaaaatattttattccttttgatgttaatgtgaattgaaattctttccttaacttcctttcagattgttcattgttagtgtattgtctaaagaatgatctagaaagagtgaaggggacaggcagaagctggtggttttggagcagaaacatattccctttcctgggttttgattttccctctccctttgcagagagcaggtggctcttccctgacagctagatagactttactggaaaacatggtgccaatgctccagggatccacttaccagggactatgatcctcttgattatgagatttgttccaccagtggctgagttatggatgaaacagacatagacccctctatatgttttagtgatttggggtataaagaacacttgtgctgattgctggaacttccccatcaatcagccaagaatgctctgccagtgggtgagagtctgtgaggcaggagagcttggggacttcccctgtatggtaataggtgtatgaggaagaaacggtgggagcatccaggccatgcggagcaaagagaataatgtcacaggcgatattgtcagagggaagggaaaatcctggtctgtggaagggacacagtcacagtgaccctgtgagccaagttgcaacactgaagtcccagccaaatccccgctgtgttcactgatctggagcctgagacattcacctgtttcttccatcacaagctgtggaacctgagtctcccat

SEQ ID NO: 418207 - DNA, 717 bp, Homo sapiens
  misc_feature (41)..(41): n is a, c, g, or t
  misc_feature (82)..(82): n is a, c, g, or t
  misc_feature (101)..(101): n is a, c, g, or t
  misc_feature (112)..(112): n is a, c, g, or t
  misc_feature (119)..(119): n is a, c, g, or t
  misc_feature (139)..(139): n is a, c, g, or t
  misc_feature (146)..(146): n is a, c, g, or t
  misc_feature (154)..(154): n is a, c, g, or t
  misc_feature (166)..(166): n is a, c, g, or t
  misc_feature (169)..(169): n is a, c, g, or t
  misc_feature (172)..(173): n is a, c, g, or t
  misc_feature (175)..(175): n is a, c, g, or t
  misc_feature (178)..(178): n is a, c, g, or t
  misc_feature (180)..(180): n is a, c, g, or t
  misc_feature (211)..(211): n is a, c, g, or t
  misc_feature (220)..(220): n is a, c, g, or t
  misc_feature (225)..(225): n is a, c, g, or t
  misc_feature (241)..(241): n is a, c, g, or t
  misc_feature (245)..(245): n is a, c, g, or t
  misc_feature (247)..(247): n is a, c, g, or t
  misc_feature (251)..(251): n is a, c, g, or t
  misc_feature (253)..(253): n is a, c, g, or t
aaaaaccaataacaaaaaaaaaaaaaaaccagaaaccaaantaaaccaaaaaaaaaaaaaaaaccaaaaagagaaaaaacanaaacaaaaacaaaaacaancaaaaaaaaanaaaatanaaaaaaaaaaataaaaacanaaaaaanacaaacanaaaataaaaacnacnacnncnacnanaaaaaaaaaaaccaacaaaaaaaaaaaaaanaaaaaaaanaaaanaaaaaaaaaaaaaacnaaananaccnanaaaaaccaaaaaaatactttttcttttcgtgtattcaaggttaaacacccaaacatttaaggatatgttgaaactacaccaatagagcatttcatatcataattaaaatgaatgttaggcttcttgtggccagttaatagttgatgagattggtgacattatttattgccacagcctattgtataaactatgcagagttaaatatttgcttgtaaaatattagccaatgttgtcattattttgatgtatttccttggttatgaccaaaaatatgttgagatactgaaactaatgtctgtgtgtttaaatgtttaccagcaaattgtcttatcatgttaatgagaatgttcaatgcctgtgtggtaaatagtaaatacaatggcataaaagtaactttctctgaagatgtgatgttcaggctgtgaaatatatatgtaaaagaaaaataaatgttatttgttaga

SEQ ID NO: 418208 - DNA, 897 bp, Homo sapiens
tcagatatatacattgtattttctcccactctgcaggttgcctttttactcttgctgtgcagaagtgttttagtttaattaggtcccatttatttatttttgttgcatttgcctttgggttcttggtcatgaattctttaagtcaatgtctagagtagttttttttgatgttatcttctagaatttttatggtttcaagtgttagatttaagtttgacccatcttgagttaatttttgtataaggtgagagatgaggattcagggactaacaggtatttgacactgtccccatcattctcaacatttattttgacctcacatggttttcattagcaacacatgcccatgaataacatcttgtttccctgcagtggctaccacctggggatataaaagcattccttatactcaggaagtcatatcagtttcctggagtggcaatggaaaggagatggggtagaggatgcagagacgggcaggaccatgtgagatggaactgtgtagtttgaccctacccccatcctagttgggaatcactactctctataggtgtgagtgaacaaaaaagataagaatgaataagcaaaatatttgactgaaagacaggttgtccctgatgacgacttataacaatcatttatgatgtatttttgttattgtgtttctttaaaagaaatgtttgcctctgggacacattaatatcacccggaaacagcctcattcatggtgagttaaggtctatgatttttaaaaatataccatgaaggaataatacaccatgaaggaatgctttcttggttttaattagtgaatccagtgagtgtttattgacaggttgaaaatggagaaatatttagaatgaatgactaaaaatttggaaagttaattagcatatc

SEQ ID NO: 418209 - DNA, 768 bp, Homo sapiens
aaattattctttaccactgcaaatgctcattttaaagttggatgccctgttttagccttggaggtactctccaaaattccaaaagtaaccaaaacatctgccttatctgcaaaaaaagatcagcctgacttcatttctcacaggatggatgatgtaccttcacattcaaaagctctgagtgatggcaatggaagttctggcattgaatggtcaaatgtaacttcatcacagtatgactggagtcagccaatagtaaaagttgatgaggaacctcttaatcttgattggggtgaagatcacgacagtgccttagatgaagaggaagacgatgctgttggtttagtgatgaaaagtacagatgccagggaaaaagataaacaatcagatcagaaggcctcagaccctaacatgttattaacacctcaggaagaggatgatcctgaaggtgatactgaagttgatgtgattgctgaacaactaaaattcagagcttgtttaaagatccttatgactgaattaagaacattggctacaggttatgaagtagatggaggaaaactcagatttcaactctataactggcttgaaaaggaaattgctgccttgcatgagatatgtaatcatgaatcagttattaaagagtattccagtaagacatattccaaagtagagagtgatctgctggatcaggaagaaatggtagacaaccaccaccttgggccccatgaaggctacgtagctgagaaatactctcaggagatctgcttt

SEQ ID NO: 418210 - DNA, 4724 bp, Homo sapiens
aaattattctttaccactgcaaatgctcattttaaagttggatgccctgttttagccttggaggtactctccaaaattccaaaagtaaccaaaacatctgccttatctgcaaaaaaagatcagcctgacttcatttctcacaggatggatgatgtaccttcacattcaaaagctctgagtgatggcaatggaagttctggcattgaatggtcaaatgtaacttcatcacagtatgactggagtcagccaatagtaaaagttgatgaggaacctcttaatcttgattggggtgaagatcacgacagtgccttagatgaagaggaagacgatgctgttggtttagtgatgaaaagtacagatgccagggaaaaagataaacaatcagatcagaaggcctcagaccctaacatgttattaacacctcaggaagaggatgatcctgaaggtgatactgaagttgatgtgattgctgaacaactaaaattcagagcttgtttaaagatccttatgactgaattaagaacattggctacaggttatgaagtagatggaggaaaactcagatttcaactctataactggcttgaaaaggaaattgctgccttgcatgagatatgtaatcatgaatcagttattaaagagtattccagtaagacatattccaaagtagagagtgatctgctggatcaggaagaaatggtagacaaaccagatattggttcctatgagcgccatcaaatagaaagaagaagattgcaggccaaacgagagcatgcagaaagacgaaagtcgtggttgcagaaaaaccaagatctcctgagagtatttctcagctactgtagccttcatggggcccaaggtggtggtttggcttcagtaaggatggaactcaaatttttgctacaagaatcacaacaggaaactacagtaaagcagctccagtctccactaccactgcctaccaccctacctctgctttcagcaagtattgcgtcaacaaaaacagtcatagctaatcctgtattgtacttaaataatcacatccatgatatactttatactattgttcagatgaaaacaccacctcatcccagtattgaagatgtgaaggtgcacacacttcattcactagcagcatcactttctgcatcaatttaccaagcattatgtgacagtcatagctacagcagtcaaacagaaggaaatcagtttacaggaatggcttatcaaggacttcttttaagtgatcgtagaagactaaggacagaaagcattgaagaacacgcaacaccaaattcatctcctgctcaatggcctggtgtgagctcacttattaatcttttgagttcagcccaagatgaagaccagccaaaactgaacattttgctatgtgaagctgttgttgctgtttacttaagtttattgatacatgctcttgccacaaattcctccagtgaattatttcggcttgcagcccacccattaaataatcgaatgtgggctgctgtttttggaggcggtgtaaaacttgttgtgaaacctcgaagacaatcagaaaatatttcagcacctcctgtcctttctgaagacatagataaacaccgtaggagatttaacatgagaatgctcgtccctggaaggcctgtaaaagatgctaccccaccaccggtgcctgcagaaagaccatcttacaaagaaaaatttattcctcccgaacttagtatgtgggattattttgttgcaaagccatttcttcctttgtctgatagtggtgttatatatgattctgatgaaagcattcatagtgatgaagaagatgatgcctttttttcagatacacaaatacaggagcaccaagatccaaattcctatagctgggctcttctacatttgacaatggttaaactagcacttcacaatgtcaagaatttctttcctattgctggactggaattctctgagctgcctgtaacatcaccattaggtattgctgtgattaaaaacttggagaactgggaacagatcttgcaagagaaaatggatcagtttgaaggtccaccccctaactatatcaacacatatccaactgacctttcagtgggagctggaccagctattcttcgaaataaagcaatgctagaacctgaaaataccccattcaagtcccgggattcttctgcatttccagtcaaacgactttggcatttccttgttaaacaagaggtccttcaagagacatttattagatatattttcactaagaaaagaaagcagagtgagtctatagaagaacatgtggagcaggtcaaccaaaactgcatagcagaagattgccacatcaaggttgaagctgatctgggctatccaggtggaaaggcgaaagtcatccataaggaatctgatatgatcatggcattttctgttaataaggcaaattgtaatgaaattgttttggcttcaacacatgatgttcaagaacttgatgttacttctctactggcctgtcagtcatacatatggatcggagaagaatatgacagagaatccaaaagttcagatgatgttgattatcgtggttccactacaactctttatcaacccagtgcaacatcctattcagcaagtcaggtgcatccaccttcatctctgccatggctgggcactggacagactagcactggagctagtgtgcttatgaaaaggaatctacataatgttaagagaatgacttcacacccagtccatcaatactatcttacaggtgctcaggacggcagtgtacgaatgtttgaatggacgcggcctcagcaacttgtctgctttcgtcaagctggcaatgcaagagttactagattatattttaattcacaaggcaacaagtgtggtgttgcggatggagagggttttctgagtatctggcaagttaaccaaactgcatcaaatcctaaaccttatatgagttggcagtgccacagtaaagccacaagtgactttgcatttattacctcttcaagtctagttgccacatctggacactccaatgacaatagaaatgtttgcctctgggacacattaatatcacccggaaacagcctcattcatggtttcacgtgccacgatcatggtgccacggtactgcagtatgcacccaaacagcaactcctaatctcggggggtaggaaaggacacgtctgcatttttgacatcaggcaaaggcagctcattcacacgttccaggcccatgactcagctattaaggctctggccttggatccctatgaggaatattttaccacaggttcagcagaaggtaacataaaggtttggagattgacaggccatggcctaattcattcatttaaaagtgaacatgctaagcagtccatatttcgaaacattggggctggagtcatgcagattgacatcatccagggcaatcggctcttctcctgtggtgcagatggcacgctgaaaaccagggttttgcccaatgcttttaacatccctaacagaattcttgacattctataaagattggggttttatttttatatacatttcagttaaaaggcacactacagtcatcactaggcaattctgctttctaagcagttgtattgaaaacagagaatctctgtgtagaatttgaatatgacccaagctgagtattatctaaacaggttggtggaatgaatgcgcatgtaccttattatgctgacatactaaaaaaaataaaacctagtattgtatgaaggatagctattctttacagcatttagcaaacctgattcagaaaacatttgagattagcaaattagtaacttgaaataatgaaaaggacgtttataccaaattaaggaagaaaatgttgctgatttgggtttttcttcctgttcttaccactgactgaagcatgcctgcagtctcctcctctgttgaatgaaggataatcataaggtgtttgttaggagcgctagaccacctggaaaactttcttagctgtggagcagtgcgcagtgaccagttctctgctgtgagaggccgtttccattctttcctgctgaatatttttcctgttagtgtttatactgagctagtactgtaacttgcaaatgagtgcaaatttaaatgcaatgttttactcacaatttgcacattcacattttttggactgctagtttttctatttaaatatttgccttcatgttaggaatgtactatgtgaacatgacatatttgtagttaaccaaacacaccttcttagtccagtttagtactttttcttttcgtgtattcaaggttaaacacccaaacatttaaggatatgttgaaactacaccaatagagcatttcatatcataattaaaatgaatgttaggcttcttgtggccagttaatagttgatgagattggtgacattatttattgccacagcctattgtataaactatgcagagttaaatatttgcttgtaaaatattagccaatgttgtcattattttgatgtatttccttggttatgaccaaaaatatgttgagatactgaaactaatgtctgtgtgtttaaatgtttaccagcaaattgtcttatcatgttaatgagaatgttcaatgcctgtgtggtaaatagtaaatacaatggcataaaagtaactttctctgaagatgtgatgttcaggctgtgaaatatatatgtaaaagaaaaataaatgttatttgttaga

SEQ ID NO: 418211 - DNA, 2852 bp, Homo sapiens
ctatgtttagaaataaatattttaatttgtattttaaatcaacccctatagggcaggaatttatgtagcatcttctgcatctgcttatacaaatgggctttaattttatagattaccagttatgtaacttagatttcttaaaactgtatacagataactaatttttattttgaaatagcttttatgttcttgtgtttatgtaatagtcacattaattttgctcttttggctttgtgttgtgtttatttgatgactgttttattcggtttaattttttcttgattttgcaaattcatttttatcatctttaagtggtggagtggccatttcagcttgaaatatttcactgtctttataatttcattccatgcatgtgttttgtgtttgtgacggtgtggtggtatttagtctatagaagaacatgtggagcaggtcaaccaaaactgcatagcagaagattgccacatcaaggttgaagctgatctgggctatccaggtggaaaggcgaaagtcatccataaggaatctgatatgatcatggcattttctgttaataaggcaaattgtaatgaaattgttttggcttcaacacatgatgttcaagaacttgatgttacttctctactggcctgtcagtcatacatatggatcggagaagaatatgacagagaatccaaaagttcagatgatgttgattatcgtggttccactacaactctttatcaacccagtgcaacatcctattcagcaagtcaggtgcatccaccttcatctctgccatggctgggcactggacagactagcactggagctagtgtgcttatgaaaaggaatctacataatgttaagagaatgacttcacacccagtccatcaatactatcttacaggtgctcaggacggcagtgtacgaatgtttgaatggacgcggcctcagcaacttgtctgctttcgtcaagctggcaatgcaagagttactagattatattttaattcacaaggcaacaagtgtggtgttgcggatggagagggttttctgagtatctggcaagttaaccaaactgcatcaaatcctaaaccttatatgagttggcagtgccacagtaaagccacaagtgactttgcatttattacctcttcaagtctagttgccacatctggacactccaatgacaatagaaatgtttgcctctgggacacattaatatcacccggaaacagcctcattcatggtttcacgtgccacgatcatggtgccacggtactgcagtatgcacccaaacagcaactcctaatctcggggggtaggaaaggacacgtctgcatttttgacatcaggcaaaggcagctcattcacacgttccaggcccatgactcagctattaaggctctggccttggatccctatgaggaatattttaccacaggttcagcagaaggtaacataaaggtttggagattgacaggccatggcctaattcattcatttaaaagtgaacatgctaagcagtccatatttcgaaacattggggctggagtcatgcagattgacatcatccagggcaatcggctcttctcctgtggtgcagatggcacgctgaaaaccagggttttgcccaatgcttttaacatccctaacagaattcttgacattctataaagattggggttttatttttatatacatttcagttaaaaggcacactacagtcatcactaggcaattctgctttctaagcagttgtattgaaaacagagaatctctgtgtagaatttgaatatgacccaagctgagtattatctaaacaggttggtggaatgaatgcgcatgtaccttattatgctgacatactaaaaaaaataaaacctagtattgtatgaaggatagctattctttacagcatttagcaaacctgattcagaaaacatttgagattagcaaattagtaacttgaaataatgaaaaggacgtttataccaaattaaggaagaaaatgttgctgatttgggtttttcttcctgttcttaccactgactgaagcatgcctgcagtctcctcctctgttgaatgaaggataatcataaggtgtttgttaggagcgctagaccacctggaaaactttcttagctgtggagcagtgcgcagtgaccagttctctgctgtgagaggccgtttccattctttcctgctgaatatttttcctgttagtgtttatactgagctagtactgtaacttgcaaatgagtgcaaatttaaatgcaatgttttactcacaatttgcacattcacattttttggactgctagtttttctatttaaatatttgccttcatgttaggaatgtactatgtgaacatgacatatttgtagttaaccaaacacaccttcttagtccagtttagtactttttcttttcgtgtattcaaggttaaacacccaaacatttaaggatatgttgaaactacaccaatagagcatttcatatcataattaaaatgaatgttaggcttcttgtggccagttaatagttgatgagattggtgacattatttattgccacagcctattgtataaactatgcagagttaaatatttgcttgtaaaatattagccaatgttgtcattattttgatgtatttccttggttatgaccaaaaatatgttgagatactgaaactaatgtctgtgtgtttaaatgtttaccagcaaattgtcttatcatgttaatgagaatgttcaatgcctgtgtggtaaatagtaaatacaatggcataaaagtaactttctctgaagatgtgatgttcaggctgtgaaatatatatgtaaaagaaaaataaatgttatttgttaga

SEQ ID NO: 418212 - DNA, 4670 bp, Homo sapiens
aaattattctttaccactgcaaatgctcattttaaagttggatgccctgttttagccttggaggtactctccaaaattccaaaagtaaccaaaacatctgccttatctgcaaaaaaagatcagcctgacttcatttctcacaggatggatgatgtaccttcacattcaaaagctctgagtgatggcaatggaagttctggcattgaatggtcaaatgtaacttcatcacagtatgactggagtcagccaatagtaaaagttgatgaggaacctcttaatcttgattggggtgaagatcacgacagtgccttagatgaagaggaagacgatgctgttggtttagtgatgaaaagtacagatgccagggaaaaagataaacaatcagatcagaaggcctcagaccctaacatgttattaacacctcaggaagaggatgatcctgaaggtgatactgaagttgatgtgattgctgaacaactaaaattcagagcttgtttaaagatccttatgactgaattaagaacattggctacaggttatgaagtagatggaggaaaactcagatttcaactctataactggcttgaaaaggaaattgctgccttgcatgagatatgtaatcatgaatcagttattaaagagtattccagtaagacatattccaaagtagagagtgatctgctggatcaggaagaaatggtagacaaaccagatattggttcctatgagcgccatcaaatagaaagaagaagattgcaggccaaacgagagcatgcagaaagacgaaagtcgtggttgcagaaaaaccaagatctcctgagagtatttctcagctactgtagccttcatggggcccaaggtggtggtttggcttcagtaaggatggaactcaaatttttgctacaagaatcacaacaggaaactacagtaaagcagctccagtctccactaccactgcctaccaccctacctctgctttcagcaagtattgcgtcaacaaaaacagtcatagctaatcctgtattgtacttaaataatcacatccatgatatactttatactattgttcagatgaaaacaccacctcatcccagtattgaagatgtgaaggtgcacacacttcattcactagcagcatcactttctgcatcaatttaccaagcattatgtgacagtcatagctacagcagtcaaacagaaggaaatcagtttacaggaatggcttatcaaggacttcttttaagtgatcgtagaagactaaggacagaaagcattgaagaacacgcaacaccaaattcatctcctgctcaatggcctggtgtgagctcacttattaatcttttgagttcagcccaagatgaagaccagccaaaactgaacattttgctatgtgaagctgttgttgctgtttacttaagtttattgatacatgctcttgccacaaattcctccagtgaattatttcggcttgcagcccacccattaaataatcgaatgtgggctgctgtttttggaggcggtgtaaaacttgttgtgaaacctcgaagacaatcagaaaatatttcagcacctcctgtcctttctgaagacatagataaacaccgtaggagatttaacatgagaatgctcgtccctggaaggcctgtaaaagatgctaccccaccaccggtgcctgcagaaagaccatcttacaaagaaaaatttattcctcccgaacttagtatgtgggattattttgttgcaaagccatttcttcctttgtctgatagtggtgttatatatgattctgatgaaagcattcatagtgatgaagaagatgatgcctttttttcagatacacaaatacaggagcaccaagatccaaattcctatagctgggctcttctacatttgacaatggttaaactagcacttcacaatgtcaagaatttctttcctattgctggactggaattctctgagctgcctgtaacatcaccattaggtattgctgtgattaaaaacttggagaactgggaacagatcttgcaagagaaaatggatcagtttgaaggtccaccccctaactatatcaacacatatccaactgacctttcagtgggagctggaccagctattcttcgaaataaagcaatgctagaacctgaaaataccccattcaagtcccgggattcttctgcatttccagtcaaacgactttggcatttccttgttaaacaagaggtccttcaagagacatttattagatatattttcactaagaaaagaaagcagagtgagtctatagaagaacatgtggagcaggtcaaccaaaactgcatagcagaagattgccacatcaaggttgaagctgatctgggctatccaggtggaaaggcgaaagtcatccataaggaatctgatatgatcatggcattttctgttaataaggcaaattgtaatgaaattgttttggcttcaacacatgatgttcaagaacttgatgttacttctctactggcctgtcagtcatacatatggatcggagaagaatatgacagagaatccaaaagttcagatgatgttgattatcgtggttccactacaactctttatcaacccagtgcaacatcctattcagcaagtcaggtgcatccaccttcatctctgccatggctgggcactggacagactagcactggagctagtgtgcttatgaaaaggaatctacataatgttaagagaatgacttcacacccagtccatcaatactatcttacaggtgctcaggacggcagtgtacgaatgtttgaatggacgcggcctcagcaacttgtctgctttcgtcaagctggcaatgcaagagttactagattatattttaattcacaaggcaacaagtgtggtgttgcggatggagagggttttctgagtatctggcaagttaaccaaactgcatcaaatcctaaaccttatatgagttggcagtgccacagtaaagccacaagtgactttgcatttattacctcttcaagtctagttgccacatctggacactccaatgacaatagaaatgtttgcctctgggacacattaatatcacccggaaacagcctcattcatggtttcacgtgccacgatcatggtgccacggtactgcagtatgcacccaaacagcaactcctaatctcggggggtaggaaaggacacgtctgcatttttgacatcaggcaaaggcagctcattcacacgttccaggcccatgactcagctattaaggctctggccttggatccctatgaggaatattttaccacaggttcagcagaaggtaacataaaggtttggagattgacaggccatggcctaattcattcatttaaaagtgaacatgctaagcagtccatatttcgaaacattggggctggagtcatgcagattgacatcatccagggcaatcggctcttctcctgtggtgcagatggcacgctgaaaaccagggttttgcccaatgcttttaacatccctaacagaattcttgacattctataaagattggggttttatttttatatacatttcagttaaaaggcacactacagtcatcactaggcaattctgctttctaagcagttgtattgaaaacagagaatctctgtgtagaatttgaatatgacccaagctgagtattatctaaacaggttggtggaatgaatgcgcatgtaccttattatgctgacatactaaaaaaaataaaacctagtattgtatgaaggatagctattctttacagcatttagcaaacctgattcagaaaacatttgagattagcaaattagtaacttgaaataatgaaaaggacgtttataccaaattaaggaagaaaatgttgctgatttgggtttttcttcctgttcttaccactgactgaagcatgcctgcagtctcctcctctgttgaatgaaggataatcataaggtgtttgttaggagcgctagaccacctgggccgtttccattctttcctgctgaatatttttcctgttagtgtttatactgagctagtactgtaacttgcaaatgagtgcaaatttaaatgcaatgttttactcacaatttgcacattcacattttttggactgctagtttttctatttaaatatttgccttcatgttaggaatgtactatgtgaacatgacatatttgtagttaaccaaacacaccttcttagtccagtttagtactttttcttttcgtgtattcaaggttaaacacccaaacatttaaggatatgttgaaactacaccaatagagcatttcatatcataattaaaatgaatgttaggcttcttgtggccagttaatagttgatgagattggtgacattatttattgccacagcctattgtataaactatgcagagttaaatatttgcttgtaaaatattagccaatgttgtcattattttgatgtatttccttggttatgaccaaaaatatgttgagatactgaaactaatgtctgtgtgtttaaatgtttaccagcaaattgtcttatcatgttaatgagaatgttcaatgcctgtgtggtaaatagtaaatacaatggcataaaagtaactttctctgaagatgtgatgttcaggctgtgaaatatatatgtaaaagaaaaataaatgttatttgttaga

SEQ ID NO: 418213 - DNA, 1667 bp, Homo sapiens
gacaagaaattgttttgagaaattctctgatgtttttcttcttcaggtttcacgtgccacgatcatggtgccacggtactgcagtatgcacccaaacagcaactcctaatctcggggggtaggaaaggacacgtctgcatttttgacatcaggcaaaggcagctcattcacacgttccaggcccatgactcagctattaaggctctggccttggatccctatgaggaatattttaccacaggttcagcagaaggtaacataaaggtttggagattgacaggccatggcctaattcattcatttaaaagtgaacatgctaagcagtccatatttcgaaacattggggctggagtcatgcagattgacatcatccagggcaatcggctcttctcctgtggtgcagatggcacgctgaaaaccagggttttgcccaatgcttttaacatccctaacagaattcttgacattctataaagattggggttttatttttatatacatttcagttaaaaggcacactacagtcatcactaggcaattctgctttctaagcagttgtattgaaaacagagaatctctgtgtagaatttgaatatgacccaagctgagtattatctaaacaggttggtggaatgaatgcgcatgtaccttattatgctgacatactaaaaaaaataaaacctagtattgtatgaaggatagctattctttacagcatttagcaaacctgattcagaaaacatttgagattagcaaattagtaacttgaaataatgaaaaggacgtttataccaaattaaggaagaaaatgttgctgatttgggtttttcttcctgttcttaccactgactgaagcatgcctgcagtctcctcctctgttgaatgaaggataatcataaggtgtttgttaggagcgctagaccacctggaaaactttcttagctgtggagcagtgcgcagtgaccagttctctgctgtgagaggccgtttccattctttcctgctgaatatttttcctgttagtgtttatactgagctagtactgtaacttgcaaatgagtgcaaatttaaatgcaatgttttactcacaatttgcacattcacattttttggactgctagtttttctatttaaatatttgccttcatgttaggaatgtactatgtgaacatgacatatttgtagttaaccaaacacaccttcttagtccagtttagtactttttcttttcgtgtattcaaggttaaacacccaaacatttaaggatatgttgaaactacaccaatagagcatttcatatcataattaaaatgaatgttaggcttcttgtggccagttaatagttgatgagattggtgacattatttattgccacagcctattgtataaactatgcagagttaaatatttgcttgtaaaatattagccaatgttgtcattattttgatgtatttccttggttatgaccaaaaatatgttgagatactgaaactaatgtctgtgtgtttaaatgtttaccagcaaattgtcttatcatgttaatgagaatgttcaatgcctgtgtggtaaatagtaaatacaatggcataaaagtaactttctctgaagatgtgatgttcaggctgtgaaatatatatgtaaaagaaaaataaatgttatttgttaga

SEQ ID NO: 418214 - DNA, 4671 bp, Homo sapiens
aaattattctttaccactgcaaatgctcattttaaagttggatgccctgttttagccttggaggtactctccaaaattccaaaagtaaccaaaacatctgccttatctgcaaaaaaagatcagcctgacttcatttctcacaggatggatgatgtaccttcacattcaaaagctctgagtgatggcaatggaagttctggcattgaatggtcaaatgtaacttcatcacagtatgactggagtcagccaatagtaaaagttgatgaggaacctcttaatcttgattggggtgaagatcacgacagtgccttagatgaagaggaagacgatgctgttggtttagtgatgaaaagtacagatgccagggaaaaagataaacaatcagatcagaaggcctcagaccctaacatgttattaacacctcaggaagaggatgatcctgaaggtgatactgaagttgatgtgattgctgaacaactaaaattcagagcttgtttaaagatccttatgactgaattaagaacattggctacaggttatgaagtagatggaggaaaactcagatttcaactctataactggcttgaaaaggaaattgctgccttgcatgagatatgtaatcatgaatcagttattaaagagtattccagtaagacatattccaaagtagagagtgatctgctggatcaggaagaaatggtagacaaaccagatattggttcctatgagcgccatcaaatagaaagaagaagattgcaggccaaacgagagcatgcagaaagacgaaagtcgtggttgcagaaaaaccaagatctcctgagagtatttctcagctactgtagccttcatggggcccaaggtggtggtttggcttcagtaaggatggaactcaaatttttgctacaagaatcacaacaggaaactacagtaaagcagctccagtctccactaccactgcctaccaccctacctctgctttcagcaagtattgcgtcaacaaaaacagtcatagctaatcctgtattgtacttaaataatcacatccatgatatactttatactattgttcagatgaaaacaccacctcatcccagtattgaagatgtgaaggtgcacacacttcattcactagcagcatcactttctgcatcaatttaccaagcattatgtgacagtcatagctacagcagtcaaacagaaggaaatcagtttacaggaatggcttatcaaggacttcttttaagtgatcgtagaagactaaggacagaaagcattgaagaacacgcaacaccaaattcatctcctgctcaatggcctggtgtgagctcacttattaatcttttgagttcagcccaagatgaagaccagccaaaactgaacattttgctatgtgaagctgttgttgctgtttacttaagtttattgatacatgctcttgccacaaattcctccagtgaattatttcggcttgcagcccacccattaaataatcgaatgtgggctgctgtttttggaggcggtgtaaaacttgttgtgaaacctcgaagacaatcagaaaatatttcagcacctcctgtcctttctgaagacatagataaacaccgtaggagatttaacatgagaatgctcgtccctggaaggcctgtaaaagatgctaccccaccaccggtgcctgcagaaagaccatcttacaaagaaaaatttattcctcccgaacttagtatgtgggattattttgttgcaaagccatttcttcctttgtctgatagtggtgttatatatgattctgatgaaagcattcatagtgatgaagaagatgatgcctttttttcagatacacaaatacaggagcaccaagatccaaattcctatagctgggctcttctacatttgacaatggttaaactagcacttcacaatgtcaagaatttctttcctattgctggactggaattctctgagctgcctgtaacatcaccattaggtattgctgtgattaaaaacttggagaactgggaacagatcttgcaagagaaaatggatcagtttgaaggtccaccccctaactatatcaacacatatccaactgacctttcagtgggagctggaccagctattcttcgaaataaagcaatgctagaacctgaaaataccccattcaagtcccgggattcttctgcatttccagtcaaacgactttggcatttccttgttaaacaagaggtccttcaagagacatttattagatatattttcactaagaaaagaaagcagagtgagtctatagaagaacatgtggagcaggtcaaccaaaactgcatagcagaagattgccacatcaaggttgaagctgatctgggctatccaggtggaaaggcgaaagtcatccataaggaatctgatatgatcatggcattttctgttaataaggcaaattgtaatgaaattgttttggcttcaacacatgatgttcaagaacttgatgttacttctctactggcctgtcagtcatacatatggatcggagaagaatatgacagagaatccaaaagttcagatgatgttgattatcgtggttccactacaactctttatcaacccagtgcaacatcctattcagcaagtcaggtgcatccaccttcatctctgccatggctgggcactggacagactagcactggagctagtgtgcttatgaaaaggaatctacataatgttaagagaatgacttcacacccagtccatcaatactatcttacaggtgctcaggacggcagtgtacgaatgtttgaatggacgcggcctcagcaacttgtctgctttcgtcaagctggcaatgcaagagttactagattatattttaattcacaaggcaacaagtgtggtgttgcggatggagagggttttctgagtatctggcaagttaaccaaactgcatcaaatcctaaaccttatatgagttggcagtgccacagtaaagccacaagtgactttgcatttattacctcttcaagtctagttgccacatctggacactccaatgacaatagaaatgtttgcctctgggacacattaatatcacccggaaacagcctcattcatggtttcacgtgccacgatcatggtgccacggtactgcagtatgcacccaaacagcaactcctaatctcggggggtaggaaaggacacgtctgcatttttgacatcaggcaaaggcagctcattcacacgttccaggcccatgactcagctattaaggctctggccttggatccctatgaggaatattttaccacaggttcagcagaaggtaacataaaggtttggagattgacaggccatggcctaattcattcatttaaaagtgaacatgctaagcagtccatatttcgaaacattggggctggagtcatgcagattgacatcatccagggcaatcggctcttctcctgtggtgcagatggcacgctgaaaaccagggttttgcccaatgcttttaacatccctaacagaattcttgacattctataaagattggggttttatttttatatacatttcagttaaaaggcacactacagtcatcactaggcaattctgctttctaagcagttgtattgaaaacagagaatctctgtgtagaatttgaatatgacccaagctgagtattatctaaacaggttggtggaatgaatgcgcatgtaccttattatgctgacatactaaaaaaaataaaacctagtattgtatgaaggatagctattctttacagcatttagcaaacctgattcagaaaacatttgagattagcaaattagtaacttgaaataatgaaaaggacgtttataccaaattaaggaagaaaatgttgctgatttgggtttttcttcctgttcttaccactgactgaagcatgcctgcagtctcctcctctgttgaatgaaggataatcataaggtgtttgttaggagcgctagaccacctggaaaactttcttagctgtggagcagtgcgcagtgaccagttctctgctgtgagaggccgtttccattctttcctgctgaatatttttcctgttagtgtttatactgagctagtactgtaacttgcaaatgagtgcaaatttaaatgcaatgttttactcacaatttgcacattcacattttttggactgctagtttttctatttaaatatttgccttcatgttaggaatgtactatgtgaacatgacatatttgtagttaaccaaacacaccttcttagtccagtttagtactttttcttttcgtgtattcaaggttaaacacccaaacatttaaggatatgttgaaactacaccaatagagcatttcatatcataattaaaatgaatgttaggcttcttgtggccagttaatagttgatgagattggtgacattatttattgccacagcctattgtataaactatgcagagttaaatatttgcttcaaaaatatgttgagatactgaaactaatgtctgtgtgtttaaatgtttaccagcaaattgtcttatcatgttaatgagaatgttcaatgcctgtgtggtaaatagtaaatacaatggcataaaagtaactttctctgaagatgtgatgttcaggctgtgaaatatatatgtaaaagaaaaataaatgttatttgttaga

SEQ ID NO: 418215 - DNA, 2524 bp, Homo sapiens
aaattattctttaccactgcaaatgctcattttaaagttggatgccctgttttagccttggaggtactctccaaaattccaaaagtaaccaaaacatctgccttatctgcaaaaaaagatcagcctgacttcatttctcacaggatggatgatgtaccttcacattcaaaagctctgagtgatggcaatggaagttctggcattgaatggtcaaatgtaacttcatcacagtatgactggagtcagccaatagtaaaagttgatgaggaacctcttaatcttgattggggtgaagatcacgacagtgccttagatgaagaggaagacgatgctgttggtttagtgatgaaaagtacagatgccagggaaaaagataaacaatcagatcagaaggcctcagaccctaacatgttattaacacctcaggaagaggatgatcctgaaggtgatactgaagttgatgtgattgctgaacaactaaaattcagagcttgtttaaagatccttatgactgaattaagaacattggctacaggttatgaagtagatggaggaaaactcagatttcaactctataactggcttgaaaaggaaattgctgccttgcatgagatatgtaatcatgaatcagttattaaagagtattccagtaagacatattccaaagtagagagtgatctgctggatcaggaagaaatggtagacaaaccagatattggttcctatgagcgccatcaaatagaaagaagaagattgcaggccaaacgagagcatgcagaaagacgaaagtcgtggttgcagaaaaaccaagatctcctgagagtatttctcagctactgtagccttcatggggcccaaggtggtggtttggcttcagtaaggatggaactcaaatttttgctacaagaatcacaacaggaaactacagtaaagcagctccagtctccactaccactgcctaccaccctacctctgctttcagcaagtattgcgtcaacaaaaacagtcatagctaatcctgtattgtacttaaataatcacatccatgatatactttatactattgttcagatgaaaacaccacctcatcccagtattgaagatgtgaaggtgcacacacttcattcactagcagcatcactttctgcatcaatttaccaagcattatgtgacagtcatagctacagcagtcaaacagaaggaaatcagtttacaggaatggcttatcaaggacttcttttaagtgatcgtagaagactaaggacagaaagcattgaagaacacgcaacaccaaattcatctcctgctcaatggcctggtgtgagctcacttattaatcttttgagttcagcccaagatgaagaccagccaaaactgaacattttgctatgtgaagctgttgttgctgtttacttaagtttattgatacatgctcttgccacaaattcctccagtgaattatttcggcttgcagcccacccattaaataatcgaatgtgggctgctgtttttggaggcggtgtaaaacttgttgtgaaacctcgaagacaatcagaaaatatttcagcacctcctgtcctttctgaagacatagataaacaccgtaggagatttaacatgagaatgctcgtccctggaaggcctgtaaaagatgctaccccaccaccggtgcctgcagaaagaccatcttacaaagaaaaatttattcctcccgaacttagtatgtgggattattttgttgcaaagccatttcttcctttgtctgatagtggtgttatatatgattctgatgaaagcattcatagtgatgaagaagatgatgcctttttttcagatacacaaatacaggagcaccaagatccaaattcctatagctgggctcttctacatttgacaatggttaaactagcacttcacaatgtcaagaatttctttcctattgctggactggaattctctgagctgcctgtaacatcaccattaggtattgctgtgattaaaaacttggagaactgggaacagatcttgcaagagaaaatggatcagtttgaaggtccaccccctaactatatcaacacatatccaactgacctttcagtgggagctggaccagctattcttcgaaataaagcaatgctagaacctgaaaataccccattcaagtcccgggattcttctgcatttccagtcaaacgactttggcatttccttgttaaacaagaggtccttcaagagacatttattagatatattttcactaagaaaagaaagcagagtgaggttgaagctgatctgggctatccaggtggaaaggcgaaagtcatccataaggaatctgatatgatcatggcattttctgttaataagctattttgaggtttcttctttgtggtttgccttccctcctgcttttctccagactcttagaaattgttcatgcttgaggatggtgccatgatagtttctctcctcattttgttgaattcttttttttgttagtatgtgatataactaggatttaata

SEQ ID NO: 418216 - DNA, 381 bp, Homo sapiens
catgtatgttggtactgtatcaaattttatccaatggtaaaataacatcagttgcactttgtttttcgtagagttggcagtgccacagtaaagccacaagtgactttgcatttattacctcttcaagtctagttgccacatctggacactccaatgacaataggtaggttgacagaaaagcaaagtaagaaatataaaaacgttagaaatccatacctttagcaagaatacttttctattagtagggtttttccactctaggcattaaaaaaaaaaactttgttacataattcttatttcagagtgttttttcttaccaaaaagagaaaagcaaaaatgaaagttattcctaatatatgtaatttttattttaaagctatt

SEQ ID NO: 418217 - DNA, 462 bp, Homo sapiens
aacaacaaacttttgtttcaacttgtgcagcaataaagttgtccccaaacaacattaggactaaatttacattttgccaaaagggaaaaaagttaacccagtattaacattgggcgattaggacttgtaccctaagtttttctcatggctacttagtttttaaaataaagattgtcctatgggtacataagaagatttttagttggaatttgtgttaagagaaaagggaatgttcacagtaacacatgaatgtttttcacagttcagatgatgttgattatcgtggttccactacaactctttatcaacccagtgcaacatcctattcagcaagtcaggtgcatccaccttcatctctgccatggctgggcactggacagactagcactggagctagtgtggtatgttatttacttataggtatcatttctggatttggactctgaaaaatcagttggaatc

SEQ ID NO: 418218 - DNA, 406 bp, Homo sapiens
attgctgtgattaaaaacttggagaactgggaacagatcttgcaagagaaaatggatcagtttgaaggtccaccccctaactatatcaacacatatccaactgacctttcagtgggagctggaccagctattcttcgaaataaagcaatgctagaacctgaaaataccccattcaagtaagaaagctcttataatgctgataaagagcgtagcttaacttttctggaagacagtttggctaaatatgccaatatactttaaaacattcataattttgaacctgcagtcctatttttagcagaatacgcttaagaaaaatatcagaaatttgaatagaatttttcccagtattatctgtaattcatagacattccatttacataaaggaaaaagtctttattgtatt

SEQ ID NO: 418219 - DNA, 4661 bp, Homo sapiens
aaattattctttaccactgcaaatgctcattttaaagttggatgccctgttttagccttggaggtactctccaaaattccaaaagtaaccaaaacatctgccttatctgcaaaaaaagatcagcctgacttcatttctcacaggatggatgatgtaccttcacattcaaaagctctgagtgatggcaatggaagttctggcattgaatggtcaaatgtaacttcatcacagtatgactggagtcagccaatagtaaaagttgatgaggaacctcttaatcttgattggggtgaagatcacgacagtgccttagatgaagaggaagacgatgctgttggtttagtgatgaaaagtacagatgccagggaaaaagataaacaatcagatcagaaggcctcagaccctaacatgttattaacacctcaggaagaggatgatcctgaaggtgatactgaagttgatgtgattgctgaacaactaaaattcagagcttgtttaaagatccttatgactgaattaagaacattggctacaggttatgaagtagatggaggaaaactcagatttcaactctataactggcttgaaaaggaaattgctgccttgcatgagatatgtaatcatgaatcagttattaaagagtattccagtaagacatattccaaagtagagagtgatctgctggatcaggaagaaatggtagacaaaccagatattggttcctatgagcgccatcaaatagaaagaagaagattgcaggccaaacgagagcatgcagaaagacgaaagtcgtggttgcagaaaaaccaagatctcctgagagtatttctcagctactgtagccttcatggggcccaaggtggtggtttggcttcagtaaggatggaactcaaatttttgctacaagaatcacaacaggaaactacagtaaagcagctccagtctccactaccactgcctaccaccctacctctgctttcagcaagtattgcgtcaacaaaaacagtcatagctaatcctgtattgtacttaaataatcacatccatgatatactttatactattgttcagatgaaaacaccacctcatcccagtattgaagatgtgaaggtgcacacacttcattcactagcagcatcactttctgcatcaatttaccaagcattatgtgacagtcatagctacagcagtcaaacagaaggaaatcagtttacaggaatggcttatcaaggacttcttttaagtgatcgtagaagactaaggacagaaagcattgaagaacacgcaacaccaaattcatctcctgctcaatggcctggtgtgagctcacttattaatcttttgagttcagcccaagatgaagaccagccaaaactgaacattttgctatgtgaagctgttgttgctgtttacttaagtttattgatacatgctcttgccacaaattcctccagtgaattatttcggcttgcagcccacccattaaataatcgaatgtgggctgctgtttttggaggcggtgtaaaacttgttgtgaaacctcgaagacaatcagaaaatatttcagcacctcctgtcctttctgaagacatagataaacaccgtaggagatttaacatgagaatgctcgtccctggaaggcctgtaaaagatgctaccccaccaccggtgcctgcagaaagaccatcttacaaagaaaaatttattcctcccgaacttagtatgtgggattattttgttgcaaagccatttcttcctttgtctgatagtggtgttatatatgattctgatgaaagcattcatagtgatgaagaagatgatgcctttttttcagatacacaaatacaggagcaccaagatccaaattcctatagctgggctcttctacatttgacaatggttaaactagcacttcacaatgtcaagaatttctttcctattgctggactggaattctctgagctgcctgtaacatcaccattaggtattgctgtgattaaaaacttggagaactgggaacagatcttgcaagagaaaatggatcagtttgaaggtccaccccctaactatatcaacacatatccaactgacctttcagtgggagctggaccagctattcttcgaaataaagcaatgctagaacctgaaaataccccattcaagtcccgggattcttctgcatttccagtcaaacgactttggcatttccttgttaaacaagaggtccttcaagagacatttattagatatattttcactaagaaaagaaagcagagtgaggttgaagctgatctgggctatccaggtggaaaggcgaaagtcatccataaggaatctgatatgatcatggcattttctgttaataaggcaaattgtaatgaaattgttttggcttcaacacatgatgttcaagaacttgatgttacttctctactggcctgtcagtcatacatatggatcggagaagaatatgacagagaatccaaaagttcagatgatgttgattatcgtggttccactacaactctttatcaacccagtgcaacatcctattcagcaagtcaggtgcatccaccttcatctctgccatggctgggcactggacagactagcactggagctagtgtgcttatgaaaaggaatctacataatgttaagagaatgacttcacacccagtccatcaatactatcttacaggtgctcaggacggcagtgtacgaatgtttgaatggacgcggcctcagcaacttgtctgctttcgtcaagctggcaatgcaagagttactagattatattttaattcacaaggcaacaagtgtggtgttgcggatggagagggttttctgagtatctggcaagttaaccaaactgcatcaaatcctaaaccttatatgagttggcagtgccacagtaaagccacaagtgactttgcatttattacctcttcaagtctagttgccacatctggacactccaatgacaatagaaatgtttgcctctgggacacattaatatcacccggaaacagcctcattcatggtttcacgtgccacgatcatggtgccacggtactgcagtatgcacccaaacagcaactcctaatctcggggggtaggaaaggacacgtctgcatttttgacatcaggcaaaggcagctcattcacacgttccaggcccatgactcagctattaaggctctggccttggatccctatgaggaatattttaccacaggttcagcagaaggtaacataaaggtttggagattgacaggccatggcctaattcattcatttaaaagtgaacatgctaagcagtccatatttcgaaacattggggctggagtcatgcagattgacatcatccagggcaatcggctcttctcctgtggtgcagatggcacgctgaaaaccagggttttgcccaatgcttttaacatccctaacagaattcttgacattctataaagattggggttttatttttatatacatttcagttaaaaggcacactacagtcatcactaggcaattctgctttctaagcagttgtattgaaaacagagaatctctgtgtagaatttgaatatgacccaagctgagtattatctaaacaggttggtggaatgaatgcgcatgtaccttattatgctgacatactaaaaaaaataaaacctagtattgtatgaaggatagctattctttacagcatttagcaaacctgattcagaaaacatttgagattagcaaattagtaacttgaaataatgaaaaggacgtttataccaaattaaggaagaaaatgttgctgatttgggtttttcttcctgttcttaccactgactgaagcatgcctgcagtctcctcctctgttgaatgaaggataatcataaggtgtttgttaggagcgctagaccacctggaaaactttcttagctgtggagcagtgcgcagtgaccagttctctgctgtgagaggccgtttccattctttcctgctgaatatttttcctgttagtgtttatactgagctagtactgtaacttgcaaatgagtgcaaatttaaatgcaatgttttactcacaatttgcacattcacattttttggactgctagtttttctatttaaatatttgccttcatgttaggaatgtactatgtgaacatgacatatttgtagttaaccaaacacaccttcttagtccagtttagtactttttcttttcgtgtattcaaggttaaacacccaaacatttaaggatatgttgaaactacaccaatagagcatttcatatcataattaaaatgaatgttaggcttcttgtggccagttaatagttgatgagattggtgacattatttattgccacagcctattgtataaactatgcagagttaaatatttgcttgtaaaatattagccaatgttgtcattattttgatgtatttccttggttatgaccaaaaatatgttgagatactgaaactaatgtctgtgtgtttaaatgtttaccagcaaattgtcttatcatgttaatgagaatgttcaatgcctgtgtggtaaatagtaaatacaatggcataaaagtaactttctctgaagatgtgatgttcaggctgtgaaatatatatgtaaaagaaaaataaatgttatttgttaga

SEQ ID NO: 418220 - DNA, 4671 bp, Homo sapiens
aaattattctttaccactgcaaatgctcattttaaagttggatgccctgttttagccttggaggtactctccaaaattccaaaagtaaccaaaacatctgccttatctgcaaaaaaagatcagcctgacttcatttctcacaggatggatgatgtaccttcacattcaaaagctctgagtgatggcaatggaagttctggcattgaatggtcaaatgtaacttcatcacagtatgactggagtcagccaatagtaaaagttgatgaggaacctcttaatcttgattggggtgaagatcacgacagtgccttagatgaagaggaagacgatgctgttggtttagtgatgaaaagtacagatgccagggaaaaagataaacaatcagatcagaaggcctcagaccctaacatgttattaacacctcaggaagaggatgatcctgaaggtgatactgaagttgatgtgattgctgaacaactaaaattcagagcttgtttaaagatccttatgactgaattaagaacattggctacaggttatgaagtagatggaggaaaactcagatttcaactctataactggcttgaaaaggaaattgctgccttgcatgagatatgtaatcatgaatcagttattaaagagtattccagtaagacatattccaaagtagagagtgatctgctggatcaggaagaaatggtagacaaaccagatattggttcctatgagcgccatcaaatagaaagaagaagattgcaggccaaacgagagcatgcagaaagacgaaagtcgtggttgcagaaaaaccaagatctcctgagagtatttctcagctactgtagccttcatggggcccaaggtggtggtttggcttcagtaaggatggaactcaaatttttgctacaagaatcacaacaggaaactacagtaaagcagctccagtctccactaccactgcctaccaccctacctctgctttcagcaagtattgcgtcaacaaaaacagtcatagctaatcctgtattgtacttaaataatcacatccatgatatactttatactattgttcagatgaaaacaccacctcatcccagtattgaagatgtgaaggtgcacacacttcattcactagcagcatcactttctgcatcaatttaccaagcattatgtgacagtcatagctacagcagtcaaacagaaggaaatcagtttacaggaatggcttatcaaggacttcttttaagtgatcgtagaagactaaggacagaaagcattgaagaacacgcaacaccaaattcatctcctgctcaatggcctggtgtgagctcacttattaatcttttgagttcagcccaagatgaagaccagccaaaactgaacattttgctatgtgaagctgttgttgctgtttacttaagtttattgatacatgctcttgccacaaattcctccagtgaattatttcggcttgcagcccacccattaaataatcgaatgtgggctgctgtttttggaggcggtgtaaaacttgttgtgaaacctcgaagacaatcagaaaatatttcagcacctcctgtcctttctgaagacatagataaacaccgtaggagatttaacatgagaatgctcgtccctggaaggcctgtaaaagatgctaccccaccaccggtgcctgcagaaagaccatcttacaaagaaaaatttattcctcccgaacttagtatgtgggattattttgttgcaaagccatttcttcctttgtctgatagtggtgttatatatgattctgatgaaagcattcatagtgatgaagaagatgatgcctttttttcagatacacaaatacaggagcaccaagatccaaattcctatagctgggctcttctacatttgacaatggttaaactagcacttcacaatgtcaagaatttctttcctattgctggactggaattctctgagctgcctgtaacatcaccattaggtattgctgtgattaaaaacttggagaactgggaacagatcttgcaagagaaaatggatcagtttgaaggtccaccccctaactatatcaacacatatccaactgacctttcagtgggagctggaccagctattcttcgaaataaagcaatgctagaacctgaaaataccccattcaagtcccgggattcttctgcatttccagtcaaacgactttggcatttccttgttaaacaagaggtccttcaagagacatttattagatatattttcactaagaaaagaaagcagagtgagtctatagaagaacatgtggagcaggtcaaccaaaactgcatagcagaagattgccacatcaaggttgaagctgatctgggctatccaggtggaaaggcgaaagtcatccataaggaatctgatatgatcatggcattttctgttaataaggcaaattgtaatgaaattgttttggcttcaacacatgatgttcaagaacttgatgttacttctctactggcctgtcagtcatacatatggatcggagaagaatatgacagagaatccaaaagttcagatgatgttgattatcgtggttccactacaactctttatcaacccagtgcaacatcctattcagcaagtcaggtgcatccaccttcatctctgccatggctgggcactggacagactagcactggagctagtgtgcttatgaaaaggaatctacataatgttaagagaatgacttcacacccagtccatcaatactatcttacaggtgctcaggacggcagtgtacgaatgtttgaatggacgcggcctcagcaacttgtctgctttcgtcaagctggcaatgcaagagttactagattatattttaattcacaaggcaacaagtgtggtgttgcggatggagagggttttctgagtatctggcaagttaaccaaactgcatcaaatcctaaaccttatatgagttggcagtgccacagtaaagccacaagtgactttgcatttattacctcttcaagtctagttgccacatctggacactccaatgacaataggtttcacgtgccacgatcatggtgccacggtactgcagtatgcacccaaacagcaactcctaatctcggggggtaggaaaggacacgtctgcatttttgacatcaggcaaaggcagctcattcacacgttccaggcccatgactcagctattaaggctctggccttggatccctatgaggaatattttaccacaggttcagcagaaggtaacataaaggtttggagattgacaggccatggcctaattcattcatttaaaagtgaacatgctaagcagtccatatttcgaaacattggggctggagtcatgcagattgacatcatccagggcaatcggctcttctcctgtggtgcagatggcacgctgaaaaccagggttttgcccaatgcttttaacatccctaacagaattcttgacattctataaagattggggttttatttttatatacatttcagttaaaaggcacactacagtcatcactaggcaattctgctttctaagcagttgtattgaaaacagagaatctctgtgtagaatttgaatatgacccaagctgagtattatctaaacaggttggtggaatgaatgcgcatgtaccttattatgctgacatactaaaaaaaataaaacctagtattgtatgaaggatagctattctttacagcatttagcaaacctgattcagaaaacatttgagattagcaaattagtaacttgaaataatgaaaaggacgtttataccaaattaaggaagaaaatgttgctgatttgggtttttcttcctgttcttaccactgactgaagcatgcctgcagtctcctcctctgttgaatgaaggataatcataaggtgtttgttaggagcgctagaccacctggaaaactttcttagctgtggagcagtgcgcagtgaccagttctctgctgtgagaggccgtttccattctttcctgctgaatatttttcctgttagtgtttatactgagctagtactgtaacttgcaaatgagtgcaaatttaaatgcaatgttttactcacaatttgcacattcacattttttggactgctagtttttctatttaaatatttgccttcatgttaggaatgtactatgtgaacatgacatatttgtagttaaccaaacacaccttcttagtccagtttagtactttttcttttcgtgtattcaaggttaaacacccaaacatttaaggatatgttgaaactacaccaatagagcatttcatatcataattaaaatgaatgttaggcttcttgtggccagttaatagttgatgagattggtgacattatttattgccacagcctattgtataaactatgcagagttaaatatttgcttgtaaaatattagccaatgttgtcattattttgatgtatttccttggttatgaccaaaaatatgttgagatactgaaactaatgtctgtgtgtttaaatgtttaccagcaaattgtcttatcatgttaatgagaatgttcaatgcctgtgtggtaaatagtaaatacaatggcataaaagtaactttctctgaagatgtgatgttcaggctgtgaaatatatatgtaaaagaaaaataaatgttatttgttaga

SEQ ID NO: 418221 - DNA, 2548 bp, Homo sapiens
ctacatttaaatcttatgggatgtgcataactctaaatagagctgtgctgcagcaactaaaactgctgatgaatgttttctaggttgaagctgatctgggctatccaggtggaaaggcgaaagtcatccataaggaatctgatatgatcatggcattttctgttaataagaaggtaaaagctctcatcattatacacagtgtatttctccttagtgaaattgcttaaatcatcgattctgcctttgctttataggcaaattgtaatgaaattgttttggcttcaacacatgatgttcaagaacttgatgttacttctctactggcctgtcagtcatacatatggatcggagaagaatatgacagagaatccaaaagttcagatgatgttgattatcgtggttccactacaactctttatcaacccagtgcaacatcctattcagcaagtcaggtgcatccaccttcatctctgccatggctgggcactggacagactagcactggagctagtgtgcttatgaaaaggaatctacataatgttaagagaatgacttcacacccagtccatcaatactatcttacaggtgctcaggacggcagtgtacgaatgtttgaatggacgcggcctcagcaacttgtctgctttcgtcaagctggcaatgcaagagttactagattatattttaattcacaaggcaacaagtgtggtgttgcggatggagagggttttctgagtatctggcaagttaaccaaactgcatcaaatcctaaaccttatatgagttggcagtgccacagtaaagccacaagtgactttgcatttattacctcttcaagtctagttgccacatctggacactccaatgacaatagaaatgtttgcctctgggacacattaatatcacccggaaacagcctcattcatggtttcacgtgccacgatcatggtgccacggtactgcagtatgcacccaaacagcaactcctaatctcggggggtaggaaaggacacgtctgcatttttgacatcaggcaaaggcagctcattcacacgttccaggcccatgactcagctattaaggctctggccttggatccctatgaggaatattttaccacaggttcagcagaaggtaacataaaggtttggagattgacaggccatggcctaattcattcatttaaaagtgaacatgctaagcagtccatatttcgaaacattggggctggagtcatgcagattgacatcatccagggcaatcggctcttctcctgtggtgcagatggcacgctgaaaaccagggttttgcccaatgcttttaacatccctaacagaattcttgacattctataaagattggggttttatttttatatacatttcagttaaaaggcacactacagtcatcactaggcaattctgctttctaagcagttgtattgaaaacagagaatctctgtgtagaatttgaatatgacccaagctgagtattatctaaacaggttggtggaatgaatgcgcatgtaccttattatgctgacatactaaaaaaaataaaacctagtattgtatgaaggatagctattctttacagcatttagcaaacctgattcagaaaacatttgagattagcaaattagtaacttgaaataatgaaaaggacgtttataccaaattaaggaagaaaatgttgctgatttgggtttttcttcctgttcttaccactgactgaagcatgcctgcagtctcctcctctgttgaatgaaggataatcataaggtgtttgttaggagcgctagaccacctggaaaactttcttagctgtggagcagtgcgcagtgaccagttctctgctgtgagaggccgtttccattctttcctgctgaatatttttcctgttagtgtttatactgagctagtactgtaacttgcaaatgagtgcaaatttaaatgcaatgttttactcacaatttgcacattcacattttttggactgctagtttttctatttaaatatttgccttcatgttaggaatgtactatgtgaacatgacatatttgtagttaaccaaacacaccttcttagtccagtttagtactttttcttttcgtgtattcaaggttaaacacccaaacatttaaggatatgttgaaactacaccaatagagcatttcatatcataattaaaatgaatgttaggcttcttgtggccagttaatagttgatgagattggtgacattatttattgccacagcctattgtataaactatgcagagttaaatatttgcttgtaaaatattagccaatgttgtcattattttgatgtatttccttggttatgaccaaaaatatgttgagatactgaaactaatgtctgtgtgtttaaatgtttaccagcaaattgtcttatcatgttaatgagaatgttcaatgcctgtgtggtaaatagtaaatacaatggcataaaagtaactttctctgaagatgtgatgttcaggctgtgaaatatatatgtaaaagaaaaataaatgttatttgttaga

SEQ ID NO: 418222 - DNA, 4803 bp, Homo sapiens
aaattattctttaccactgcaaatgctcattttaaagttggatgccctgttttagccttggaggtactctccaaaattccaaaagtaaccaaaacatctgccttatctgcaaaaaaagatcagcctgacttcatttctcacaggatggatgatgtaccttcacattcaaaagctctgagtgatggcaatggaagttctggcattgaatggtcaaatgtaacttcatcacagtatgactggagtcagccaatagtaaaagttgatgaggaacctcttaatcttgattggggtgaagatcacgacagtgccttagatgaagaggaagacgatgctgttggtttagtgatgaaaagtacagatgccagggaaaaagataaacaatcagatcagaaggcctcagaccctaacatgttattaacacctcaggaagaggatgatcctgaaggtgatactgaagttgatgtgattgctgaacaactaaaattcagagcttgtttaaagatccttatgactgaattaagaacattggctacaggttatgaagtagatggaggaaaactcagatttcaactctataactggcttgaaaaggaaattgctgccttgcatgagatatgtaatcatgaatcagttattaaagagtattccagtaagacatattccaaagtagagagtgatctgctggatcaggaagaaatggtagacaaaccagatattggttcctatgagcgccatcaaatagaaagaagaagattgcaggccaaacgagagcatgcagaaagacgaaagtcgtggttgcagaaaaaccaagatctcctgagagtatttctcagctactgtagccttcatggggcccaaggtggtggtttggcttcagtaaggatggaactcaaatttttgctacaagaatcacaacaggaaactacagtaaagcagctccagtctccactaccactgcctaccaccctacctctgctttcagcaagtattgcgtcaacaaaaacagtcatagctaatcctgtattgtacttaaataatcacatccatgatatactttatactattgttcagatgaaaacaccacctcatcccagtattgaagatgtgaaggtgcacacacttcattcactagcagcatcactttctgcatcaatttaccaagcattatgtgacagtcatagctacagcagtcaaacagaaggaaatcagtttacaggaatggcttatcaaggacttcttttaagtgatcgtagaagactaaggacagaaagcattgaagaacacgcaacaccaaattcatctcctgctcaatggcctggtgtgagctcacttattaatcttttgagttcagcccaagatgaagaccagccaaaactgaacattttgctatgtgaagctgttgttgctgtttacttaagtttattgatacatgctcttgccacaaattcctccagtgaattatttcggcttgcagcccacccattaaataatcgaatgtgggctgctgtttttggaggcggtgtaaaacttgttgtgaaacctcgaagacaatcagaaaatatttcagcacctcctgtcctttctgaagacatagataaacaccgtaggagatttaacatgagaatgctcgtccctggaaggcctgtaaaagatgctaccccaccaccggtgcctgcagaaagaccatcttacaaagaaaaatttattcctcccgaacttagtatgtgggattattttgttgcaaagccatttcttcctttgtctgatagtggtgttatatatgattctgatgaaagcattcatagtgatgaagaagatgatgcctttttttcagatacacaaatacaggagcaccaagatccaaattcctatagctgggctcttctacatttgacaatggttaaactagcacttcacaatgtcaagaatttctttcctattgctggactggaattctctgagctgcctgtaacatcaccattaggtattgctgtgattaaaaacttggagaactgggaacagatcttgcaagagaaaatggatcagtttgaaggtccaccccctaactatatcaacacatatccaactgacctttcagtgggagctggaccagctattcttcgaaataaagcaatgctagaacctgaaaataccccattcaagtcccgggattcttctgcatttccagtcaaacgactttggcatttccttgttaaacaagaggtccttcaagagacatttattagatatattttcactaagaaaagaaagcagagtgagtctatagaagaacatgtggagcaggtcaaccaaaactgcatagcagaagattgccacatcaaggttgaagctgatctgggctatccaggtggaaaggcgaaagtcatccataaggaatctgatatgatcatggcattttctgttaataaggcaaattgtaatgaaattgttttggcttcaacacatgatgttcaagaacttgatgttacttctctactggcctgtcagtcatacatatggatcggagaagaatatgacagagaatccaaaagttcagatgatgttgattatcgtggttccactacaactctttatcaacccagtgcaacatcctattcagcaagtcaggtgcatccaccttcatctctgccatggctgggcactggacagactagcactggagctagtgtgcttatgaaaaggaatctacataatgttaagagaatgacttcacacccagtccatcaatactatcttacaggtgctcaggacggcagtgtacgaatgtttgaatggacgcggcctcagcaacttgtctgctttcgtcaagctggcaatgcaagagttactagattatattttaattcacaaggcaacaagtgtggtgttgcggatggagagggttttctgagtatctggcaagttaaccaaactgcatcaaatcctaaaccttatatgagttggcagtgccacagtaaagccacaagtgactttgcatttattacctcttcaagtctagttgccacatctggacactccaatgacaatagaaatgtttgcctctgggacacattaatatcacccggaaacagcctcattcatggtttcacgtgccacgatcatggtgccacggtactgcagtatgcacccaaacagcaactcctaatctcggggggtaggaaaggacacgtctgcatttttgacatcaggcaaaggcagctcattcacacgttccaggcccatgactcagctattaaggctctggccttggatccctatgaggaatattttaccacaggttcagcagaaggtaacataaaggtttggagattgacaggccatggcctaattcattcatttaaaagtgaacatgctaagcagtccatatttcgaaacattggggctggagtcatgcagattgacatcatccagggcaatcggctcttctcctgtggtgcagatggcacgctgaaaaccagggttttgcccaatgcttttaacatccctaacagaattcttgacattctataaagattggggttttatttttatatacatttcagttaaaaggcacactacagtcatcactaggcaattctgctttctaagcagttgtattgaaaacagagaatctctgtgtagaatttgaatatgacccaagctgagtattatctaaacaggttggtggaatgaatgcgcatgtaccttattatgctgacatactaaaaaaaataaaacctagtattgtatgaaggatagctattctttacagcatttagcaaacctgattcagaaaacatttgagattagcaaattagtaacttgaaataatgaaaaggacgtttataccaaattaaggaagaaaatgttgctgatttgggtttttcttcctgttcttaccactgactgaagcatgcctgcagtctcctcctctgttgaatgaaggataatcataaggtgtttgttaggagcgctagaccacctggaaaactttcttagctgtggagcagtgcgcagtgaccagttctctgctgtgagaggccgtttccattctttcctgctgaatatttttcctgttagtgtttatactgagctagtactgtaacttgcaaatgagtgcaaatttaaatgcaatgttttactcacaatttgcacattcacattttttggactgctagtttttctatttaaatatttgccttcatgttaggaatgtactatgtgaacatgacatatttgtagttaaccaaacacaccttcttagtccagtttagtactttttcttttcgtgtattcaaggttaaacacccaaacatttaaggatatgttgaaactacaccaatagagcatttcatatcataattaaaatgaatgttaggcttcttgtggccagttaatagttgatgagattggtgacattatttattgccacagcctattgtataaactatgcagagttaaatatttgcttgtaaaatattagccaatgttgtcattattttgatgtatttccttggttatgaccaaaaatatgttgagatactgaaactaatgtctgtgtgtttaaatgtttaccagcaaattgtcttatcatgttaatgagaatgttcaatgcctgtgtggtaaatagtaaatacaatggcataaaagtaactttctctgaagatgtgatgttcaggctgtgaaatatatatgtaaaagaaaaataaatgttatttgttagagtttttagtttgatactgtttttgaccattgagatttttaatttgataaaatgtttaactgttagagaatttgcaagct

SEQ ID NO: 418223 - DNA, 2950 bp, Homo sapiens
aaattattctttaccactgcaaatgctcattttaaagttggatgccctgttttagccttggaggtactctccaaaattccaaaagtaaccaaaacatctgccttatctgcaaaaaaagatcagcctgacttcatttctcacaggatggatgatgtaccttcacattcaaaagctctgagtgatggcaatggaagttctggcattgaatggtcaaatgtaacttcatcacagtatgactggagtcagccaatagtaaaagttgatgaggaacctcttaatcttgattggggtgaagatcacgacagtgccttagatgaagaggaagacgatgctgttggtttagtgatgaaaagtacagatgccagggaaaaagataaacaatcagatcagaaggcctcagaccctaacatgttattaacacctcaggaagaggatgatcctgaaggtgatactgaagttgatgtgattgctgaacaactaaaattcagagcttgtttaaagatccttatgactgaattaagaacattggctacaggttatgaagtagatggaggaaaactcagatttcaactctataactggcttgaaaaggaaattgctgccttgcatgagatatgtaatcatgaatcagttattaaagagtattccagtaagacatattccaaagtagagagtgatctgctggatcaggaagaaatggtagacaaaccagatattggttcctatgagcgccatcaaatagaaagaagaagattgcaggccaaacgagagcatgcagaaagacgaaagtcgtggttgcagaaaaaccaagatctcctgagagtatttctcagctactgtagccttcatggggcccaaggtggtggtttggcttcagtaaggatggaactcaaatttttgctacaagaatcacaacaggaaactacagtaaagcagctccagtctccactaccactgcctaccaccctacctctgctttcagcaagtattgcgtcaacaaaaacagtcatagctaatcctgtattgtacttaaataatcacatccatgatatactttatactattgttcagatgaaaacaccacctcatcccagtattgaagatgtgaaggtgcacacacttcattcactagcagcatcactttctgcatcaatttaccaagcattatgtgacagtcatagctacagcagtcaaacagaaggaaatcagtttacaggaatggcttatcaaggacttcttttaagtgatcgtagaagactaaggacagaaagcattgaagaacacgcaacaccaaattcatctcctgctcaatggcctggtgtgagctcacttattaatcttttgagttcagcccaagatgaagaccagccaaaactgaacattttgctatgtgaagctgttgttgctgtttacttaagtttattgatacatgctcttgccacaaattcctccagtgaattatttcggcttgcagcccacccattaaataatcgaatgtgggctgctgtttttggaggcggtgtaaaacttgttgtgaaacctcgaagacaatcagaaaatatttcagcacctcctgtcctttctgaagacatagataaacaccgtaggagatttaacatgagaatgctcgtccctggaaggcctgtaaaagatgctaccccaccaccggtgcctgcagaaagaccatcttacaaagaaaaatttattcctcccgaacttagtatgtgggattattttgttgcaaagccatttcttcctttgtctgatagtggtgttatatatgattctgatgaaagcattcatagtgatgaagaagatgatgcctttttttcagatacacaaatacaggagcaccaagatccaaattcctatagctgggctcttctacatttgacaatggttaaactagcacttcacaatgtcaagaatttctttcctattgctggactggaattctctgagctgcctgtaacatcaccattaggtattgctgtgattaaaaacttggagaactgggaacagatcttgcaagagaaaatggatcagtttgaaggtccaccccctaactatatcaacacatatccaactgacctttcagtgggagctggaccagctattcttcgaaataaagcaatgctagaacctgaaaataccccattcaagtcccgggattcttctgcatttccagtcaaacgactttggcatttccttgttaaacaagaggtccttcaagagacatttattagatatattttcactaagaaaagaaagcagagtgaggtattttgagaaaaatattttctattgtaatttttctttagttttctttaacatttctaaggaaatcagtgcttgatttattctgaaattttctttctggttgggtaatagtcaaagttcactaaactaccgtgaactacttttaagataaaaccttataattttcatttcatagcaatgaaacaacataggtactttgataaattacatatattcaagtgaaagttggtactttacagtatttgtcattaggtttttacacataataaacattgtgatggatggcttgaggaatttaatatataagcttactctataatattctccaaatatgtacttaaaatataaaatagccctttaaaagcattttctttacttagcacttagaaatgaacagaatgatgatttgaagcaacaaattcaggatacttttgtgagagaataaactacagaaatagcaaatacaagatgaaggaagattgctcttacaaagcaagacagaggttctgcattgcatggttatttttaagctaatacaattagtaatgtaatagcagacatggttcaagaagaattagcagtttgggagattggcaagtgacctcttccttataaaagtgggaccttttatatgagcatttcagtctgtttggctatttagtgaggtaat

SEQ ID NO: 418224 - DNA, 600 bp, Homo sapiens
ccgggggagaaagcgacgcggccgctcgtaagtgctccggatggaaactggtgcagggggcagcggcgttccgcggccggaagggaagggggaggtgccgaggctgcgcgccggctgctcctccccacccccagcctttgccctgaagggggctggatgggcaaggcggccgcgatggctcgagctcgggcggtggcggcggtggccggaggcggcggtgcctcctcctcctcgccccggcgccggcggtgatccgagcgagcggccgcggcccccgatgagactgctggcgggctggctgtgcctgagcctggcgtccgtgtggctggcgcggaggatgtggacgctgcggagcccgctcacccgctccctgtacgtgaacatgactagcggcccgggtgggccggcggcggccgcgggcggcaggaaggagaaccaccaggtacgggctggggccggggccggggcgggggcgtggcggcccggccttcccgcgctgggcccggctattgtgcgggacggctccgcgagggggcggcccggccctcgcccctccgcctcggccccttggaaagttttccccgcgccttccccgccggg

SEQ ID NO: 418225 - DNA, 122 bp, Homo sapiens
tctcctcatttgtaattcaggaggctctctgagaagagacagcaaagcttcttagatggatcgaaagaccacgagctgggataccaagttctatgaaaagcctgttacattaggcaacaaga

SEQ ID NO: 418226 - DNA, 3043 bp, Homo sapiens
gggaaaggcaacttaatctggtcactggagtgttaaattctgttgcttactttgctatttgggtttgtttggtgattttgagttaaggcattggattatgtgactgttttcttgtctaaaaacaaggatgctgctagctgtttgccttctgatgttgaatctcagtgaaagagaggccagcagagctttctaaatctcggtggtatgtgtgcaacagagagaaattatgcgaatcactccaggctgtctttgttcagagttaccttgatcaaggaacacagatcttcttaaacaacagcattgagaaatcgggctggctatttatccaattatatcattcttttgtgtcatctgtttttagcctgtttatgtctagaacatctatcaatgggttgctaggaagaggctcaatgtttgtgttttcaccagatcagtttcagagactgcttaaaattaatccagactggaaaacccacagacttcttgatttaggtgctggagatggagaagtcacaaaaatcatgagccctcattttgaagaaatctatgccactgagctttctgaaactatgatatggcagcttcagaaaaagaaatacagagtccttggtataaatgaatggcagaatacggggttccagtatgatgtcatcagctgcctgaacttgctggaccgctgtgatcagcccctgactttgttaaaagatatcagaagtgtcttggagccaactagaggcagggtcatccttgcccttgtcctcccctttcatccctatgtggaaaactaggtggcaagtgggagaaaccatcagaaattttggaaatcaaaggacagaactgggaagaacaagtgaatagtctgcctgaagttttcagaaaagctggttttgttatcgaagctttcaccagactaccatacctgtgtgaaggcgacatgtataatgactactacgttctggatgacgctgtctttgttctcaaaccagtataaacacgtggaggtcgaagtcttcagagtccgcaccctccgggatgtgcccttggaagagggtctgtgttcacaattacgtgaagggaggacccttggggaccgccattctaaatatcatgtaggaatttaaaaagccaaaatactaattatttctttgtagtgtgtaaaggaatgtttttaaaagacaaaaacccaactctttgtggatttttatcaactctttactcagagccactctccaatgcaggtcacactccaattatgatggaagatattttttatacttaattgcagtagggactcattcccagacaaagcaatagtcacgacttcatggaaccaatcaatggattgttttttgaagactggcaataaagctgtccattcaattccaaatactggttttaaggtatagccactgatattctttcatgtttagaaattctttctgttattattcaagaaaatgtttttaatcatgctaataaacttttttggagatgactttggcatcatgtttgaattcatataaagctcccctagcattttttattggtttggcttcaggagtacccaaatagtagcattatgagaatgacgcagacaatttgaataggggggaaggaaggcttcagacttgggggaaggggagattattgcaaattgcagtgaacactgagtcagtaaaaaaaaaaaacagaaacaaaaacccagcctcattcagatacagaacttcagggacccctccccccacccccccagttaatgctgctgtgaaaaatgcaaaataacctggttctgactttgtgatcactcatgtcccatacactgaactttgtttttttctggacaatctcaggttctcagaattgaaacattcagttttgtctactgacaaaatgcaactaaaaatgttttaattcaacttcttactctacacttatatacctctctcccagagcttggctcttccctgaaatccttaaaggagtttattatttgccaagaatatggtttgatgaagaccgtgtcagactcatgcattctggaatccgtgagtgcctccaaccataaacccagaaatgctgccatagaggaacccattagcaagatcaataaccatcgtggatattccaaagagcagagcatttaacccagaatctgaaatctcagtaataacagaaatgtcaatatgagattgtggttattaacaatatgttatcctcactactttatttcttttttcatccaggtgtttcattaagtattctcatttatatgctcatagaagtcatcagatcaacacattcactccaacacctgggtataaaggcgaattaaaacctgaagaattactttattattcattaagaactgcattcccacatcctcacaccaatatcttccactgttactgtgcagtcataataagagttgggttatgtgatttatgcaaaattgttattggtgtgttctaatgatttttttccaggaattcaagtaagtgaagtacaaatacttagcaccatagattgtaaaaatagaaagaggaaatgagaaaacttaatgtcgttcttgtacagttgagttttgcttctttataaactgtctgttaaaatcaggggttgctgttagactgtcaagcagaagtgatggatgttcaaggaggcaggttgccccaaagtgttttctaactttcaagtagagaactttatgctctaataagaaaaatacaactcattcttaaccacccccccaaaacagagaaaacacatacatttatgcattttaaagataaaaagtagtttctcaaaaaaatctgaagttctctgaaaaccagcttattaaaagtgctgttttgtggtgaaaattgaaaccaaatccactcacatttcctatcgggtcttgaaattcttggtggtgtgtcaccattccactagatggcagtgttgcttactgagtgtcaatggcttttttccccgtaaatggaatcatgtttttctcccccaaagtacaataaagctgccttgtctgcaccattaaaaaaaaaag

SEQ ID NO: 418227 - DNA, 3235 bp, Homo sapiens
ccgggggagaaagcgacgcggccgctcgtaagtgctccggatggaaactggtgcagggggcagcggcgttccgcggccggaagggaagggggaggtgccgaggctgcgcgccggctgctcctccccacccccagcctttgccctgaagggggctggatgggcaaggcggccgcgatggctcgagctcgggcggtggcggcggtggccggaggcggcggtgcctcctcctcctcgccccggcgccggcggtgatccgagcgagcggccgcggcccccgatgagactgctggcgggctggctgtgcctgagcctggcgtccgtgtggctggcgcggaggatgtggacgctgcggagcccgctcacccgctccctgtacgtgaacatgactagcgtggtatgtgtgcaacagagagaaattatgcgaatcactccaggctgtctttgttcagagttaccttgatcaaggaacacagatcttcttaaacaacagcattgagaaatcgggctggctatttatccaattatatcattcttttgtgtcatctgtttttagcctgtttatgtctagaacatctatcaatgggttgctaggaagaggctcaatgtttgtgttttcaccagatcagtttcagagactgcttaaaattaatccagactggaaaacccacagacttcttgatttaggtgctggagatggagaagtcacaaaaatcatgagccctcattttgaagaaatctatgccactgagctttctgaaactatgatatggcagcttcagaaaaagaaatacagagtccttggtataaatgaatggcagaatacggggttccagtatgatgtcatcagctgcctgaacttgctggaccgctgtgatcagcccctgactttgttaaaagatatcagaagtgtcttggagccaactagaggcagggtcatccttgcccttgtcctcccctttcatccctatgtggaaaactaggtggcaagtgggagaaaccatcagaaattttggaaatcaaaggacagaactgggaagaacaagtgaatagtctgcctgaagttttcagaaaagctggttttgttatcgaagctttcaccagactaccatacctgtgtgaaggcgacatgtataatgactactacgttctggatgacgctgtctttgttctcaaaccagtataaacacgtggaggtcgaagtcttcagagtccgcaccctccgggatgtgcccttggaagagggtctgtgttcacaattacgtgaagggaggacccttggggaccgccattctaaatatcatgtaggaatttaaaaagccaaaatactaattatttctttgtagtgtgtaaaggaatgtttttaaaagacaaaaacccaactctttgtggatttttatcaactctttactcagagccactctccaatgcaggtcacactccaattatgatggaagatattttttatacttaattgcagtagggactcattcccagacaaagcaatagtcacgacttcatggaaccaatcaatggattgttttttgaagactggcaataaagctgtccattcaattccaaatactggttttaaggtatagccactgatattctttcatgtttagaaattctttctgttattattcaagaaaatgtttttaatcatgctaataaacttttttggagatgactttggcatcatgtttgaattcatataaagctcccctagcattttttattggtttggcttcaggagtacccaaatagtagcattatgagaatgacgcagacaatttgaataggggggaaggaaggcttcagacttgggggaaggggagattattgcaaattgcagtgaacactgagtcagtaaaaaaaaaaaacagaaacaaaaacccagcctcattcagatacagaacttcagggacccctccccccacccccccagttaatgctgctgtgaaaaatgcaaaataacctggttctgactttgtgatcactcatgtcccatacactgaactttgtttttttctggacaatctcaggttctcagaattgaaacattcagttttgtctactgacaaaatgcaactaaaaatgttttaattcaacttcttactctacacttatatacctctctcccagagcttggctcttccctgaaatccttaaaggagtttattatttgccaagaatatggtttgatgaagaccgtgtcagactcatgcattctggaatccgtgagtgcctccaaccataaacccagaaatgctgccatagaggaacccattagcaagatcaataaccatcgtggatattccaaagagcagagcatttaacccagaatctgaaatctcagtaataacagaaatgtcaatatgagattgtggttattaacaatatgttatcctcactactttatttcttttttcatccaggtgtttcattaagtattctcatttatatgctcatagaagtcatcagatcaacacattcactccaacacctgggtataaaggcgaattaaaacctgaagaattactttattattcattaagaactgcattcccacatcctcacaccaatatcttccactgttactgtgcagtcataataagagttgggttatgtgatttatgcaaaattgttattggtgtgttctaatgatttttttccaggaattcaagtaagtgaagtacaaatacttagcaccatagattgtaaaaatagaaagaggaaatgagaaaacttaatgtcgttcttgtacagttgagttttgcttctttataaactgtctgttaaaatcaggggttgctgttagactgtcaagcagaagtgatggatgttcaaggaggcaggttgccccaaagtgttttctaactttcaagtagagaactttatgctctaataagaaaaatacaactcattcttaaccacccccccaaaacagagaaaacacatacatttatgcattttaaagataaaaagtagtttctcaaaaaaatctgaagttctctgaaaaccagcttattaaaagtgctgttttgtggtgaaaattgaaaccaaatccactcacatttcctatcgggtcttgaaattcttggtggtgtgtcaccattccactagatggcagtgttgcttactgagtgtcaatggcttttttccccgtaaatggaatcatgtttttctcccccaaagtacaataaagctgccttgtctgcaccattaaaaaaaaaag

SEQ ID NO: 418228 - DNA, 3231 bp, Homo sapiens
ccgggggagaaagcgacgcggccgctcgtaagtgctccggatggaaactggtgcagggggcagcggcgttccgcggccggaagggaagggggaggtgccgaggctgcgcgccggctgctcctccccacccccagcctttgccctgaagggggctggatgggcaaggcggccgcgatggctcgagctcgggcggtggcggcggtggccggaggcggcggtgcctcctcctcctcgccccggcgccggcggtgatccgagcgagcggccgcggcccccgatgagactgctggcgggctggctgtgcctgagcctggcgtccgtgtggctggcgcggaggatgtggacgctgcggagcccgctcacccgctccctgtacgtgaacatgactagcggcccgggtgggccggcggcggccgcgggcggcaggaaggagaaccaccagtggtatgtgtgcaacagagagaaattatgcgaatcactccaggctgtctttgttcagagttaccttgatcaaggaacacagatcttcttaaacaacagcattgagaaatcgggctggctatttatccaattatatcattcttttgtgtcatctgtttttagcctgtttatgtctagaacatctatcaatgggttgctaggaagaggctcaatgtttgtgttttcaccagatcagtttcagagactgcttaaaattaatccagactggaaaacccacagacttcttgatttaggtgctggagatggagaagtcacaaaaatcatgagccctcattttgaagaaatctatgccactgagctttctgaaactatgatatggcagcttcagaaaaagaaatacagagtccttggtataaatgaatggcagaatacggggttccagtatgatgtcatcagctgcctgaacttgctggaccgctgtgatcagcccctgactttgttaaaagatatcagaagtgtcttggagccaactagaggcagggtcatccttgcccttgtcctcccctttcatccctatgtggaaaactaggtggcaagtgggagaaaccatcagaaattttggaaatcaaaggacagaactgggaagaacaagtgaatagtctgcctgaagttttcagcgacatgtataatgactactacgttctggatgacgctgtctttgttctcaaaccagtataaacacgtggaggtcgaagtcttcagagtccgcaccctccgggatgtgcccttggaagagggtctgtgttcacaattacgtgaagggaggacccttggggaccgccattctaaatatcatgtaggaatttaaaaagccaaaatactaattatttctttgtagtgtgtaaaggaatgtttttaaaagacaaaaacccaactctttgtggatttttatcaactctttactcagagccactctccaatgcaggtcacactccaattatgatggaagatattttttatacttaattgcagtagggactcattcccagacaaagcaatagtcacgacttcatggaaccaatcaatggattgttttttgaagactggcaataaagctgtccattcaattccaaatactggttttaaggtatagccactgatattctttcatgtttagaaattctttctgttattattcaagaaaatgtttttaatcatgctaataaacttttttggagatgactttggcatcatgtttgaattcatataaagctcccctagcattttttattggtttggcttcaggagtacccaaatagtagcattatgagaatgacgcagacaatttgaataggggggaaggaaggcttcagacttgggggaaggggagattattgcaaattgcagtgaacactgagtcagtaaaaaaaaaaaacagaaacaaaaacccagcctcattcagatacagaacttcagggacccctccccccacccccccagttaatgctgctgtgaaaaatgcaaaataacctggttctgactttgtgatcactcatgtcccatacactgaactttgtttttttctggacaatctcaggttctcagaattgaaacattcagttttgtctactgacaaaatgcaactaaaaatgttttaattcaacttcttactctacacttatatacctctctcccagagcttggctcttccctgaaatccttaaaggagtttattatttgccaagaatatggtttgatgaagaccgtgtcagactcatgcattctggaatccgtgagtgcctccaaccataaacccagaaatgctgccatagaggaacccattagcaagatcaataaccatcgtggatattccaaagagcagagcatttaacccagaatctgaaatctcagtaataacagaaatgtcaatatgagattgtggttattaacaatatgttatcctcactactttatttcttttttcatccaggtgtttcattaagtattctcatttatatgctcatagaagtcatcagatcaacacattcactccaacacctgggtataaaggcgaattaaaacctgaagaattactttattattcattaagaactgcattcccacatcctcacaccaatatcttccactgttactgtgcagtcataataagagttgggttatgtgatttatgcaaaattgttattggtgtgttctaatgatttttttccaggaattcaagtaagtgaagtacaaatacttagcaccatagattgtaaaaatagaaagaggaaatgagaaaacttaatgtcgttcttgtacagttgagttttgcttctttataaactgtctgttaaaatcaggggttgctgttagactgtcaagcagaagtgatggatgttcaaggaggcaggttgccccaaagtgttttctaactttcaagtagagaactttatgctctaataagaaaaatacaactcattcttaaccacccccccaaaacagagaaaacacatacatttatgcattttaaagataaaaagtagtttctcaaaaaaatctgaagttctctgaaaaccagcttattaaaagtgctgttttgtggtgaaaattgaaaccaaatccactcacatttcctatcgggtcttgaaattcttggtggtgtgtcaccattccactagatggcagtgttgcttactgagtgtcaatggcttttttccccgtaaatggaatcatgtttttctcccccaaagtacaataaagctgccttgtctgcaccattaaaaaaaaaag

SEQ ID NO: 418229 - DNA, 1791 bp, Homo sapiens
  misc_feature (1736)..(1736): n is a, c, g, or t
ccgggggagaaagcgacgcggccgctcgtaagtgctccggatggaaactggtgcagggggcagcggcgttccgcggccggaagggaagggggaggtgccgaggctgcgcgccggctgctcctccccacccccagcctttgccctgaagggggctggatgggcaaggcggccgcgatggctcgagctcgggcggtggcggcggtggccggaggcggcggtgcctcctcctcctcgccccggcgccggcggtgatccgagcgagcggccgcggcccccgatgagactgctggcgggctggctgtgcctgagcctggcgtccgtgtggctggcgcggaggatgtggacgctgcggagcccgctcacccgctccctgtacgtgaacatgactagcggcccgggtgggccggcggcggccgcgggcggcaggaaggagaaccaccagtggtatgtgtgcaacagagagaaattatgcgaatcactccaggctgtctttgttcagagttaccttgatcaaggaacacagatcttcttaaacaacagcattgagaaatcgggctggctatttatccaattatatcattcttttgtgtcatctgtttttagcctgtttatgtctagaacatctatcaatgggttgctaggaagaggctcaatgtttgtgttttcaccagatcagtttcagagactgcttaaaattaatccagactggaaaacccacagacttcttgatttaggtgctggagatggagaagtcacaaaaatcatgagccctcattttgaagaaatctatgccactgagctttctgaaactatgatatggcagcttcagaaaaagaaatacagagtccttggtataaatgaatggcagaatacggggttccagtatgatgtcatcagctgcctgaacttgctggaccgctgtgatcagcccctgactttgttaaaagatatcagaagtgtcttggagccaactagaggcagggtcatccttgcccttgtcctcccctttcatccctatgtggaaaactaggtggcaagtgggagaaaccatcagaaattttggaaatcaaaggacagaactgggaagaacaagtgaatagtctgcctgaagttttcagaaaagctggttttgttatcgaagctttcaccagactaccatacctgtgtgaaggcgacatgtataatgactactacgttctggatgacgctgtctttgttctcaaaccagtataaacacgtggaggtcgaagtcttcagagtccgcaccctccgggatgtgcccttggaagagggtctgtgttcacaattacgtgaagggaggacccttggggaccgccattctaaatatcatgtaggaatttaaaaagccaaaatactaattatttctttgtagtgtgtaaaggaatgtttttaaaagacaaaaacccaactctttgtggatttttatcaactctttactcagagccactctccaatgcaggtcacactccaattatgatggaagatattttttatacttaattgcagtagggactcattcccagacaaagcaatagtcacgacttcatggaaccaatcaatggattgttttttgaagactggcaataaagctgtccattcaattccaaatactggttttaaggtatagccactgatattctttcatgtttagaaattctttctgttattattcaagaaaatgtttttaatcatgctaataaacttttttggagagngatcggccgaccccccccccccccgcggacaccccctccccaccgcccgcctacc

SEQ ID NO: 418230 - DNA, 1953 bp, Homo sapiens
ccgggggagaaagcgacgcggccgctcgtaagtgctccggatggaaactggtgcagggggcagcggcgttccgcggccggaagggaagggggaggtgccgaggctgcgcgccggctgctcctccccacccccagcctttgccctgaagggggctggatgggcaaggcggccgcgatggctcgagctcgggcggtggcggcggtggccggaggcggcggtgcctcctcctcctcgccccggcgccggcggtgatccgagcgagcggccgcggcccccgatgagactgctggcgggctggctgtgcctgagcctggcgtccgtgtggctggcgcggaggatgtggacgctgcggagcccgctcacccgctccctgtacgtgaacatgactagcggcccgggtgggccggcggcggccgcgggcggcaggaaggagaaccaccagtggtatgtgtgcaacagagagaaattatgcgaatcactccaggctgtctttgttcagagttaccttgatcaaggaacacagatcttcttaaacaacagcattgagaaatcgggctggctatttatccaattatatcattcttttgtgtcatctgtttttagcctgtttatgtctagaacatctatcaatgggttgctaggaagaggctcaatgtttgtgttttcaccagatcagtttcagagactgcttaaaattaatccagactggaaaacccacagacttcttgatttaggtgctggagatggagaagtcacaaaaatcatgagccctcattttgaagaaatctatgccactgagctttctgaaactatgatatggcagcttcagaaaaagaaatacagagtccttggtataaatgaatggcagaatacggggttccagtatgatgtcatcagctgcctgaacttgctggaccgctgtgatcagcccctgactttgttaaaagatatcagaagtgtcttggagccaactagaggcagggtcatccttgcccttgtcctcccctttcatccctatgtggaaaactaggtggcaagtgggagaaaccatcagaaattttggaaatcaaaggacagaactgggaagaacaagtgaatagtctgcctgaagttttcagaaaagctggttttgttatcgaagctttcaccagactaccatacctgtgtgaaggcgacatgtataatgactactacgttctggatgacgctgtctttgttctcaaaccagtataaacacgtggaggtcgaagtcttcagagtccgcaccctccgggatgtgcccttggaagagggtctgtgttcacaattacgtgaagggaggacccttggggaccgccattctaaatatcatgtaggaatttaaaaagccaaaatactaattatttctttgtagtgtgtaaaggaatgtttttaaaagacaaaaacccaactctttgtggatttttatcaactctttactcagagccactctccaatgcaggtcacactccaattatgatggaagatattttttatacttaattgcagtagggactcattcccagacaaagcaatagtcacgacttcatggaaccaatcaatggattgttttttgaagactggcaataaagctgtccattcaattccaaatactggttttaaggtatagccactgatattctttcatgtttagaaattctttctgttattattcaagaaaatgtttttaatcatgctaataaacttttttggagacaaaaaaaaaaaaaaaaaaaaaacaaaatgtttgtggggcggcgcctgtgggcccctttaaaaaaaaggttttcttaagacaccattctgggtgtgggcggcgcgggccccaaatagggctagtggcaacagtgtggcataaagggggttcccctaagggaagaatcgggggccaaggcaacaaggggggtggggatttccttctcccaatttaaaacc

SEQ ID NO: 418231 - DNA, 3231 bp, Homo sapiens
ccgggggagaaagcgacgcggccgctcgtaagtgctccggatggaaactggtgcagggggcagcggcgttccgcggccggaagggaagggggaggtgccgaggctgcgcgccggctgctcctccccacccccagcctttgccctgaagggggctggatgggcaaggcggccgcgatggctcgagctcgggcggtggcggcggtggccggaggcggcggtgcctcctcctcctcgccccggcgccggcggtgatccgagcgagcggccgcggcccccgatgagactgctggcgggctggctgtgcctgagcctggcgtccgtgtggctggcgcggaggatgtggacgctgcggagcccgctcacccgctccctgtacgtgaacatgactagcggcccgggtgggccggcggcggccgcgggcggcaggaaggagaaccaccagtggtatgtgtgcaacagagagaaattatgcgaatcactccaggctgtctttgttcagagttaccttgatcaaggaacacagatcttcttaaacaacagcattgagaaatcgggctggctatttatccaattatatcattcttttgtgtcatctgtttttagcctgtttatgtctagaacatctatcaatgggttgctaggaagaggctcaatgtttgtgttttcaccagatcagtttcagagactgcttaaaattaatccagactggaaaacccacagacttcttgatttaggtgctggagatggagaagtcacaaaaatcatgagccctcattttgaagaaatctatgccactgagctttctgaaactatgatatggcagcttcagaaaaagaaatacagagtccttggtataaatgaatggcagaatacggggttccagtatgatgtcatcagctgcctgaacttgctggaccgctgtgatcagcccctgactttgttaaaagatatcagaagtgtcttggagccaactagaggcagggtcatccttgcccttgtcctcccctttcatccctatgtggaaaactaggtggcaagtgggagaaaccatcagaaattttggaaatcaaaggacagaactgggaagaacaagtgaatagtctgcctgaagttttcagaaaagctggttttgttatcgaagctttcaccagactaccatacctgtgtgaaggcgacatgtataatgactactacgttctggatgacgctgtctttgttctcaaaccagtataaacacgtggaggtcgaagtcttcagagtccgcaccctccgggatgtgcccttggaagagggtctgtgttcacaattacgtgaagggaggacccttggggaccgccattctaaatatcatgtaggaatttaaaaagccaaaatactaattatttctttgtagtgtgtaaaggaatgtttttaaaagacaatgcaggtcacactccaattatgatggaagatattttttatacttaattgcagtagggactcattcccagacaaagcaatagtcacgacttcatggaaccaatcaatggattgttttttgaagactggcaataaagctgtccattcaattccaaatactggttttaaggtatagccactgatattctttcatgtttagaaattctttctgttattattcaagaaaatgtttttaatcatgctaataaacttttttggagatgactttggcatcatgtttgaattcatataaagctcccctagcattttttattggtttggcttcaggagtacccaaatagtagcattatgagaatgacgcagacaatttgaataggggggaaggaaggcttcagacttgggggaaggggagattattgcaaattgcagtgaacactgagtcagtaaaaaaaaaaaacagaaacaaaaacccagcctcattcagatacagaacttcagggacccctccccccacccccccagttaatgctgctgtgaaaaatgcaaaataacctggttctgactttgtgatcactcatgtcccatacactgaactttgtttttttctggacaatctcaggttctcagaattgaaacattcagttttgtctactgacaaaatgcaactaaaaatgttttaattcaacttcttactctacacttatatacctctctcccagagcttggctcttccctgaaatccttaaaggagtttattatttgccaagaatatggtttgatgaagaccgtgtcagactcatgcattctggaatccgtgagtgcctccaaccataaacccagaaatgctgccatagaggaacccattagcaagatcaataaccatcgtggatattccaaagagcagagcatttaacccagaatctgaaatctcagtaataacagaaatgtcaatatgagattgtggttattaacaatatgttatcctcactactttatttcttttttcatccaggtgtttcattaagtattctcatttatatgctcatagaagtcatcagatcaacacattcactccaacacctgggtataaaggcgaattaaaacctgaagaattactttattattcattaagaactgcattcccacatcctcacaccaatatcttccactgttactgtgcagtcataataagagttgggttatgtgatttatgcaaaattgttattggtgtgttctaatgatttttttccaggaattcaagtaagtgaagtacaaatacttagcaccatagattgtaaaaatagaaagaggaaatgagaaaacttaatgtcgttcttgtacagttgagttttgcttctttataaactgtctgttaaaatcaggggttgctgttagactgtcaagcagaagtgatggatgttcaaggaggcaggttgccccaaagtgttttctaactttcaagtagagaactttatgctctaataagaaaaatacaactcattcttaaccacccccccaaaacagagaaaacacatacatttatgcattttaaagataaaaagtagtttctcaaaaaaatctgaagttctctgaaaaccagcttattaaaagtgctgttttgtggtgaaaattgaaaccaaatccactcacatttcctatcgggtcttgaaattcttggtggtgtgtcaccattccactagatggcagtgttgcttactgagtgtcaatggcttttttccccgtaaatggaatcatgtttttctcccccaaagtacaataaagctgccttgtctgcaccattaaaaaaaaaag

SEQ ID NO: 418232 - DNA, 2911 bp, Homo sapiens
ccgggggagaaagcgacgcggccgctcgtaagtgctccggatggaaactggtgcagggggcagcggcgttccgcggccggaagggaagggggaggtgccgaggctgcgcgccggctgctcctccccacccccagcctttgccctgaagggggctggatgggcaaggcggccgcgatggctcgagctcgggcggtggcggcggtggccggaggcggcggtgcctcctcctcctcgccccggcgccggcggtgatccgagcgagcggccgcggcccccgatgagactgctggcgggctggctgtgcctgagcctggcgtccgtgtggctggcgcggaggatgtggacgctgcggagcccgctcacccgctccctgtacgtgaacatgactagcggcccgggtgggccggcggcggccgcgggcggcaggaaggagaaccaccagtggtatgtgtgcaacagagagaaattatgcgaatcactccaggctgtctttgttcagagttaccttgatcaaggaacacagatcttcttaaacaacagcattgagaaatcgggctggctatttatccaattatatcagaagtgtcttggagccaactagaggcagggtcatccttgcccttgtcctcccctttcatccctatgtggaaaactaggtggcaagtgggagaaaccatcagaaattttggaaatcaaaggacagaactgggaagaacaagtgaatagtctgcctgaagttttcagaaaagctggttttgttatcgaagctttcaccagactaccatacctgtgtgaaggcgacatgtataatgactactacgttctggatgacgctgtctttgttctcaaaccagtataaacacgtggaggtcgaagtcttcagagtccgcaccctccgggatgtgcccttggaagagggtctgtgttcacaattacgtgaagggaggacccttggggaccgccattctaaatatcatgtaggaatttaaaaagccaaaatactaattatttctttgtagtgtgtaaaggaatgtttttaaaagacaaaaacccaactctttgtggatttttatcaactctttactcagagccactctccaatgcaggtcacactccaattatgatggaagatattttttatacttaattgcagtagggactcattcccagacaaagcaatagtcacgacttcatggaaccaatcaatggattgttttttgaagactggcaataaagctgtccattcaattccaaatactggttttaaggtatagccactgatattctttcatgtttagaaattctttctgttattattcaagaaaatgtttttaatcatgctaataaacttttttggagatgactttggcatcatgtttgaattcatataaagctcccctagcattttttattggtttggcttcaggagtacccaaatagtagcattatgagaatgacgcagacaatttgaataggggggaaggaaggcttcagacttgggggaaggggagattattgcaaattgcagtgaacactgagtcagtaaaaaaaaaaaacagaaacaaaaacccagcctcattcagatacagaacttcagggacccctccccccacccccccagttaatgctgctgtgaaaaatgcaaaataacctggttctgactttgtgatcactcatgtcccatacactgaactttgtttttttctggacaatctcaggttctcagaattgaaacattcagttttgtctactgacaaaatgcaactaaaaatgttttaattcaacttcttactctacacttatatacctctctcccagagcttggctcttccctgaaatccttaaaggagtttattatttgccaagaatatggtttgatgaagaccgtgtcagactcatgcattctggaatccgtgagtgcctccaaccataaacccagaaatgctgccatagaggaacccattagcaagatcaataaccatcgtggatattccaaagagcagagcatttaacccagaatctgaaatctcagtaataacagaaatgtcaatatgagattgtggttattaacaatatgttatcctcactactttatttcttttttcatccaggtgtttcattaagtattctcatttatatgctcatagaagtcatcagatcaacacattcactccaacacctgggtataaaggcgaattaaaacctgaagaattactttattattcattaagaactgcattcccacatcctcacaccaatatcttccactgttactgtgcagtcataataagagttgggttatgtgatttatgcaaaattgttattggtgtgttctaatgatttttttccaggaattcaagtaagtgaagtacaaatacttagcaccatagattgtaaaaatagaaagaggaaatgagaaaacttaatgtcgttcttgtacagttgagttttgcttctttataaactgtctgttaaaatcaggggttgctgttagactgtcaagcagaagtgatggatgttcaaggaggcaggttgccccaaagtgttttctaactttcaagtagagaactttatgctctaataagaaaaatacaactcattcttaaccacccccccaaaacagagaaaacacatacatttatgcattttaaagataaaaagtagtttctcaaaaaaatctgaagttctctgaaaaccagcttattaaaagtgctgttttgtggtgaaaattgaaaccaaatccactcacatttcctatcgggtcttgaaattcttggtggtgtgtcaccattccactagatggcagtgttgcttactgagtgtcaatggcttttttccccgtaaatggaatcatgtttttctcccccaaagtacaataaagctgccttgtctgcaccattaaaaaaaaaag

SEQ ID NO: 418233 - DNA, 1148 bp, Homo sapiens
ccgggggagaaagcgacgcggccgctcgtaagtgctccggatggaaactggtgcagggggcagcggcgttccgcggccggaagggaagggggaggtgccgaggctgcgcgccggctgctcctccccacccccagcctttgccctgaagggggctggatgggcaaggcggccgcgatggctcgagctcgggcggtggcggcggtggccggaggcggcggtgcctcctcctcctcgccccggcgccggcggtgatccgagcgagcggccgcggcccccgatgagactgctggcgggctggctgtgcctgagcctggcgtccgtgtggctggcgcggaggatgtggacgctgcggagcccgctcacccgctccctgtacgtgaacatgactagcggcccgggtgggccggcggcggccgcgggcggcaggaaggagaaccaccagtggtatgtgtgcaacagagagaaattatgcgaatcactccaggctgtctttgttcagagttaccttgatcaaggaacacagatcttcttaaacaacagcattgagaaatcgggctggctatttatccaattatatcattcttttgtgtcatctgtttttagcctgtttatgtctagaacatctatcaatgggttgctaggaagaggctcaatgtttgtgttttcaccagatcagtttcagagactgcttaaaattaatccagactggaaaacccacagacttcttgatttaggtgctggagatggagaagtcacaaaaatcatgagccctcattttgaagaaatctatgccactgagctttctgaaactatgatatggcagcttcagaaaaagaaatacagagtccttggtataaatgaatggcagaatacggggttccagtatgatgtcatcagctgcctgaacttgctggaccgctgtgatcagcccctgactttgttaaaagatatcagaagtgtcttggagccaactagaggcagggtcatccttgcccttgtcctcccctttcatccctatgtggaaaactgtaagtgtggtcagtcaggctagctcttactgaggatagctgtttattggtatttgtgattttgtgctgtgtacaattaaatattgtctagtatgtcttataatagcctgcagtttaaag

SEQ ID NO: 418234 - DNA, 2254 bp, Homo sapiens
atcacttgtttgttcaagaatttaactgaatgttcttatttgtattagtagaggtggcaagtgggagaaaccatcagaaattttggaaatcaaaggacagaactgggaagaacaagtgaatagtctgcctgaagttttcagaaaagctggttttgttatcgaagctttcaccagactaccatacctgtgtgaaggcgacatgtataatgactactacgttctggatgacgctgtctttgttctcaaaccagtataaacacgtggaggtcgaagtcttcagagtccgcaccctccgggatgtgcccttggaagagggtctgtgttcacaattacgtgaagggaggacccttggggaccgccattctaaatatcatgtaggaatttaaaaagccaaaatactaattatttctttgtagtgtgtaaaggaatgtttttaaaagacaatgcaggtcacactccaattatgatggaagatattttttatacttaattgcagtagggactcattcccagacaaagcaatagtcacgacttcatggaaccaatcaatggattgttttttgaagactggcaataaagctgtccattcaattccaaatactggttttaaggtatagccactgatattctttcatgtttagaaattctttctgttattattcaagaaaatgtttttaatcatgctaataaacttttttggagatgactttggcatcatgtttgaattcatataaagctcccctagcattttttattggtttggcttcaggagtacccaaatagtagcattatgagaatgacgcagacaatttgaataggggggaaggaaggcttcagacttgggggaaggggagattattgcaaattgcagtgaacactgagtcagtaaaaaaaaaaaacagaaacaaaaacccagcctcattcagatacagaacttcagggacccctccccccacccccccagttaatgctgctgtgaaaaatgcaaaataacctggttctgactttgtgatcactcatgtcccatacactgaactttgtttttttctggacaatctcaggttctcagaattgaaacattcagttttgtctactgacaaaatgcaactaaaaatgttttaattcaacttcttactctacacttatatacctctctcccagagcttggctcttccctgaaatccttaaaggagtttattatttgccaagaatatggtttgatgaagaccgtgtcagactcatgcattctggaatccgtgagtgcctccaaccataaacccagaaatgctgccatagaggaacccattagcaagatcaataaccatcgtggatattccaaagagcagagcatttaacccagaatctgaaatctcagtaataacagaaatgtcaatatgagattgtggttattaacaatatgttatcctcactactttatttcttttttcatccaggtgtttcattaagtattctcatttatatgctcatagaagtcatcagatcaacacattcactccaacacctgggtataaaggcgaattaaaacctgaagaattactttattattcattaagaactgcattcccacatcctcacaccaatatcttccactgttactgtgcagtcataataagagttgggttatgtgatttatgcaaaattgttattggtgtgttctaatgatttttttccaggaattcaagtaagtgaagtacaaatacttagcaccatagattgtaaaaatagaaagaggaaatgagaaaacttaatgtcgttcttgtacagttgagttttgcttctttataaactgtctgttaaaatcaggggttgctgttagactgtcaagcagaagtgatggatgttcaaggaggcaggttgccccaaagtgttttctaactttcaagtagagaactttatgctctaataagaaaaatacaactcattcttaaccacccccccaaaacagagaaaacacatacatttatgcattttaaagataaaaagtagtttctcaaaaaaatctgaagttctctgaaaaccagcttattaaaagtgctgttttgtggtgaaaattgaaaccaaatccactcacatttcctatcgggtcttgaaattcttggtggtgtgtcaccattccactagatggcagtgttgcttactgagtgtcaatggcttttttccccgtaaatggaatcatgtttttctcccccaaagtacaataaagctgccttgtctgcaccattaaaaaaaaaag

SEQ ID NO: 418235 - DNA, 758 bp, Homo sapiens
ccgggggagaaagcgacgcggccgctcgtaagtgctccggatggaaactggtgcagggggcagcggcgttccgcggccggaagggaagggggaggtgccgaggctgcgcgccggctgctcctccccacccccagcctttgccctgaagggggctggatgggcaaggcggccgcgatggctcgagctcgggcggtggcggcggtggccggaggcggcggtgcctcctcctcctcgccccggcgccggcggtgatccgagcgagcggccgcggcccccgatgagactgctggcgggctggctgtgcctgagcctggcgtccgtgtggctggcgcggaggatgtggacgctgcggagcccgctcacccgctccctgtacgtgaacatgactagcggcccgggtgggccggcggcggccgcgggcggcaggaaggagaaccaccagtggtatgtgtgcaacagagagaaattatgcgaatcactccaggctgtctttgttcagagttaccttgatcaaggaacacagatcttcttaaacaacagcattgagaaatcgggctggctatttatccaattatatcattcttttgtgtcatctgtttttagcctgtttatgtctagaacatctatcaatgggttgctaggaagaggctcaatgtttgtgttttcaccagatcagtttcagagactgcttaaaattaatccagactggaaaacccacagacttctccatctccagcacctaaatccagactggaaaa

SEQ ID NO: 418236 - DNA, 3285 bp, Homo sapiens
ccgggggagaaagcgacgcggccgctcgtaagtgctccggatggaaactggtgcagggggcagcggcgttccgcggccggaagggaagggggaggtgccgaggctgcgcgccggctgctcctccccacccccagcctttgccctgaagggggctggatgggcaaggcggccgcgatggctcgagctcgggcggtggcggcggtggccggaggcggcggtgcctcctcctcctcgccccggcgccggcggtgatccgagcgagcggccgcggcccccgatgagactgctggcgggctggctgtgcctgagcctggcgtccgtgtggctggcgcggaggatgtggacgctgcggagcccgctcacccgctccctgtacgtgaacatgactagcggcccgggtgggccggcggcggccgcgggcggcaggaaggagaaccaccagtggtatgtgtgcaacagagagaaattatgcgaatcactccaggctgtctttgttcagagttaccttgatcaaggaacacagatcttcttaaacaacagcattgagaaatcgggctggctatttatccaattatatcattcttttgtgtcatctgtttttagcctgtttatgtctagaacatctatcaatgggttgctaggaagaggctcaatgtttgtgttttcaccagatcagtttcagagactgcttaaaattaatccagactggaaaacccacagacttcttgatttaggtgctggagatggagaagtcacaaaaatcatgagccctcattttgaagaaatctatgccactgagctttctgaaactatgatatggcagcttcagaaaaagaaatacagagtccttggtataaatgaatggcagaatacggggttccagtatgatgtcatcagctgcctgaacttgctggaccgctgtgatcagcccctgactttgttaaaagatatcagaagtgtcttggagccaactagaggcagggtcatccttgcccttgtcctcccctttcatccctatgtggaaaactaggtggcaagtgggagaaaccatcagaaattttggaaatcaaaggacagaactgggaagaacaagtgaatagtctgcctgaagttttcagaaaagctggttttgttatcgaagctttcaccagactaccatacctgtgtgaaggcgacatgtataatgactactacgttctggatgacgctgtctttgttctcaaaccagtataaacacgtggaggtcgaagtcttcagagtccgcaccctccgggatgtgcccttggaagagggtctgtgttcacaattacgtgaagggaggacccttggggaccgccattctaaatatcatgtaggaatttaaaaagccaaaatactaattatttctttgtagtgtgtaaaggaatgtttttaaaagacaaaaacccaactctttgtggatttttatcaactctttactcagagccactctccaatgcaggtcacactccaattatgatggaagatattttttatacttaattgcagtagggactcattcccagacaaagcaatagtcacgacttcatggaaccaatcaatggattgttttttgaagactggcaataaagctgtccattcaattccaaatactggttttaaggtatagccactgatattctttcatgtttagaaattctttctgttattattcaagaaaatgtttttaatcatgctaataaacttttttggagatgactttggcatcatgtttgaattcatataaagctcccctagcattttttattggtttggcttcaggagtacccaaatagtagcattatgagaatgacgcagacaatttgaataggggggaaggaaggcttcagacttgggggaaggggagattattgcaaattgcagtgaacactgagtcagtaaaaaaaaaaaacagaaacaaaaacccagcctcattcagatacagaacttcagggacccctccccccacccccccagttaatgctgctgtgaaaaatgcaaaataacctggttctgactttgtgatcactcatgtcccatacactgaactttgtttttttctggacaatctcaggttctcagaattgaaacattcagttttgtctactgacaaaatgcaactaaaaatgttttaattcaacttcttactctacacttatatacctctctcccagagcttggctcttccctgaaatccttaaaggagtttattatttgccaagaatatggtttgatgaagaccgtgtcagactcatgcattctggaatccgtgagtgcctccaaccataaacccagaaatgctgccatagaggaacccattagcaagatcaataaccatcgtggatattccaaagagcagagcatttaacccagaatctgaaatctcagtaataacagaaatgtcaatatgagattgtggttattaacaatatgttatcctcactactttatttcttttttcatccaggtgtttcattaagtattctcatttatatgctcatagaagtcatcagatcaacacattcactccaacacctgggtataaaggcgaattaaaacctgaagaattactttattattcattaagaactgcattcccacatcctcacaccaatatcttccactgttactgtgcagtcataataagagttgggttatgtgatttatgcaaaattgttattggtgtgttctaatgatttttttccaggaattcaagtaagtgaagtacaaatacttagcaccatagattgtaaaaatagaaagaggaaatgagaaaacttaatgtcgttcttgtacagttgagttttgcttctttataaactgtctgttaaaatcaggggttgctgttagactgtcaagcagaagtgatggatgttcaaggaggcaggttgccccaaagtgttttctaactttcaagtagagaactttatgctctaataagaaaaatacaactcattcttaaccacccccccaaaacagagaaaacacatacatttatgcattttaaagataaaaagtagtttctcaaaaaaatctgaagttctctgaaaaccagcttattaaaagtgctgttttgtggtgaaaattgaaaccaaatccactcacatttcctatcgggtcttgaaattcttggtggtgtgtcaccattccactagatggcagtgttgcttactgagtgtcaatggcttttttccccgtaaatggaatcatgtttttctcccccaaagtacaataaagctgccttgtctgcaccattaaaaaaaaaag

SEQ ID NO: 418237 - DNA, 3001 bp, Homo sapiens
  misc_feature (46)..(46): n is a, c, g, or t
  misc_feature (78)..(78): n is a, c, g, or t
tgcttaaggtatgggttgctggcgtaagaggtagaggggaggctanctgaacgactctcttattttccaccgctacangaggctctctgagaagagacagcaaagcttcttagatggatcgaaagaccacgagctgggataccaagttctatgaaaagtggtatgtgtgcaacagagagaaattatgcgaatcactccaggctgtctttgttcagagttaccttgatcaaggaacacagatcttcttaaacaacagcattgagaaatcgggctggctatttatccaattatatcattcttttgtgtcatctgtttttagcctgtttatgtctagaacatctatcaatgggttgctaggaagaggctcaatgtttgtgttttcaccagatcagtttcagagactgcttaaaattaatccagactggaaaacccacagacttcttgatttaggtgctggagatggagaagtcacaaaaatcatgagccctcattttgaagaaatctatgccactgagctttctgaaactatgatatggcagcttcagaaaaagaaatacagagtccttggtataaatgaatggcagaatacggggttccagtatgatgtcatcagctgcctgaacttgctggaccgctgtgatcagcccctgactttgttaaaagatatcagaagtgtcttggagccaactagaggcagggtcatccttgcccttgtcctcccctttcatccctatgtggaaaactaggtggcaagtgggagaaaccatcagaaattttggaaatcaaaggacagaactgggaagaacaagtgaatagtctgcctgaagttttcagaaaagctggttttgttatcgaagctttcaccagactaccatacctgtgtgaaggcgacatgtataatgactactacgttctggatgacgctgtctttgttctcaaaccagtataaacacgtggaggtcgaagtcttcagagtccgcaccctccgggatgtgcccttggaagagggtctgtgttcacaattacgtgaagggaggacccttggggaccgccattctaaatatcatgtaggaatttaaaaagccaaaatactaattatttctttgtagtgtgtaaaggaatgtttttaaaagacaaaaacccaactctttgtggatttttatcaactctttactcagagccactctccaatgcaggtcacactccaattatgatggaagatattttttatacttaattgcagtagggactcattcccagacaaagcaatagtcacgacttcatggaaccaatcaatggattgttttttgaagactggcaataaagctgtccattcaattccaaatactggttttaaggtatagccactgatattctttcatgtttagaaattctttctgttattattcaagaaaatgtttttaatcatgctaataaacttttttggagatgactttggcatcatgtttgaattcatataaagctcccctagcattttttattggtttggcttcaggagtacccaaatagtagcattatgagaatgacgcagacaatttgaataggggggaaggaaggcttcagacttgggggaaggggagattattgcaaattgcagtgaacactgagtcagtaaaaaaaaaaaacagaaacaaaaacccagcctcattcagatacagaacttcagggacccctccccccacccccccagttaatgctgctgtgaaaaatgcaaaataacctggttctgactttgtgatcactcatgtcccatacactgaactttgtttttttctggacaatctcaggttctcagaattgaaacattcagttttgtctactgacaaaatgcaactaaaaatgttttaattcaacttcttactctacacttatatacctctctcccagagcttggctcttccctgaaatccttaaaggagtttattatttgccaagaatatggtttgatgaagaccgtgtcagactcatgcattctggaatccgtgagtgcctccaaccataaacccagaaatgctgccatagaggaacccattagcaagatcaataaccatcgtggatattccaaagagcagagcatttaacccagaatctgaaatctcagtaataacagaaatgtcaatatgagattgtggttattaacaatatgttatcctcactactttatttcttttttcatccaggtgtttcattaagtattctcatttatatgctcatagaagtcatcagatcaacacattcactccaacacctgggtataaaggcgaattaaaacctgaagaattactttattattcattaagaactgcattcccacatcctcacaccaatatcttccactgttactgtgcagtcataataagagttgggttatgtgatttatgcaaaattgttattggtgtgttctaatgatttttttccaggaattcaagtaagtgaagtacaaatacttagcaccatagattgtaaaaatagaaagaggaaatgagaaaacttaatgtcgttcttgtacagttgagttttgcttctttataaactgtctgttaaaatcaggggttgctgttagactgtcaagcagaagtgatggatgttcaaggaggcaggttgccccaaagtgttttctaactttcaagtagagaactttatgctctaataagaaaaatacaactcattcttaaccacccccccaaaacagagaaaacacatacatttatgcattttaaagataaaaagtagtttctcaaaaaaatctgaagttctctgaaaaccagcttattaaaagtgctgttttgtggtgaaaattgaaaccaaatccactcacatttcctatcgggtcttgaaattcttggtggtgtgtcaccattccactagatggcagtgttgcttactgagtgtcaatggcttttttccccgtaaatggaatcatgtttttctcccccaaagtacaataaagctgccttgtctgcaccattaaaaaaaaaag

SEQ ID NO: 418238 - DNA, 3214 bp, Homo sapiens
ccgggggagaaagcgacgcggccgctcgtaagtgctccggatggaaactggtgcagggggcagcggcgttccgcggccggaagggaagggggaggtgccgaggctgcgcgccggctgctcctccccacccccagcctttgccctgaagggggctggatgggcaaggcggccgcgatggctcgagctcgggcggtggcggcggtggccggaggcggcggtgcctcctcctcctcgccccggcgccggcggtgatccgagcgagcggccgcggcccccgatgagactgctggcgggctggctgtgcctgagcctggcgtccgtgtggctggcgcggaggatgtggacgctgcggagcccgctcacccgctccctggtatgtgtgcaacagagagaaattatgcgaatcactccaggctgtctttgttcagagttaccttgatcaaggaacacagatcttcttaaacaacagcattgagaaatcgggctggctatttatccaattatatcattcttttgtgtcatctgtttttagcctgtttatgtctagaacatctatcaatgggttgctaggaagaggctcaatgtttgtgttttcaccagatcagtttcagagactgcttaaaattaatccagactggaaaacccacagacttcttgatttaggtgctggagatggagaagtcacaaaaatcatgagccctcattttgaagaaatctatgccactgagctttctgaaactatgatatggcagcttcagaaaaagaaatacagagtccttggtataaatgaatggcagaatacggggttccagtatgatgtcatcagctgcctgaacttgctggaccgctgtgatcagcccctgactttgttaaaagatatcagaagtgtcttggagccaactagaggcagggtcatccttgcccttgtcctcccctttcatccctatgtggaaaactaggtggcaagtgggagaaaccatcagaaattttggaaatcaaaggacagaactgggaagaacaagtgaatagtctgcctgaagttttcagaaaagctggttttgttatcgaagctttcaccagactaccatacctgtgtgaaggcgacatgtataatgactactacgttctggatgacgctgtctttgttctcaaaccagtataaacacgtggaggtcgaagtcttcagagtccgcaccctccgggatgtgcccttggaagagggtctgtgttcacaattacgtgaagggaggacccttggggaccgccattctaaatatcatgtaggaatttaaaaagccaaaatactaattatttctttgtagtgtgtaaaggaatgtttttaaaagacaaaaacccaactctttgtggatttttatcaactctttactcagagccactctccaatgcaggtcacactccaattatgatggaagatattttttatacttaattgcagtagggactcattcccagacaaagcaatagtcacgacttcatggaaccaatcaatggattgttttttgaagactggcaataaagctgtccattcaattccaaatactggttttaaggtatagccactgatattctttcatgtttagaaattctttctgttattattcaagaaaatgtttttaatcatgctaataaacttttttggagatgactttggcatcatgtttgaattcatataaagctcccctagcattttttattggtttggcttcaggagtacccaaatagtagcattatgagaatgacgcagacaatttgaataggggggaaggaaggcttcagacttgggggaaggggagattattgcaaattgcagtgaacactgagtcagtaaaaaaaaaaaacagaaacaaaaacccagcctcattcagatacagaacttcagggacccctccccccacccccccagttaatgctgctgtgaaaaatgcaaaataacctggttctgactttgtgatcactcatgtcccatacactgaactttgtttttttctggacaatctcaggttctcagaattgaaacattcagttttgtctactgacaaaatgcaactaaaaatgttttaattcaacttcttactctacacttatatacctctctcccagagcttggctcttccctgaaatccttaaaggagtttattatttgccaagaatatggtttgatgaagaccgtgtcagactcatgcattctggaatccgtgagtgcctccaaccataaacccagaaatgctgccatagaggaacccattagcaagatcaataaccatcgtggatattccaaagagcagagcatttaacccagaatctgaaatctcagtaataacagaaatgtcaatatgagattgtggttattaacaatatgttatcctcactactttatttcttttttcatccaggtgtttcattaagtattctcatttatatgctcatagaagtcatcagatcaacacattcactccaacacctgggtataaaggcgaattaaaacctgaagaattactttattattcattaagaactgcattcccacatcctcacaccaatatcttccactgttactgtgcagtcataataagagttgggttatgtgatttatgcaaaattgttattggtgtgttctaatgatttttttccaggaattcaagtaagtgaagtacaaatacttagcaccatagattgtaaaaatagaaagaggaaatgagaaaacttaatgtcgttcttgtacagttgagttttgcttctttataaactgtctgttaaaatcaggggttgctgttagactgtcaagcagaagtgatggatgttcaaggaggcaggttgccccaaagtgttttctaactttcaagtagagaactttatgctctaataagaaaaatacaactcattcttaaccacccccccaaaacagagaaaacacatacatttatgcattttaaagataaaaagtagtttctcaaaaaaatctgaagttctctgaaaaccagcttattaaaagtgctgttttgtggtgaaaattgaaaccaaatccactcacatttcctatcgggtcttgaaattcttggtggtgtgtcaccattccactagatggcagtgttgcttactgagtgtcaatggcttttttccccgtaaatggaatcatgtttttctcccccaaagtacaataaagctgccttgtctgcaccattaaaaaaaaaag

SEQ ID NO: 418239 - DNA, 3094 bp, Homo sapiens
ccgggggagaaagcgacgcggccgctcgtaagtgctccggatggaaactggtgcagggggcagcggcgttccgcggccggaagggaagggggaggtgccgaggctgcgcgccggctgctcctccccacccccagcctttgccctgaagggggctggatgggcaaggcggccgcgatggctcgagctcgggcggtggcggcggtggccggaggcggcggtgcctcctcctcctcgccccggcgccggcggtgatccgagcgagcggccgcggcccccgatgagactgctggcgggctggctgtgcctgagcctggcgtccgtgtggctggcgcggaggatgtggacgctgcggagcccgctcacccgctccctgtacgtgaacatgactagcggcccgggtgggccggcggcggccgcgggcggcaggaaggagaaccaccaggttgctaggaagaggctcaatgtttgtgttttcaccagatcagtttcagagactgcttaaaattaatccagactggaaaacccacagacttcttgatttaggtgctggagatggagaagtcacaaaaatcatgagccctcattttgaagaaatctatgccactgagctttctgaaactatgatatggcagcttcagaaaaagaaatacagagtccttggtataaatgaatggcagaatacggggttccagtatgatgtcatcagctgcctgaacttgctggaccgctgtgatcagcccctgactttgttaaaagatatcagaagtgtcttggagccaactagaggcagggtcatccttgcccttgtcctcccctttcatccctatgtggaaaactaggtggcaagtgggagaaaccatcagaaattttggaaatcaaaggacagaactgggaagaacaagtgaatagtctgcctgaagttttcagaaaagctggttttgttatcgaagctttcaccagactaccatacctgtgtgaaggcgacatgtataatgactactacgttctggatgacgctgtctttgttctcaaaccagtataaacacgtggaggtcgaagtcttcagagtccgcaccctccgggatgtgcccttggaagagggtctgtgttcacaattacgtgaagggaggacccttggggaccgccattctaaatatcatgtaggaatttaaaaagccaaaatactaattatttctttgtagtgtgtaaaggaatgtttttaaaagacaaaaacccaactctttgtggatttttatcaactctttactcagagccactctccaatgcaggtcacactccaattatgatggaagatattttttatacttaattgcagtagggactcattcccagacaaagcaatagtcacgacttcatggaaccaatcaatggattgttttttgaagactggcaataaagctgtccattcaattccaaatactggttttaaggtatagccactgatattctttcatgtttagaaattctttctgttattattcaagaaaatgtttttaatcatgctaataaacttttttggagatgactttggcatcatgtttgaattcatataaagctcccctagcattttttattggtttggcttcaggagtacccaaatagtagcattatgagaatgacgcagacaatttgaataggggggaaggaaggcttcagacttgggggaaggggagattattgcaaattgcagtgaacactgagtcagtaaaaaaaaaaaacagaaacaaaaacccagcctcattcagatacagaacttcagggacccctccccccacccccccagttaatgctgctgtgaaaaatgcaaaataacctggttctgactttgtgatcactcatgtcccatacactgaactttgtttttttctggacaatctcaggttctcagaattgaaacattcagttttgtctactgacaaaatgcaactaaaaatgttttaattcaacttcttactctacacttatatacctctctcccagagcttggctcttccctgaaatccttaaaggagtttattatttgccaagaatatggtttgatgaagaccgtgtcagactcatgcattctggaatccgtgagtgcctccaaccataaacccagaaatgctgccatagaggaacccattagcaagatcaataaccatcgtggatattccaaagagcagagcatttaacccagaatctgaaatctcagtaataacagaaatgtcaatatgagattgtggttattaacaatatgttatcctcactactttatttcttttttcatccaggtgtttcattaagtattctcatttatatgctcatagaagtcatcagatcaacacattcactccaacacctgggtataaaggcgaattaaaacctgaagaattactttattattcattaagaactgcattcccacatcctcacaccaatatcttccactgttactgtgcagtcataataagagttgggttatgtgatttatgcaaaattgttattggtgtgttctaatgatttttttccaggaattcaagtaagtgaagtacaaatacttagcaccatagattgtaaaaatagaaagaggaaatgagaaaacttaatgtcgttcttgtacagttgagttttgcttctttataaactgtctgttaaaatcaggggttgctgttagactgtcaagcagaagtgatggatgttcaaggaggcaggttgccccaaagtgttttctaactttcaagtagagaactttatgctctaataagaaaaatacaactcattcttaaccacccccccaaaacagagaaaacacatacatttatgcattttaaagataaaaagtagtttctcaaaaaaatctgaagttctctgaaaaccagcttattaaaagtgctgttttgtggtgaaaattgaaaccaaatccactcacatttcctatcgggtcttgaaattcttggtggtgtgtcaccattccactagatggcagtgttgcttactgagtgtcaatggcttttttccccgtaaatggaatcatgtttttctcccccaaagtacaataaagctgccttgtctgcaccattaaaaaaaaaag

SEQ ID NO: 418240 - DNA, 3075 bp, Homo sapiens
ccgggggagaaagcgacgcggccgctcgtaagtgctccggatggaaactggtgcagggggcagcggcgttccgcggccggaagggaagggggaggtgccgaggctgcgcgccggctgctcctccccacccccagcctttgccctgaagggggctggatgggcaaggcggccgcgatggctcgagctcgggcggtggcggcggtggccggaggcggcggtgcctcctcctcctcgccccggcgccggcggtgatccgagcgagcggccgcggcccccgatgagactgctggcgggctggctgtgcctgagcctggcgtccgtgtggctggcgcggaggatgtggacgctgcggagcccgctcacccgctccctgtacgtgaacatgactagcggcccgggtgggccggcggcggccgcgggcggcaggaaggagaaccaccagtggtatgtgtgcaacagagagaaattatgcgaatcactccaggctgtctttgttcagagttaccttgatcaaggaacacagatcttcttaaacaacagcattgagaaatcgggctggctatttatccaattatatcattcttttgtgtcatctgtttttagcctgtttatgtctagaacatctatcaatggagtccttggtataaatgaatggcagaatacggggttccagtatgatgtcatcagctgcctgaacttgctggaccgctgtgatcagcccctgactttgttaaaagatatcagaagtgtcttggagccaactagaggcagggtcatccttgcccttgtcctcccctttcatccctatgtggaaaactaggtggcaagtgggagaaaccatcagaaattttggaaatcaaaggacagaactgggaagaacaagtgaatagtctgcctgaagttttcagaaaagctggttttgttatcgaagctttcaccagactaccatacctgtgtgaaggcgacatgtataatgactactacgttctggatgacgctgtctttgttctcaaaccagtataaacacgtggaggtcgaagtcttcagagtccgcaccctccgggatgtgcccttggaagagggtctgtgttcacaattacgtgaagggaggacccttggggaccgccattctaaatatcatgtaggaatttaaaaagccaaaatactaattatttctttgtagtgtgtaaaggaatgtttttaaaagacaaaaacccaactctttgtggatttttatcaactctttactcagagccactctccaatgcaggtcacactccaattatgatggaagatattttttatacttaattgcagtagggactcattcccagacaaagcaatagtcacgacttcatggaaccaatcaatggattgttttttgaagactggcaataaagctgtccattcaattccaaatactggttttaaggtatagccactgatattctttcatgtttagaaattctttctgttattattcaagaaaatgtttttaatcatgctaataaacttttttggagatgactttggcatcatgtttgaattcatataaagctcccctagcattttttattggtttggcttcaggagtacccaaatagtagcattatgagaatgacgcagacaatttgaataggggggaaggaaggcttcagacttgggggaaggggagattattgcaaattgcagtgaacactgagtcagtaaaaaaaaaaaacagaaacaaaaacccagcctcattcagatacagaacttcagggacccctccccccacccccccagttaatgctgctgtgaaaaatgcaaaataacctggttctgactttgtgatcactcatgtcccatacactgaactttgtttttttctggacaatctcaggttctcagaattgaaacattcagttttgtctactgacaaaatgcaactaaaaatgttttaattcaacttcttactctacacttatatacctctctcccagagcttggctcttccctgaaatccttaaaggagtttattatttgccaagaatatggtttgatgaagaccgtgtcagactcatgcattctggaatccgtgagtgcctccaaccataaacccagaaatgctgccatagaggaacccattagcaagatcaataaccatcgtggatattccaaagagcagagcatttaacccagaatctgaaatctcagtaataacagaaatgtcaatatgagattgtggttattaacaatatgttatcctcactactttatttcttttttcatccaggtgtttcattaagtattctcatttatatgctcatagaagtcatcagatcaacacattcactccaacacctgggtataaaggcgaattaaaacctgaagaattactttattattcattaagaactgcattcccacatcctcacaccaatatcttccactgttactgtgcagtcataataagagttgggttatgtgatttatgcaaaattgttattggtgtgttctaatgatttttttccaggaattcaagtaagtgaagtacaaatacttagcaccatagattgtaaaaatagaaagaggaaatgagaaaacttaatgtcgttcttgtacagttgagttttgcttctttataaactgtctgttaaaatcaggggttgctgttagactgtcaagcagaagtgatggatgttcaaggaggcaggttgccccaaagtgttttctaactttcaagtagagaactttatgctctaataagaaaaatacaactcattcttaaccacccccccaaaacagagaaaacacatacatttatgcattttaaagataaaaagtagtttctcaaaaaaatctgaagttctctgaaaaccagcttattaaaagtgctgttttgtggtgaaaattgaaaccaaatccactcacatttcctatcgggtcttgaaattcttggtggtgtgtcaccattccactagatggcagtgttgcttactgagtgtcaatggcttttttccccgtaaatggaatcatgtttttctcccccaaagtacaataaagctgccttgtctgcaccattaaaaaaaaaag

SEQ ID NO: 418241 - DNA, 2450 bp, Homo sapiens
ccgggggagaaagcgacgcggccgctcgtaagtgctccggatggaaactggtgcagggggcagcggcgttccgcggccggaagggaagggggaggtgccgaggctgcgcgccggctgctcctccccacccccagcctttgccctgaagggggctggatgggcaaggcggccgcgatggctcgagctcgggcggtggcggcggtggccggaggcggcggtgcctcctcctcctcgccccggcgccggcggtgatccgagcgagcggccgcggcccccgatgagactgctggcgggctggctgtgcctgagcctggcgtccgtgtggctggcgcggaggatgtggacgctgcggagcccgctcacccgctcccgctgtctttgttctcaaaccagtataaacacgtggaggtcgaagtcttcagagtccgcaccctccgggatgtgcccttggaagagggtctgtgttcacaattacgtgaagggaggacccttggggaccgccattctaaatatcatgtaggaatttaaaaagccaaaatactaattatttctttgtagtgtgtaaaggaatgtttttaaaagacaaaaacccaactctttgtggatttttatcaactctttactcagagccactctccaatgcaggtcacactccaattatgatggaagatattttttatacttaattgcagtagggactcattcccagacaaagcaatagtcacgacttcatggaaccaatcaatggattgttttttgaagactggcaataaagctgtccattcaattccaaatactggttttaaggtatagccactgatattctttcatgtttagaaattctttctgttattattcaagaaaatgtttttaatcatgctaataaacttttttggagatgactttggcatcatgtttgaattcatataaagctcccctagcattttttattggtttggcttcaggagtacccaaatagtagcattatgagaatgacgcagacaatttgaataggggggaaggaaggcttcagacttgggggaaggggagattattgcaaattgcagtgaacactgagtcagtaaaaaaaaaaaacagaaacaaaaacccagcctcattcagatacagaacttcagggacccctccccccacccccccagttaatgctgctgtgaaaaatgcaaaataacctggttctgactttgtgatcactcatgtcccatacactgaactttgtttttttctggacaatctcaggttctcagaattgaaacattcagttttgtctactgacaaaatgcaactaaaaatgttttaattcaacttcttactctacacttatatacctctctcccagagcttggctcttccctgaaatccttaaaggagtttattatttgccaagaatatggtttgatgaagaccgtgtcagactcatgcattctggaatccgtgagtgcctccaaccataaacccagaaatgctgccatagaggaacccattagcaagatcaataaccatcgtggatattccaaagagcagagcatttaacccagaatctgaaatctcagtaataacagaaatgtcaatatgagattgtggttattaacaatatgttatcctcactactttatttcttttttcatccaggtgtttcattaagtattctcatttatatgctcatagaagtcatcagatcaacacattcactccaacacctgggtataaaggcgaattaaaacctgaagaattactttattattcattaagaactgcattcccacatcctcacaccaatatcttccactgttactgtgcagtcataataagagttgggttatgtgatttatgcaaaattgttattggtgtgttctaatgatttttttccaggaattcaagtaagtgaagtacaaatacttagcaccatagattgtaaaaatagaaagaggaaatgagaaaacttaatgtcgttcttgtacagttgagttttgcttctttataaactgtctgttaaaatcaggggttgctgttagactgtcaagcagaagtgatggatgttcaaggaggcaggttgccccaaagtgttttctaactttcaagtagagaactttatgctctaataagaaaaatacaactcattcttaaccacccccccaaaacagagaaaacacatacatttatgcattttaaagataaaaagtagtttctcaaaaaaatctgaagttctctgaaaaccagcttattaaaagtgctgttttgtggtgaaaattgaaaccaaatccactcacatttcctatcgggtcttgaaattcttggtggtgtgtcaccattccactagatggcagtgttgcttactgagtgtcaatggcttttttccccgtaaatggaatcatgtttttctcccccaaagtacaataaagctgccttgtctgcaccattaaaaaaaaaag

SEQ ID NO: 418242 - DNA, 906 bp, Homo sapiens
  misc_feature (886)..(886): n is a, c, g, or t
ccgggggagaaagcgacgcggccgctcgtaagtgctccggatggaaactggtgcagggggcagcggcgttccgcggccggaagggaagggggaggtgccgaggctgcgcgccggctgctcctccccacccccagcctttgccctgaagggggctggatgggcaaggcggccgcgatggctcgagctcgggcggtggcggcggtggccggaggcggcggtgcctcctcctcctcgccccggcgccggcggtgatccgagcgagcggccgcggcccccgatgagactgctggcgggctggctgtgcctgagcctggcgtccgtgtggctggcgcggaggatgtggacgctgcggagcccgctcacccgctccctgtacgtgaacatgactagcggcccgggtgggccggcggcggccgcgggcggcaggaaggagaaccaccagtggtatgtgtgcaacagagagaaattatgcgaatcactccaggctgtctttgttcagagttaccttgatcaaggaacacagatcttcttaaacaacagcattgagaaatcgggctggctatttatccaattatatcattcttttgtgtcatctgtttttagcctgtttatgtctagaacatctatcaatgggttgctaggaagaggctcaatgtttgtgttttcaccagatcagtttcagagactgcttaaaattaatccagactggaaaacccacagacttcttgatttaggtgctggagatggagaagtcacaaaaatcatgagccctcattttgaagaaatctatgccactgagctttctgaaactatgatatggcagcttcagaaaaagaaatacagatccttggtataaatggacatggccagcacattaccgggcggntttcacacgctaatggaaac

SEQ ID NO: 418243 - DNA, 4292 bp, Homo sapiens
agtctcattggcagaggcgggaccgacggtgtgtgcggaacatggcggagcgcggcaggaagcggccgtgcggcccgggtgaacacggccaaaggattgagtggcgaaaatggaagcaacagaagaaagaggagaaaaaaaaatggaaggatctcaagctgatgaaaaaactggagcggcagcgggcacaggaggaacaggcaaagcgcctggaagaggaggaggcagcggcagagaaggaggaccgcgggcggccctacacactgagcgtagccctgccgggctccatcctggacaatgctcagtcgccggagcttcgcacctacttggccggtcagattgccagagcctgtgccatcttctgtgtggatgagatcgtggtgtttgatgaggagggccaggatgccaagactgtggagggggaattcacaggagttgggaagaaggggcaggcgtgcgtacagctggcccggatcctgcagtacctggagtgtccacagtacctgaggaaggcgttcttccccaagcaccaggatctacagtttgcagggctcctgaaccccctggacagcccccaccacatgcgtcaggatgaggaatccgagttccgagagggcatcgtggtggatcggcccacccggccaggccacggctcctttgtcaactgtggcatgaaaaaggaggtgaagattgacaagaacctggagcccgggcttcgggtgactgtgcgactgaaccagcagcagcacccagactgcaagacctaccatggcaaagtggtatcatcgcaggaccctcgcaccaaagctggtctctactggggctacaccgtccgactggcttcctgcctcagtgctgtgtttgctgaggcccccttccaagatgggtatgacctgaccatcgggacgtcagagcgcggctcagatgtggcctctgcccagcttcccaacttcaggcatgctcttgtggtgttcgggggcctccagggtctggaagctggagcggatgctgaccccaacctggaggtggctgaacccagtgtcctctttgacctgtacgtcaatacctgtcctggccagggtagccgtaccatccgcacggaggaagccatcctcatctccctggccgccctgcagcctggcctcatccaggcgggtgcccggcacacctgaaagttctaaggggccgaggacatcagtgaagcagcagtgaaaccaggggctctgcaggtcacttgggacggacgccaccagacttgtctccaaaaatcaccacctttaatactccccggcctgcacacacccacagtctcactgggctccaccctcacttactgcccgccgtgatggccttgaggctgcctgcccgcgccaggatgtttggcacaaagagcagccccgaagcccgctcaatgctctcgatgggcaccaggaagcgctccagtgggatggcctcatccacaggtgcgttgggcatcacgtaggtgcggagctcaatttgcccacctgctgcctccaggatcagcaccttgaagaagtgtgtgggcactgccacgtggttcttgccgatgacctggtactttacgtaggatttcccatcagcctctgtcctgtgggcagacccaggcacacgtgggcagggggcctggatgaacccaaagccacctcttccaggcagccttccctgatctgtcctctaacttctgtcaacctgcaggaccacgccctcactgtgagacttctgtagcctgcctggctcctccttgaggctggaactctctccagggtggttaactctttccctctgttttccttatgcccaacactgggtcaggcagagtgggcgacaataaacgctgctaggagaatcgagccttctgaatattcacattcgtctgaggggagacttaacgactgtccatctctccccacagaggtgagcaacaagtgggcaaggaccatgacaggtgatatcccagcaccagcacaggtgccaggacaccggacgggggctccccctcagcagagtctcctcccttccaccaggccctaggaggcacctgctaatgaaatttgatcagtgccccaaccaccgccttggccagcctatgccgagcccttaccatggaccaggccctggggaagcatgtgacatcaaccaagaggtcacaggttttgcagagggggacacaggtcatttgcccacagcaccaaggaactaggtgatgaggcctggactccatcccgagcctgtggattccagagtgagctgctcagcctggacctgttgcctctcagccccagccctctgcaggccagaaaaaccacggagcacacccagaggtgctcagttgcttccacctgagaggcagggctgcacaggagcaagagtggaggccctgggtcaggcagatctagattcaaactcccgagaagggtggagggaagtgctccaagcagagcagagactgaaggcgggagagcctggtgcaccgcggacctgcagggggaaggcgtgagagctcggtgcactggggacctgcatggggaaggcgggagagctcggtgcactggggacctgcatggggaaggcgtgagagctcggtgcactggggacctgcatggggaaggcgggagagctcggtgcacctcggacctgcagagggaaggtgggagagcttggtgcaccgcagacctgcagggggaaggcgggagagcttggtgcactgcagacctgcggggggaaggtgggagagcttggtgcactgcagacctgcggggggttccatattggcagaacaagattgggtgggcatgccaagaggtgacagcagggagaagcgggggcagattcagggcctgctgctgcccatgggcagaggagagatggtcaggggtacccgacaggtctttggctgtggaggtggaatgaggggactcgaggcagggaagctgacaggcttgccaagaaaccagatgagtagggaactggtattgacccagagcctggggcaagcctggccctgtgagtggcagtaggggcctcaggtgagtgggaggttctgccgcccccctggtttccaccttacctgggcaggaagagtggccctgtgcagacatagacgttttggtagctgcgggtcaagctgcggctatatttctccaggttgttccaggcattctggttgaggtggggcacctggtaggagagatagggcttagcaggactgtggctgggacccttcctcctctatcagagggccgccccaggtcctgaggggatggacaggctcagagatatccagtgagacaagcggggggaaactgaggctcaaggaatgaaagtcactccctgaaacccagggctgatagagtgctagccaccaccctctgtccctcccacagcccaggtgtcaaagtcttttctcagctcccaagagtcgaatgaaggaagagcctgtctccacctttcagagaggactgaggcctgtccccagccccacccagggtctcctgggaagaccagcccttccaactaccaacccgttccttttcccagtctgagccacaggaagagcctagcggggaatgccatgaatcgacctccatcctgagctctccaggcctgggacaatggaaagtggatagggggctgtcttcccagaaggaagctgggtcagaggttggtgccccatgggctccacccagagccccatggcagtctccatccattggtgccaggacctgctgggaacaggctgagagggtggttggcccagtgcacagtgcctggcactaacaacctgatcgtgggccaggtgtctgcctcgaaactgcctgaaggcaggcagggtaggacaatgtctggaggctcacggttttatagactaggggtccccaacccctgggctacagaccggtaccagaaccgggccacacagcaggaggtgagcagcaggcgagcaagggaagcttcatctgtatttacagccacccccccattgatcccacagcagcctgagctccgcctcctgtcagatcagtggcggctggagattgtcataggagctggaaccctatggtgaactgcgcatgtgaggaggttgcgcgcttcttttgaaaacctaatgcctgatctgtcgttgttgcccatcacctccagataggactgtctagttgcaggaaaacaagctcagggctcccacggatcctacattactgtgagttgtatatttcactatatgttacaatgtaataataatagaaataaaatgtacataaatgtaaagcact

SEQ ID NO: 418244 - DNA, 1871 bp, Homo sapiens
agtctcattggcagaggcgggaccgacggtgtgtgcggaacatggcggagcgcggcaggaagcggccgtgcggcccgggtgaacacggccaaaggattgagtggcgaaaatggaagcaacagaagaaagaggagaaaaaaaaatggaaggatctcaagctgatgaaaaaactggagcggcagcgggcacaggaggaacaggcaaagcgcctggaagaggaggaggcagcggcagagaaggaggaccgcgggcggccctacacactgagcgtagccctgccgggctccatcctggacaatgctcagtcgccggagcttcgcacctacttggccggtcagattgccagagcctgtgccatcttctgtgtggatgagatcgtggtgtttgatgaggagggccaggatgccaagactgtggagggggaattcacaggagttgggaagaaggggcaggcgtgcgtacagctggcccggatcctgcagtacctggagtgtccacagtacctgaggaaggcgttcttccccaagcaccaggatctacagtttgcagggctcctgaaccccctggacagcccccaccacatgcgtcaggatgaggaatccgagttccgagagggcatcgtggtggatcggcccacccggccaggccacggctcctttgtcaactgtggcatgaaaaaggaggtgaagattgacaagaacctggagcccgggcttcgggtgactgtgcgactgaaccagcagcagcacccagactgcaagacctaccatggcaaagtggtatcatcgcaggaccctcgcaccaaagctggtctctactggggctacaccgtccgactggcttcctgcctcagtgctgtgtttgctgaggcccccttccaagatgggtatgacctgaccatcgggacgtcagagcgcggctcagatgtggcctctgcccagcttcccaacttcaggcatgctcttgtggtgttcgggggcctccagggtctggaagctggagcggatgctgaccccaacctggaggtggctgaacccagtgtcctctttgacctgtacgtcaatacctgtcctggccagggtagccgtaccatccgcacggaggaagccatcctcatctccctggccgccctgcagcctggcctcatccaggcgggtgcccggcacacctgaaagttctaaggggccgaggacatcagtgaagcagcagtgaaaccaggggctctgcaggtcacttgggacggacgccaccagacttgtctccaaaaatcaccacctttaatactccccggcctgcacacacccacagtctcactgggctccaccctcacttactgcccgccgtgatggccttgaggctgcctgcccgcgccaggatgtttggcacaaagagcagccccgaagcccgctcaatgctctcgatgggcaccaggaagcgctccagtgggatggcctcatccacaggtgcgttgggcatcacgtaggtgcggagctcaatttgcccacctgctgcctccaggatcagcaccttgaagaagtgtgtgggcactgccacgtggttcttgccgatgacctggtactttacgtaggatttcccatcagcctctgtcctgtgggcagacccaggcacacgtgggcagggggcctggatgaacccaaagccacctcttccaggcagccttccctgatctgtcctctaacttctgtcaacctgcaggaccacgccctcactgtgagacttctgtagcctgcctggctcctccttgaggctggaactctctccagggtggttaactctttccctctgttttccttatgcccaacactgggtcaggcagagtgggcgacaataaacgctgctaggagaatcga

SEQ ID NO: 418245 - DNA, 2552 bp, Homo sapiens
agtctcattggcagaggcgggaccgacggtgtgtgcggaacatggcggagcgcggcaggaagcggccgtgcggcccgggtgaacacggccaaaggattgagtggcgaaaatggaagcaacagaagaaagaggagaaaaaaaaatggaaggatctcaagctgatgaaaaaactggagcggcagcgggcacaggaggaacaggcaaagcgcctggaagaggaggaggcagcggcagagaaggaggaccgcgggcggccctacacactgagcgtagccctgccgggctccatcctggacaatgctcagtcgccggagcttcgcacctacttggccggtcagattgccagagcctgtgccatcttctgtgtggatgagatcgtggtgtttgatgaggagggccaggatgccaagactgtggagggggaattcacaggagttgggaagaaggggcaggcgtgcgtacagctggcccggatcctgcagtacctggagtgtccacagtacctgaggaaggcgttcttccccaagcaccaggatctacagtttgcagggctcctgaaccccctggacagcccccaccacatgcgtcaggatgaggaatccgagttccgagagggcatcgtggtggatcggcccacccggccaggccacggctcctttgtcaactgtggcatgaaaaaggaggtgaagattgacaagaacctggagcccgggcttcgggtgactgtgcgactgaaccagcagcagcacccagactgcaagacctaccatggcaaagtggtatcatcgcaggaccctcgcaccaaagctggtctctactggggctacaccgtccgactggcttcctgcctcagtgctgtgtttgctgaggcccccttccaagatgggtatgacctgaccatcgggacgtcagagcgcggctcagatgtggcctctgcccagcttcccaacttcaggcatgctcttgtggtgttcgggggcctccagggtctggaagctggagcggatgctgaccccaacctggaggtggctgaacccagtgtcctctttgacctgtacgtcaatacctgtcctggccagggtagccgtaccatccgcacggaggaagccatcctcatctccctggccgccctgcagcctggcctcatccaggcgggtgcccggcacacctgaaagttctaaggggccgaggacatcagtgaagcagcagtgaaaccaggggctctgcaggtcacttgggacggacgccaccagacttgtctccaaaaatcaccacctttaatactccccggcctgcacacacccacagtctcactgggctccaccctcacttactgcccgccgtgatggccttgaggctgcctgcccgcgccaggatgtttggcacaaagagcagccccgaagcccgctcaatgctctcgatgggcaccaggaagcgctccagtgggatggcctcatccacaggtgcgttgggcatcacgtaggtgcggagctcaatttgcccacctgctgcctccaggatcagcaccttgaagaagtgtgtgggcactgccacgtggttcttgccgatgacctggtactttacgtaggatttcccatcagcctctgtcctgtgggcagacccaggcacacgtgggcagggggcctggatgaacccaaagccacctcttccaggcagccttccctgatctgtcctctaacttctgtcaacctgcaggaccacgccctcactgtgagacttctgtagcctgcctggctcctccttgaggctggaactctctccagggtggttaactctttccctctgttttccttatgcccaacactgggtcaggcagagtgggcgacaataaacgctgctaggagaatcgagccttctgaatattcacattcgtctgaggggagacttaacgactgtccatctctccccacagaggtgagcaacaagtgggcaaggaccatgacaggtgatatcccagcaccagcacaggtgccaggacaccggacgggggctccccctcagcagagtctcctcccttccaccaggccctaggaggcacctgctaatgaaatttgatcagtgccccaaccaccgccttggccagcctatgccgagcccttaccatggaccaggccctggggaagcatgtgacatcaaccaagaggtcacaggttttgcagagggggacacaggtcatttgcccacagcaccaaggaactaggtgatgaggcctggactccatcccgagcctgtggattccagagtgagctgctcagcctggacctgttgcctctcagccccagccctctgcaggccagaaaaaccacggagcacacccagaggtgctcagttgcttccacctgagaggcagggctgcacaggagcaagagtggaggccctgggtcaggcagatctagattcaaactcccgagaagggtggagggaagtgctccaagcagagcagagactgaaggcgggagagcctggtgcaccgcggacctgggcaggaagagtggccctgtgcagaccggggagtattaaaggtggtgatt

SEQ ID NO: 418246 - DNA, 4215 bp, Homo sapiens
gtcttgaggatcccggtcattttctacacgagaaattgagcacagaagaaagaggagaaaaaaaaatggaaggatctcaagctgatgaaaaaactggagcggcagcgggcacaggaggaacaggcaaagcgcctggaagaggaggaggcagcggcagagaaggaggaccgcgggcggccctacacactgagcgtagccctgccgggctccatcctggacaatgctcagtcgccggagcttcgcacctacttggccggtcagattgccagagcctgtgccatcttctgtgtggatgagatcgtggtgtttgatgaggagggccaggatgccaagactgtggagggggaattcacaggagttgggaagaaggggcaggcgtgcgtacagctggcccggatcctgcagtacctggagtgtccacagtacctgaggaaggcgttcttccccaagcaccaggatctacagtttgcagggctcctgaaccccctggacagcccccaccacatgcgtcaggatgaggaatccgagttccgagagggcatcgtggtggatcggcccacccggccaggccacggctcctttgtcaactgtggcatgaaaaaggaggtgaagattgacaagaacctggagcccgggcttcgggtgactgtgcgactgaaccagcagcagcacccagactgcaagacctaccatggcaaagtggtatcatcgcaggaccctcgcaccaaagctggtctctactggggctacaccgtccgactggcttcctgcctcagtgctgtgtttgctgaggcccccttccaagatgggtatgacctgaccatcgggacgtcagagcgcggctcagatgtggcctctgcccagcttcccaacttcaggcatgctcttgtggtgttcgggggcctccagggtctggaagctggagcggatgctgaccccaacctggaggtggctgaacccagtgtcctctttgacctgtacgtcaatacctgtcctggccagggtagccgtaccatccgcacggaggaagccatcctcatctccctggccgccctgcagcctggcctcatccaggcgggtgcccggcacacctgaaagttctaaggggccgaggacatcagtgaagcagcagtgaaaccaggggctctgcaggtcacttgggacggacgccaccagacttgtctccaaaaatcaccacctttaatactccccggcctgcacacacccacagtctcactgggctccaccctcacttactgcccgccgtgatggccttgaggctgcctgcccgcgccaggatgtttggcacaaagagcagccccgaagcccgctcaatgctctcgatgggcaccaggaagcgctccagtgggatggcctcatccacaggtgcgttgggcatcacgtaggtgcggagctcaatttgcccacctgctgcctccaggatcagcaccttgaagaagtgtgtgggcactgccacgtggttcttgccgatgacctggtactttacgtaggatttcccatcagcctctgtcctgtgggcagacccaggcacacgtgggcagggggcctggatgaacccaaagccacctcttccaggcagccttccctgatctgtcctctaacttctgtcaacctgcaggaccacgccctcactgtgagacttctgtagcctgcctggctcctccttgaggctggaactctctccagggtggttaactctttccctctgttttccttatgcccaacactgggtcaggcagagtgggcgacaataaacgctgctaggagaatcgagccttctgaatattcacattcgtctgaggggagacttaacgactgtccatctctccccacagaggtgagcaacaagtgggcaaggaccatgacaggtgatatcccagcaccagcacaggtgccaggacaccggacgggggctccccctcagcagagtctcctcccttccaccaggccctaggaggcacctgctaatgaaatttgatcagtgccccaaccaccgccttggccagcctatgccgagcccttaccatggaccaggccctggggaagcatgtgacatcaaccaagaggtcacaggttttgcagagggggacacaggtcatttgcccacagcaccaaggaactaggtgatgaggcctggactccatcccgagcctgtggattccagagtgagctgctcagcctggacctgttgcctctcagccccagccctctgcaggccagaaaaaccacggagcacacccagaggtgctcagttgcttccacctgagaggcagggctgcacaggagcaagagtggaggccctgggtcaggcagatctagattcaaactcccgagaagggtggagggaagtgctccaagcagagcagagactgaaggcgggagagcctggtgcaccgcggacctgcagggggaaggcgtgagagctcggtgcactggggacctgcatggggaaggcgggagagctcggtgcactggggacctgcatggggaaggcgtgagagctcggtgcactggggacctgcatggggaaggcgggagagctcggtgcacctcggacctgcagagggaaggtgggagagcttggtgcaccgcagacctgcagggggaaggcgggagagcttggtgcactgcagacctgcggggggaaggtgggagagcttggtgcactgcagacctgcggggggttccatattggcagaacaagattgggtgggcatgccaagaggtgacagcagggagaagcgggggcagattcagggcctgctgctgcccatgggcagaggagagatggtcaggggtacccgacaggtctttggctgtggaggtggaatgaggggactcgaggcagggaagctgacaggcttgccaagaaaccagatgagtagggaactggtattgacccagagcctggggcaagcctggccctgtgagtggcagtaggggcctcaggtgagtgggaggttctgccgcccccctggtttccaccttacctgggcaggaagagtggccctgtgcagacatagacgttttggtagctgcgggtcaagctgcggctatatttctccaggttgttccaggcattctggttgaggtggggcacctggtaggagagatagggcttagcaggactgtggctgggacccttcctcctctatcagagggccgccccaggtcctgaggggatggacaggctcagagatatccagtgagacaagcggggggaaactgaggctcaaggaatgaaagtcactccctgaaacccagggctgatagagtgctagccaccaccctctgtccctcccacagcccaggtgtcaaagtcttttctcagctcccaagagtcgaatgaaggaagagcctgtctccacctttcagagaggactgaggcctgtccccagccccacccagggtctcctgggaagaccagcccttccaactaccaacccgttccttttcccagtctgagccacaggaagagcctagcggggaatgccatgaatcgacctccatcctgagctctccaggcctgggacaatggaaagtggatagggggctgtcttcccagaaggaagctgggtcagaggttggtgccccatgggctccacccagagccccatggcagtctccatccattggtgccaggacctgctgggaacaggctgagagggtggttggcccagtgcacagtgcctggcactaacaacctgatcgtgggccaggtgtctgcctcgaaactgcctgaaggcaggcagggtaggacaatgtctggaggctcacggttttatagactaggggtccccaacccctgggctacagaccggtaccagaaccgggccacacagcaggaggtgagcagcaggcgagcaagggaagcttcatctgtatttacagccacccccccattgatcccacagcagcctgagctccgcctcctgtcagatcagtggcggctggagattgtcataggagctggaaccctatggtgaactgcgcatgtgaggaggttgcgcgcttcttttgaaaacctaatgcctgatctgtcgttgttgcccatcacctccagataggactgtctagttgcaggaaaacaagctcagggctcccacggatcctacattactgtgagttgtatatttcactatatgttacaatgtaataataatagaaataaaatgtacataaatgtaaagcact

SEQ ID NO: 418247 - DNA, 4068 bp, Homo sapiens
ctgggaacatccctcccctgctcagggcggccctacacactgagcgtagccctgccgggctccatcctggacaatgctcagtcgccggagcttcgcacctacttggccggtcagattgccagagcctgtgccatcttctgtgtggatgagatcgtggtgtttgatgaggagggccaggatgccaagactgtggagggggaattcacaggagttgggaagaaggggcaggcgtgcgtacagctggcccggatcctgcagtacctggagtgtccacagtacctgaggaaggcgttcttccccaagcaccaggatctacagtttgcagggctcctgaaccccctggacagcccccaccacatgcgtcaggatgaggaatccgagttccgagagggcatcgtggtggatcggcccacccggccaggccacggctcctttgtcaactgtggcatgaaaaaggaggtgaagattgacaagaacctggagcccgggcttcgggtgactgtgcgactgaaccagcagcagcacccagactgcaagacctaccatggcaaagtggtatcatcgcaggaccctcgcaccaaagctggtctctactggggctacaccgtccgactggcttcctgcctcagtgctgtgtttgctgaggcccccttccaagatgggtatgacctgaccatcgggacgtcagagcgcggctcagatgtggcctctgcccagcttcccaacttcaggcatgctcttgtggtgttcgggggcctccagggtctggaagctggagcggatgctgaccccaacctggaggtggctgaacccagtgtcctctttgacctgtacgtcaatacctgtcctggccagggtagccgtaccatccgcacggaggaagccatcctcatctccctggccgccctgcagcctggcctcatccaggcgggtgcccggcacacctgaaagttctaaggggccgaggacatcagtgaagcagcagtgaaaccaggggctctgcaggtcacttgggacggacgccaccagacttgtctccaaaaatcaccacctttaatactccccggcctgcacacacccacagtctcactgggctccaccctcacttactgcccgccgtgatggccttgaggctgcctgcccgcgccaggatgtttggcacaaagagcagccccgaagcccgctcaatgctctcgatgggcaccaggaagcgctccagtgggatggcctcatccacaggtgcgttgggcatcacgtaggtgcggagctcaatttgcccacctgctgcctccaggatcagcaccttgaagaagtgtgtgggcactgccacgtggttcttgccgatgacctggtactttacgtaggatttcccatcagcctctgtcctgtgggcagacccaggcacacgtgggcagggggcctggatgaacccaaagccacctcttccaggcagccttccctgatctgtcctctaacttctgtcaacctgcaggaccacgccctcactgtgagacttctgtagcctgcctggctcctccttgaggctggaactctctccagggtggttaactctttccctctgttttccttatgcccaacactgggtcaggcagagtgggcgacaataaacgctgctaggagaatcgagccttctgaatattcacattcgtctgaggggagacttaacgactgtccatctctccccacagaggtgagcaacaagtgggcaaggaccatgacaggtgatatcccagcaccagcacaggtgccaggacaccggacgggggctccccctcagcagagtctcctcccttccaccaggccctaggaggcacctgctaatgaaatttgatcagtgccccaaccaccgccttggccagcctatgccgagcccttaccatggaccaggccctggggaagcatgtgacatcaaccaagaggtcacaggttttgcagagggggacacaggtcatttgcccacagcaccaaggaactaggtgatgaggcctggactccatcccgagcctgtggattccagagtgagctgctcagcctggacctgttgcctctcagccccagccctctgcaggccagaaaaaccacggagcacacccagaggtgctcagttgcttccacctgagaggcagggctgcacaggagcaagagtggaggccctgggtcaggcagatctagattcaaactcccgagaagggtggagggaagtgctccaagcagagcagagactgaaggcgggagagcctggtgcaccgcggacctgcagggggaaggcgtgagagctcggtgcactggggacctgcatggggaaggcgggagagctcggtgcactggggacctgcatggggaaggcgtgagagctcggtgcactggggacctgcatggggaaggcgggagagctcggtgcacctcggacctgcagagggaaggtgggagagcttggtgcaccgcagacctgcagggggaaggcgggagagcttggtgcactgcagacctgcggggggaaggtgggagagcttggtgcactgcagacctgcggggggttccatattggcagaacaagattgggtgggcatgccaagaggtgacagcagggagaagcgggggcagattcagggcctgctgctgcccatgggcagaggagagatggtcaggggtacccgacaggtctttggctgtggaggtggaatgaggggactcgaggcagggaagctgacaggcttgccaagaaaccagatgagtagggaactggtattgacccagagcctggggcaagcctggccctgtgagtggcagtaggggcctcaggtgagtgggaggttctgccgcccccctggtttccaccttacctgggcaggaagagtggccctgtgcagacatagacgttttggtagctgcgggtcaagctgcggctatatttctccaggttgttccaggcattctggttgaggtggggcacctggtaggagagatagggcttagcaggactgtggctgggacccttcctcctctatcagagggccgccccaggtcctgaggggatggacaggctcagagatatccagtgagacaagcggggggaaactgaggctcaaggaatgaaagtcactccctgaaacccagggctgatagagtgctagccaccaccctctgtccctcccacagcccaggtgtcaaagtcttttctcagctcccaagagtcgaatgaaggaagagcctgtctccacctttcagagaggactgaggcctgtccccagccccacccagggtctcctgggaagaccagcccttccaactaccaacccgttccttttcccagtctgagccacaggaagagcctagcggggaatgccatgaatcgacctccatcctgagctctccaggcctgggacaatggaaagtggatagggggctgtcttcccagaaggaagctgggtcagaggttggtgccccatgggctccacccagagccccatggcagtctccatccattggtgccaggacctgctgggaacaggctgagagggtggttggcccagtgcacagtgcctggcactaacaacctgatcgtgggccaggtgtctgcctcgaaactgcctgaaggcaggcagggtaggacaatgtctggaggctcacggttttatagactaggggtccccaacccctgggctacagaccggtaccagaaccgggccacacagcaggaggtgagcagcaggcgagcaagggaagcttcatctgtatttacagccacccccccattgatcccacagcagcctgagctccgcctcctgtcagatcagtggcggctggagattgtcataggagctggaaccctatggtgaactgcgcatgtgaggaggttgcgcgcttcttttgaaaacctaatgcctgatctgtcgttgttgcccatcacctccagataggactgtctagttgcaggaaaacaagctcagggctcccacggatcctacattactgtgagttgtatatttcactatatgttacaatgtaataataatagaaataaaatgtacataaatgtaaagcact

SEQ ID NO: 418248 - DNA, 2430 bp, Homo sapiens
aaatacggctaggtacgaggctgggggtttaattcggccgaggcttaacgactgtccatctctccccacagaggtgagcaacaagtgggcaaggaccatgacaggtgatatcccagcaccagcacaggtgccaggacaccggacgggggctccccctcagcagagtctcctcccttccaccaggccctaggaggcacctgctaatgaaatttgatcagtgccccaaccaccgccttggccagcctatgccgagcccttaccatggaccaggccctggggaagcatgtgacatcaaccaagaggtcacaggttttgcagagggggacacaggtcatttgcccacagcaccaaggaactaggtgatgaggcctggactccatcccgagcctgtggattccagagtgagctgctcagcctggacctgttgcctctcagccccagccctctgcaggccagaaaaaccacggagcacacccagaggtgctcagttgcttccacctgagaggcagggctgcacaggagcaagagtggaggccctgggtcaggcagatctagattcaaactcccgagaagggtggagggaagtgctccaagcagagcagagactgaaggcgggagagcctggtgcaccgcggacctgcagggggaaggcgtgagagctcggtgcactggggacctgcatggggaaggcgggagagctcggtgcactggggacctgcatggggaaggcgtgagagctcggtgcactggggacctgcatggggaaggcgggagagctcggtgcacctcggacctgcagagggaaggtgggagagcttggtgcaccgcagacctgcagggggaaggcgggagagcttggtgcactgcagacctgcggggggaaggtgggagagcttggtgcactgcagacctgcggggggttccatattggcagaacaagattgggtgggcatgccaagaggtgacagcagggagaagcgggggcagattcagggcctgctgctgcccatgggcagaggagagatggtcaggggtacccgacaggtctttggctgtggaggtggaatgaggggactcgaggcagggaagctgacaggcttgccaagaaaccagatgagtagggaactggtattgacccagagcctggggcaagcctggccctgtgagtggcagtaggggcctcaggtgagtgggaggttctgccgcccccctggtttccaccttacctgggcaggaagagtggccctgtgcagacatagacgttttggtagctgcgggtcaagctgcggctatatttctccaggttgttccaggcattctggttgaggtggggcacctggtaggagagatagggcttagcaggactgtggctgggacccttcctcctctatcagagggccgccccaggtcctgaggggatggacaggctcagagatatccagtgagacaagcggggggaaactgaggctcaaggaatgaaagtcactccctgaaacccagggctgatagagtgctagccaccaccctctgtccctcccacagcccaggtgtcaaagtcttttctcagctcccaagagtcgaatgaaggaagagcctgtctccacctttcagagaggactgaggcctgtccccagccccacccagggtctcctgggaagaccagcccttccaactaccaacccgttccttttcccagtctgagccacaggaagagcctagcggggaatgccatgaatcgacctccatcctgagctctccaggcctgggacaatggaaagtggatagggggctgtcttcccagaaggaagctgggtcagaggttggtgccccatgggctccacccagagccccatggcagtctccatccattggtgccaggacctgctgggaacaggctgagagggtggttggcccagtgcacagtgcctggcactaacaacctgatcgtgggccaggtgtctgcctcgaaactgcctgaaggcaggcagggtaggacaatgtctggaggctcacggttttatagactaggggtccccaacccctgggctacagaccggtaccagaaccgggccacacagcaggaggtgagcagcaggcgagcaagggaagcttcatctgtatttacagccacccccccattgatcccacagcagcctgagctccgcctcctgtcagatcagtggcggctggagattgtcataggagctggaaccctatggtgaactgcgcatgtgaggaggttgcgcgcttcttttgaaaacctaatgcctgatctgtcgttgttgcccatcacctccagataggactgtctagttgcaggaaaacaagctcagggctcccacggatcctacattactgtgagttgtatatttcactatatgttacaatgtaataataatagaaataaaatgtacataaatgtaaagcact

SEQ ID NO: 418249 - DNA, 1501 bp, Homo sapiens
cacgaggcgactgtccatctctccccacagaggtgacagcagggagaagcgggggcagattcagggcctgctgctgcccatgggcagaggagagatggtcaggggtacccgacaggtctttggctgtggaggtggaatgaggggactcgaggcagggaagctgacaggcttgccaagaaaccagatgagtagggaactggtattgacccagagcctggggcaagcctggccctgtgagtggcagtaggggcctcaggtgagtgggaggttctgccgcccccctggtttccaccttacctgggcaggaagagtggccctgtgcagacatagacgttttggtagctgcgggtcaagctgcggctatatttctccaggttgttccaggcattctggttgaggtggggcacctggtaggagagatagggcttagcaggactgtggctgggacccttcctcctctatcagagggccgccccaggtcctgaggggatggacaggctcagagatatccagtgagacaagcggggggaaactgaggctcaaggaatgaaagtcactccctgaaacccagggctgatagagtgctagccaccaccctctgtccctcccacagcccaggtgtcaaagtcttttctcagctcccaagagtcgaatgaaggaagagcctgtctccacctttcagagaggactgaggcctgtccccagccccacccagggtctcctgggaagaccagcccttccaactaccaacccgttccttttcccagtctgagccacaggaagagcctagcggggaatgccatgaatcgacctccatcctgagctctccaggcctgggacaatggaaagtggatagggggctgtcttcccagaaggaagctgggtcagaggttggtgccccatgggctccacccagagccccatggcagtctccatccattggtgccaggacctgctgggaacaggctgagagggtggttggcccagtgcacagtgcctggcactaacaacctgatcgtgggccaggtgtctgcctcgaaactgcctgaaggcaggcagggtaggacaatgtctggaggctcacggttttatagactaggggtccccaacccctgggctacagaccggtaccagaaccgggccacacagcaggaggtgagcagcaggcgagcaagggaagcttcatctgtatttacagccacccccccattgatcccacagcagcctgagctccgcctcctgtcagatcagtggcggctggagattgtcataggagctggaaccctatggtgaactgcgcatgtgaggaggttgcgcgcttcttttgaaaacctaatgcctgatctgtcgttgttgcccatcacctccagataggactgtctagttgcaggaaaacaagctcagggctcccacggatcctacattactgtgagttgtatatttcactatatgttacaatgtaataataatagaaataaaatgtacataaatgtaaagcact

SEQ ID NO: 418250 - DNA, 664 bp, Homo sapiens
agtctcattggcagaggcgggaccgacggtgtgtgcggaacatggcggagcgcggcaggaagcggccgtgcggcccgggtgaacacggccaaaggattgagtggcgaaaatggaagcaacagaagaaagaggagaaaaaaaaatggaaggatctcaagctgatgaaaaaactggagcggcagcgggcacaggaggaacaggcaaagcgcctggaagaggaggaggcagcggcagagaaggaggaccgcgggcggccctacacactgagcgtagccctgccgggctccatcctggacaatgctcagtcgccggagcttcgcacctacttggccggtcagattgccagagcctgtgccatcttctgtgtggatgagatcgtggtgtttgatgaggagggccaggatgccaagactgtggagggggaattcacaggagttgggaagaaggggcaggcgtgcgtacagctggcccggatcctgcagtacctggagtgtccacagtacctgaggaaggcgttcttccccaagcaccaggatctacagtttgcagtcctccttgaggctggaactctctccagggtggttaactctttccctctgttttccttatgcccaacactgggtcaggcagagtgggcgacaataaacgctgctaggagaatcga

SEQ ID NO: 418251 - DNA, 700 bp, Homo sapiens
ccgctccagggtccccactgcaccctgtgtgccctagcacttcccagactcttcccggctctgcctccacagggctcctgaaccccctggacagcccccaccacatgcgtcaggatgaggaatccgagttccgagagggcatcgtggtggatcggcccacccggccaggccacggctcctttgtcaactgtggcatgaaaaaggaggtgaagattgacaagaacctggagcccgggcttcgggtgactgtgcgactgaaccagcagcagcacccagactgcaagacctaccatggcaaagtggtatcatcgcaggaccctcgcaccaaagctggtctctactggggctacaccgtccgactggcttcctgcctcagtgctgtgtttgctgaggcccccttccaagatgggtatgacctgaccatcgggacgtcagagcgcggctcagatgtggcctctgcccagcttcccaacttcaggcatgctcttgtggtgttcgggggcctccagggtctggaagctggagcggatgctgaccccaacctggaggtggctgaacccagtgtcctctttgacctgtacgtcaatacctgtcctggccagggtagccgtaccatccgcacggagggaagccttcctaatctccctgggcggcctgcacccttggcctaacccaagccgggtgccccggaacacctgaa

SEQ ID NO: 418252 - DNA, 4202 bp, Homo sapiens
agtctcattggcagaggcgggaccgacggtgtgtgcggaacatggcggagcgcggcaggaagcggccgtgcggcccgggtgaacacggccaaaggattgagtggcgaaaatggaagcaacagaagaaagaggagaaaaaaaaatggaaggatctcaagctgatgaaaaaactggagcggcagcgggcacaggaggaacaggcaaagcgcctggaagaggaggaggcagcggcagagaaggaggaccgcgggcggccctacacactgagcgtagccctgccgggctccatcctggacaatgctcagtcgccggagcttcgcacctacttggccggtcagattgccagagcctgtgccatcttctgtgtggatgagatcgtggtgtttgatgaggagggccaggatgccaagactgtggagggggaattcacaggagttgggaagaaggggcaggcgtgcgtacagctggcccggatcctgcagtacctggagtgtccacagtacctgaggaaggcgttcttccccaagcaccaggatctacagtttgcagggctcctgaaccccctggacagcccccaccacatgcgtcaggatgaggaatccgagttccgagagggcatcgtggtggatcggcccacccggccaggccacggctcctttgtcaactgtggcatgaaaaaggaggtgaagattgacaagaacctggagcccgggcttcgggtgactgtgcgactgaaccagcagcagcacccagactgcaagacctaccatggcaaagtggtatcatcgcaggaccctcgcaccaaagctggtctctactggggctacaccgtccgactggcttcctgcctcagtgctgtgtttgctgaggcccccttccaagatgggtatgacctgaccatcgggacgtcagagcgcggctcagatgtggcctctgcccagcttcccaacttcaggcatgctcttgtggtgttcgggggcctccagggtctggaagctggagcggatgctgaccccaacctggaggtggctgaacccagtgtcctctttgacctgtacgtcaatacctgtcctggccagggtagccgtaccatccgcacggaggaagccatcctcatctccctggccgccctgcagcctggcctcatccaggcgggtgcccggcacacctgaaagttctaaggggccgaggacatcagtgaagcagcagtgaaaccaggggctctgcaggtcacttgggacggacgccaccagacttgtctccaaaaatcaccacctttaatactccccggcctgcacacacccacagtctcactgggctccaccctcacttactgcccgccgtgatggccttgaggctgcctgcccgcgccaggatgtttggcacaaagagcagccccgaagcccgctcaatgctctcgatgggcaccaggaagcgctccagtgggatggcctcatccacaggtgcgttgggcatcacgtaggtgcggagctcaatttgcccacctgctgcctccaggatcagcaccttgaagaagtgtgtgggcactgccacgtggttcttgccgatgacctggtactttacgtaggatttcccatcagcctctgtcctgtgggcagacccaggcacacgtgggcagggggcctggatgaacccaaagccacctcttccaggcagccttccctgatctgtcctctaacttctgtcaacctgcaggaccacgccctcactgtgagacttctgtagcctgcctggctcctccttgaggctggaactctctccagggtggttaactctttccctctgttttccttatgcccaacactgggtcaggcagagtgggcgacaataaacgctgctaggagaatcgagccttctgaatattcacattcgtctgaggggagacttaacgactgtccatctctccccacagaggtgagcaacaagtgggcaaggaccatgacaggtgatatcccagcaccagcacaggtgccaggacaccggacgggggctccccctcagcagagtctcctcccttccaccaggccctaggaggcacctgctaatgaaatttgatcagtgccccaaccaccgccttggccagcctatgccgagcccttaccatggaccaggccctggggaagcatgtgacatcaaccaagaggtcacaggttttgcagagggggacacaggtcatttgcccacagcaccaaggaactaggtgatgaggcctggactccatcccgagcctgtggattccagagtgagctgctcagcctggacctgttgcctctcagccccagccctctgcaggccagaaaaaccacggagcacacccagaggtgctcagttgcttccacctgagaggcagggctgcacaggagcaagagtggaggccctgggtcaggcagatctagattcaaactcccgagaagggtggagggaagtgctccaagcagagcagagactgaaggcgggagagcctggtgcaccgcggacctgcagggggaaggcgtgagagctcggtgcactggggacctgcatggggaaggcgggagagctcggtgcactggggacctgcatggggaaggcgtgagagctcggtgcactggggacctgcatggggaaggcgggagagctcggtgcacctcggacctgcagagggaaggtgggagagcttggtgcaccgcagacctgcagggggaaggcgggagagcttggtgcactgcagacctgcggggggaaggtgggagagcttggtgcactgcagacctgcggggggttccatattggcagaacaagattgggtgggcatgccaagaggtgacagcagggagaagcgggggcagattcagggcctgctgctgcccatgggcagaggagagatggtcaggggtacccgacaggtctttggctgtggaggtggaatgaggggactcgaggcagggaagctgacaggcttgccaagaaaccagatgagtagggaactggtattgacccagagcctggggcaagcctggccctgtgagtggcagtaggggcctcaggtgagtgggaggttctgccgcccccctggtttccaccttacctgggcaggaagagtggccctgtgcagacatagacgttttggtagctgcgggtcaagctgcggctatatttctccaggttgttccaggcattctggttgaggtggggcacctggtaggagagatagggcttagcaggactgtggctgggacccttcctcctctatcagagggccgccccaggtcctgaggggatggacaggctcagagatatccagtgagacaagcggggggaaactgaggctcaaggaatgaaagtcactccctgaaacccagggctgatagagtgctagccaccaccctctgtccctcccacagcccaggtgtcaaagtcttttctcagctcccaagagtcgaatgaaggaagagcctgtctccacctttcagagaggactgaggcctgtccccagccccacccagggtctcctgggaagaccagcccttccaactaccaacccgttccttttcccagtctgagccacaggaagagcctagcggggaatgccatgaatcgacctccatcctgagctctccaggcctgggacaatggaaagtggatagggggctgtcttcccagaaggaagctgggtcagaggttggtgccccatgggctccacccagagccccatggcagtctccatccattggtgccaggacctgctgggaacaggctgagagggtggttggcccagtgcacagtgcctggcactaacaacctgatcgtgggccaggtgtctgcctcgaaactgcctgaaggcaggcagggtaggacaatgtctggaggctcacggttttatagactaggggtccccaacccctgggctacagaccggtaccagaaccggctccgcctcctgtcagatcagtggcggctggagattgtcataggagctggaaccctatggtgaactgcgcatgtgaggaggttgcgcgcttcttttgaaaacctaatgcctgatctgtcgttgttgcccatcacctccagataggactgtctagttgcaggaaaacaagctcagggctcccacggatcctacattactgtgagttgtatatttcactatatgttacaatgtaataataatagaaataaaatgtacataaatgtaaagcact

SEQ ID NO: 418253 - DNA, 1177 bp, Homo sapiens
agtctcattggcagaggcgggaccgacggtgtgtgcggaacatggcggagcgcggcaggaagcggccgtgcggcccgggtgaacacggccaaaggattgagtggcgaaaatggaagcaacagaagaaagaggagaaaaaaaaatggaaggatctcaagctgatgaaaaaactggagcggcagcgggcacaggaggaacaggcaaagcgcctggaagaggaggaggcagcggcagagaaggaggaccgcgggcggccctacacactgagcgtagccctgccgggctccatcctggacaatgctcagtcgccggagcttcgcacctacttggccggtcagattgccagagcctgtgccatcttctgtgtggatgagatcgtggtgtttgatgaggagggccaggatgccaagactgtggagggggaattcacaggagttgggaagaaggggcaggcgtgcgtacagctggcccggatcctgcagtacctggagtgtccacagtacctgaggaaggcgttcttccccaagcaccaggatctacagtttgcagggctcctgaaccccctggacagcccccaccacatgcgtcaggatgaggaatccgagttccgagagggcatcgtggtggatcggcccacccggccaggccacggctcctttgtcaactgtggcatgaaaaaggaggtgaagattgacaagaacctggagcccgggcttcgggtgactgtgcgactgaaccagcagcagcacccagactgcaagacctaccatggcaaagtggtatcatcgcaggaccctcgcaccaaagctggtctctactggggctacaccgtccgactggcttcctgcctcagtgctgtgtttgctgaggcccccttccaagatgggtatgacctgaccatcgggacgtcagagcgcggctcagatgtggcctctgcccagcttcccaacttcaggcatgctcttgtggtgttcgggggcctccagggtctggaagctggagcggatgctgaccccaacctggaggtggctgaacccagtgtcctctttgacctgtacgtcaatacctgtcctggccagggtagccgtaccatccgcacggagggaagccttcctaatctccctgggcggcctgcacccttggcctaacccaagccgggtgccccggaacacctgaa

SEQ ID NO: 418254 - DNA, 3815 bp, Homo sapiens
ccgctccagggtccccactgcaccctgtgtgccctagcacttcccagactcttcccggctctgcctccacagggctcctgaaccccctggacagcccccaccacatgcgtcaggatgaggaatccgagttccgagagggcatcgtggtggatcggcccacccggccaggccacggctcctttgtcaactgtggcatgaaaaaggaggtgaagattgacaagaacctggagcccgggcttcgggtgactgtgcgactgaaccagcagcagcacccagactgcaagacctaccatggcaaagtggtatcatcgcaggaccctcgcaccaaagctggtctctactggggctacaccgtccgactggcttcctgcctcagtgctgtgtttgctgaggcccccttccaagatgggtatgacctgaccatcgggacgtcagagcgcggctcagatgtggcctctgcccagcttcccaacttcaggcatgctcttgtggtgttcgggggcctccagggtctggaagctggagcggatgctgaccccaacctggaggtggctgaacccagtgtcctctttgacctgtacgtcaatacctgtcctggccagggtagccgtaccatccgcacggaggaagccatcctcatctccctggccgccctgcagcctggcctcatccaggcgggtgcccggcacacctgaaagttctaaggggccgaggacatcagtgaagcagcagtgaaaccaggggctctgcaggtcacttgggacggacgccaccagacttgtctccaaaaatcaccacctttaatactccccggcctgcacacacccacagtctcactgggctccaccctcacttactgcccgccgtgatggccttgaggctgcctgcccgcgccaggatgtttggcacaaagagcagccccgaagcccgctcaatgctctcgatgggcaccaggaagcgctccagtgggatggcctcatccacaggtgcgttgggcatcacgtaggtgcggagctcaatttgcccacctgctgcctccaggatcagcaccttgaagaagtgtgtgggcactgccacgtggttcttgccgatgacctggtactttacgtaggatttcccatcagcctctgtcctgtgggcagacccaggcacacgtgggcagggggcctggatgaacccaaagccacctcttccaggcagccttccctgatctgtcctctaacttctgtcaacctgcaggaccacgccctcactgtgagacttctgtagcctgcctggctcctccttgaggctggaactctctccagggtggttaactctttccctctgttttccttatgcccaacactgggtcaggcagagtgggcgacaataaacgctgctaggagaatcgagccttctgaatattcacattcgtctgaggggagacttaacgactgtccatctctccccacagaggtgagcaacaagtgggcaaggaccatgacaggtgatatcccagcaccagcacaggtgccaggacaccggacgggggctccccctcagcagagtctcctcccttccaccaggccctaggaggcacctgctaatgaaatttgatcagtgccccaaccaccgccttggccagcctatgccgagcccttaccatggaccaggccctggggaagcatgtgacatcaaccaagaggtcacaggttttgcagagggggacacaggtcatttgcccacagcaccaaggaactaggtgatgaggcctggactccatcccgagcctgtggattccagagtgagctgctcagcctggacctgttgcctctcagccccagccctctgcaggccagaaaaaccacggagcacacccagaggtgctcagttgcttccacctgagaggcagggctgcacaggagcaagagtggaggccctgggtcaggcagatctagattcaaactcccgagaagggtggagggaagtgctccaagcagagcagagactgaaggcgggagagcctggtgcaccgcggacctgcagggggaaggcgtgagagctcggtgcactggggacctgcatggggaaggcgggagagctcggtgcactggggacctgcatggggaaggcgtgagagctcggtgcactggggacctgcatggggaaggcgggagagctcggtgcacctcggacctgcagagggaaggtgggagagcttggtgcaccgcagacctgcagggggaaggcgggagagcttggtgcactgcagacctgcggggggaaggtgggagagcttggtgcactgcagacctgcggggggttccatattggcagaacaagattgggtgggcatgccaagaggtgacagcagggagaagcgggggcagattcagggcctgctgctgcccatgggcagaggagagatggtcaggggtacccgacaggtctttggctgtggaggtggaatgaggggactcgaggcagggaagctgacaggcttgccaagaaaccagatgagtagggaactggtattgacccagagcctggggcaagcctggccctgtgagtggcagtaggggcctcaggtgagtgggaggttctgccgcccccctggtttccaccttacctgggcaggaagagtggccctgtgcagacatagacgttttggtagctgcgggtcaagctgcggctatatttctccaggttgttccaggcattctggttgaggtggggcacctggtaggagagatagggcttagcaggactgtggctgggacccttcctcctctatcagagggccgccccaggtcctgaggggatggacaggctcagagatatccagtgagacaagcggggggaaactgaggctcaaggaatgaaagtcactccctgaaacccagggctgatagagtgctagccaccaccctctgtccctcccacagcccaggtgtcaaagtcttttctcagctcccaagagtcgaatgaaggaagagcctgtctccacctttcagagaggactgaggcctgtccccagccccacccagggtctcctgggaagaccagcccttccaactaccaacccgttccttttcccagtctgagccacaggaagagcctagcggggaatgccatgaatcgacctccatcctgagctctccaggcctgggacaatggaaagtggatagggggctgtcttcccagaaggaagctgggtcagaggttggtgccccatgggctccacccagagccccatggcagtctccatccattggtgccaggacctgctgggaacaggctgagagggtggttggcccagtgcacagtgcctggcactaacaacctgatcgtgggccaggtgtctgcctcgaaactgcctgaaggcaggcagggtaggacaatgtctggaggctcacggttttatagactaggggtccccaacccctgggctacagaccggtaccagaaccgggccacacagcaggaggtgagcagcaggcgagcaagggaagcttcatctgtatttacagccacccccccattgatcccacagcagcctgagctccgcctcctgtcagatcagtggcggctggagattgtcataggagctggaaccctatggtgaactgcgcatgtgaggaggttgcgcgcttcttttgaaaacctaatgcctgatctgtcgttgttgcccatcacctccagataggactgtctagttgcaggaaaacaagctcagggctcccacggatcctacattactgtgagttgtatatttcactatatgttacaatgtaataataatagaaataaaatgtacataaatgtaaagcact

SEQ ID NO: 418255 - DNA, 3132 bp, Homo sapiens
ccgcgcccctcccctcacgggctctggccttaaccagagctcgcggactggcggggacaggtcccacctcctggctcccaggacgggtctgcaccaacctcagtttcggggctgcggctcacagaagtctaacctgcccgggacgcccgcaccaactcctgcgcgcggtccttccaaccctcctgctaccatgaagattgcagtgattggacagagcctgtttggccaggaagtttactgccacctgaggaaggagggccacgaagtggtgggtgtgttcactgttccagacaaggatggaaaggccgaccccctgggtctggaagctgagaaggatggagtgccggtattcaagtactcccggtggcgtgcaaaaggacaggctttgcctgatgtggtggcaaaataccaggctttgggggccgagctcaacgtcctgcccttctgcagccaattcatccccatggagataatcagtgccccccggcatggctccatcatctatcacccgtcactgctccctaggcaccgaggggcctcggccatcaactggaccctcattcacggagataagaaaggggggttttccatcttctgggcggatgatggtctggacaccggagacctgctgctgcagaaggagtgtgaggtgctcccggacgacaccgtgagcacgctgtacaaccgcttcctcttccctgaaggcatcaaagggatggtgcaggccgtgaggctgatcgctgagggcaaagcccccagactccctcagcctgaggaaggagccacctatgaggggattcagaagaaggagacagccaagatcaactgggaccagccggcagaggccattcacaactggatccgcgggaacgacaaggtgccgggagcctggacagaggcctgtgaacagaaactgacatttttcaactcaacgctgaacacttcaggcctggtgcccgagggagacgctttgcccatcccaggagcccatcggccaggggtggtcaccaaagcaggactcatcctctttgggaatgatgacaaaatgctgctggtgaagaatattcagctggaggatggcaaaatgatcctggcctcgaacttctttaagggggcagccagcagtgtccttgagctgacagaggcagagctggttactgcggaggctgtgcggagtgtttggcagcggatcctccccaaagtcctggaggttgaagactccactgatttcttcaagtcaggggccgcgtctgtggacgttgtgaggctggtggaggaagtgaaggagctgtgtgatggcctggagttagaaaatgaagatgtgtacatggcatccacctttggggacttcatccagctgttagtgaggaagctgcgaggggacgatgaggagggcgagtgcagcattgactacgtggaaatggcagtgaacaagcgcactgtccgcatgccccaccagctcttcattgggggggagttcgtggatgccgagggcgccaagacctctgagaccatcaatcccaccgatggaagtgtcatctgccaggtatccctggcccaagtcaccgacgtcgacaaggcagtggccgcagccaaggatgcctttgagaatggacggtgggggaagatcagtgcgcgggaccggggccggctgatgtacaggttggcagatctcatggagcagcaccaggaggagctggccaccattgaggccctggatgcgggtgccgtctacacgctggccctgaagacccacgtgggcatgtccatccagaccttccgatactttgctggctggtgtgacaagatccagggctccaccatccccatcaaccaggccagacccaaccgcaacctgaccttgaccaggaaggagcctgttggggtttgtggcatcatcatcccctggaactatcccctgatgatgctgtcctggaagacagctgcctgcctggctgccgggaacacagtggtgatcaagcctgctcaggtgaccccactcacagccttgaagtttgcagagctgacattaaaggccggcattcccaaaggtgtggttaacgtcctcccaggatctggctccctggtcggccagagactctcagaccatcctgatgtgaggaaaatcgggttcacaggctccacagaggtgggcaagcacatcatgaaaagctgtgccataagtaacgtgaagaaggtgtccctggaactgggcgggaagtcacccctcatcatctttgctgactgtgacctcaacaaggctgtgcagatggggatgagttctgttttcttcaacaaaggagagaattgcattgcagcaggccgactctttgtggaggactccattcatgatgagttcgtgcggagagtggtagaagaggtgcggaagatgaaggtgggcaacccgctggacagggacaccgaccacgggccgcagaatcaccatgcccaccttgtgaagctgatggagtactgccagcatggcgtgaaggaaggggccacactggtctgcggcgggaatcaggtccctcggccagggttcttctttgagccaactgttttcacagacgtggaagaccacatgttcatagccaaggaggagtccttcgggcctgtcatgatcatctctcggtttgctgatggggacttggatgccgtgctgtctcgggccaatgccacggaatttggcctggcttctggtgtcttcaccagggacatcaacaaggccctgtatgtcagtgacaagctccaggcaggcactgtgtttgtcaacacgtacaacaagaccgacgtggccgctcccttcggaggattcaaacagtctggatttggcaaagatctaggagaggcggctctgaacgagtacctgcgggtcaagacagtgaccttcgaatactgaagaaaggtctttgtgagaagaaagtccctgcccctccctcgtggctggggccccctccctcttgagcctgggtgcacagcacctcccacctggggggctagtggaagccctcctgcctgcacaccatgtctgcatcttggacgccctctgtccagtcagaagcagcccttggctgggtgaggtgtgcccctcccagggagaataaagcttctgaagagagaaaaaccacatct

SEQ ID NO: 418256 - DNA, 396 bp, Homo sapiens
gagggggacaccgaccacgggccgcaagcacatcatgaaaagctgtgccataagtaacgtgaagaaggtgtccctggaactgggcgggaagtcacccctcatcatctttgctgactgtgacctcaacaaggctgtgcagatgacagtgaccttcgaatactgaagaaaggtctttgtgagaagaaagtccctgcccctccctcgtggctggggccccctccctcttgagcctgggtgcacagcacctcccacctggggggctagtggaagccctcctgcctgcacaccatgtctgcatcttggacgccctctgtccagtcagaagcagcccttggctgggtgaggtgtgcccctcccagggagaataaagcttctgaagagagaaaaaccacatct

SEQ ID NO: 418257 - DNA, 549 bp, Homo sapiens
gagcattttgagggcctcagacccccagtgaacctgtgcagtcctggaggtgggctcctgcctccccagcaccagggggaccactctgattcccccctccctcccgcccacaggctccctggtcggccagagactctcagaccatcctgatgtgaggaaaatcgggttcacaggctccacagaggtgggcaagcacatcatgaaaagaggtgcgtggctgggggtggagcagaggaggggctgctgtgggctgcgcctgggacatggcagtgctgtcccaggagctgtgtcctgcttcccaggctccagggcacagccacttccgtggccctgctgggctctatgcaaacgctgaagaggcatctgcctttctggcaaagccccggggaggcctgggcggagacctgtggagccctgtcagaccagcaaggggctggatcgagaggtgctgagagtataaaacacgcatggatttcaagaactgagcacccacaaaactaaaaaacgaaatcatgctatgaacctcaaatatacacagtaaaatttatt

SEQ ID NO: 418258 - DNA, 3083 bp, Homo sapiens
ccgcgcccctcccctcacgggctctggccttaaccagagctcgcggactggcggggacaggtcccacctcctggctcccaggacgggtctgcaccaacctcagtttcggggctgcggctcacagaagtctaacctgcccgggacgcccgcaccaactcctgcgcgcggtccttccaaccctcctgctaccatgaagattgcagtgattggacagagcctgtttggccaggaagtttactgccacctgaggaaggagggccacgaagtggtgggtgtgttcactgttccagacaaggatggaaaggccgaccccctgggtctggaagctgagaaggatggagtgccggtattcaagtactcccggtggcgtgcaaaaggacaggctttgcctgatgtggtggcaaaataccaggctttgggggccgagctcaacgtcctgcccttctgcagccaattcatccccatggagataatcagtgccccccggcatggctccatcatctatcacccgtcactgctccctaggcaccgaggggcctcggccatcaactggaccctcattcacggagataagaaaggggggttttccatcttctgggcggatgatggtctggacaccggagacctgctgctgcagaaggagtgtgaggtgctcccggacgacaccgtgagcacgctgtacaaccgcttcctcttccctgaaggcatcaaagggatggtgcaggccgtgaggctgatcgctgagggcaaagcccccagactccctcagcctgaggaaggagccacctatgaggggattcagaagaaggagacagccaagatcaactgggaccagccggcagaggccattcacaactggatccgcgggaacgacaaggtgccgggagcctggacagaggcctgtgaacagaaactgacatttttcaactcaacgctgaacacttcaggcctggtgcccgagggagacgctttgcccatcccaggagcccatcggccaggggtggtcaccaaagcaggactcatcctctttgggaatgatgacaaaatgctgctggtgaagaatattcagctggaggatggcaaaatgatcctggcctcgaacttctttaagggggcagccagcagtgtccttgagctgacagaggcagagctggttactgcggaggctgtgcggagtgtttggcagcggatcctccccaaagtcctggaggttgaagactccactgatttcttcaagtcaggggccgcgtctgtggacgttgtgaggctggtggaggaagtgaaggagctgtgtgatggcctggagttagaaaatgaagatgtgtacatggcatccacctttggggacttcatccagctgttagtgaggaagctgcgaggggacgatgaggagggcgagtgcagcattgactacgtggaaatggcagtgaacaagcgcactgtccgcatgccccaccagctcttcattgggggggagttcgtggatgccgagggcgccaagacctctgagaccatcaatcccaccgatggaagtgtcatctgccaggtatccctggcccaagtcaccgacgtcgacaaggcagtggccgcagccaaggatgcctttgagaatggacggtgggggaagatcagtgcgcgggaccggggccggctgatgtacaggttggcagatctcatggagcagcaccaggaggagctggccaccattgaggccctggatgcgggtgccgtctacacgctggccctgaagacccacgtgggcatgtccatccagaccttccgatactttgctggctggtgtgacaagatccagggctccaccatccccatcaaccaggccagacccaaccgcaacctgaccttgaccaggaaggagcctgttggggtttgtggcatcatcatcccctggaactatcccctgatgatgctgtcctggaagacagctgcctgcctggctgccgggaacacagtggtgatcaagcctgctcaggtgaccccactcacagccttgaagtttgcagagctgacattaaaggccggcattcccaaaggtgtggttaacgtcctcccaggatctggctccctggtcggccagagactctcagaccatcctgatgtgaggaaaatcgggttcacaggctccacagaggtgggcaagcacatcatgaaaagtcacccctcatcatctttgctgactgtgacctcaacaaggctgtgcagatggggatgagttctgttttcttcaacaaaggagagaattgcattgcagcaggccgactctttgtggaggactccattcatgatgagttcgtgcggagagtggtagaagaggtgcggaagatgaaggtgggcaacccgctggacagggacaccgaccacgggccgcagaatcaccatgcccaccttgtgaagctgatggagtactgccagcatggcgtgaaggaaggggccacactggtctgcggcgggaatcaggtccctcggccagggttcttctttgagccaactgttttcacagacgtggaagaccacatgttcatagccaaggaggagtccttcgggcctgtcatgatcatctctcggtttgctgatggggacttggatgccgtgctgtctcgggccaatgccacggaatttggcctggcttctggtgtcttcaccagggacatcaacaaggccctgtatgtcagtgacaagctccaggcaggcactgtgtttgtcaacacgtacaacaagaccgacgtggccgctcccttcggaggattcaaacagtctggatttggcaaagatctaggagaggcggctctgaacgagtacctgcgggtcaagacagtgaccttcgaatactgaagaaaggtctttgtgagaagaaagtccctgcccctccctcgtggctggggccccctccctcttgagcctgggtgcacagcacctcccacctggggggctagtggaagccctcctgcctgcacaccatgtctgcatcttggacgccctctgtccagtcagaagcagcccttggctgggtgaggtgtgcccctcccagggagaataaagcttctgaagagagaaaaaccacatct

SEQ ID NO: 418259 - DNA, 2602 bp, Homo sapiens
gccgtgacctgtggtcacatggcctgagcggcagggcggctcagtcacctgggcagctggtactgctgagaggcagggtggcaggctatgggccggagcccacagctgcaggaggggcccggggatcatatgtgagggctgcttgcccctgcccgaggacaggctggcagggacggccacaggcagaggtgcaggccgtgaggctgatcgctgagggcaaagcccccagactccctcagcctgaggaaggagccacctatgaggggattcagaagaaggagacagccaagatcaactgggaccagccggcagaggccattcacaactggatccgcgggaacgacaaggtgccgggagcctggacagaggcctgtgaacagaaactgacatttttcaactcaacgctgaacacttcaggcctggtgcccgagggagacgctttgcccatcccaggagcccatcggccaggggtggtcaccaaagcaggactcatcctctttgggaatgatgacaaaatgctgctggtgaagaatattcagctggaggatggcaaaatgatcctggcctcgaacttctttaagggggcagccagcagtgtccttgagctgacagaggcagagctggttactgcggaggctgtgcggagtgtttggcagcggatcctccccaaagtcctggaggttgaagactccactgatttcttcaagtcaggggccgcgtctgtggacgttgtgaggctggtggaggaagtgaaggagctgtgtgatggcctggagttagaaaatgaagatgtgtacatggcatccacctttggggacttcatccagctgttagtgaggaagctgcgaggggacgatgaggagggcgagtgcagcattgactacgtggaaatggcagtgaacaagcgcactgtccgcatgccccaccagctcttcattgggggggagttcgtggatgccgagggcgccaagacctctgagaccatcaatcccaccgatggaagtgtcatctgccaggtatccctggcccaagtcaccgacgtcgacaaggcagtggccgcagccaaggatgcctttgagaatggacggtgggggaagatcagtgcgcgggaccggggccggctgatgtacaggttggcagatctcatggagcagcaccaggaggagctggccaccattgaggccctggatgcgggtgccgtctacacgctggccctgaagacccacgtgggcatgtccatccagaccttccgatactttgctggctggtgtgacaagatccagggctccaccatccccatcaaccaggccagacccaaccgcaacctgaccttgaccaggaaggagcctgttggggtttgtggcatcatcatcccctggaactatcccctgatgatgctgtcctggaagacagctgcctgcctggctgccgggaacacagtggtgatcaagcctgctcaggtgaccccactcacagccttgaagtttgcagagctgacattaaaggccggcattcccaaaggtgtggttaacgtcctcccaggatctggctccctggtcggccagagactctcagaccatcctgatgtgaggaaaatcgggttcacaggctccacagaggtgggcaagcacatcatgaaaagctgtgccataagtaacgtgaagaaggtgtccctggaactgggcgggaagtcacccctcatcatctttgctgactgtgacctcaacaaggctgtgcagatggggatgagttctgttttcttcaacaaaggagagaattgcattgcagcaggccgactctttgtggaggactccattcatgatgagttcgtgcggagagtggtagaagaggtgcggaagatgaaggtgggcaacccgctggacagggacaccgaccacgggccgcagaatcaccatgcccaccttgtgaagctgatggagtactgccagcatggcgtgaaggaaggggccacactggtctgcggcgggaatcaggtccctcggccagggttcttctttgagccaactgttttcacagacgtggaagaccacatgttcatagccaaggaggagtccttcgggcctgtcatgatcatctctcggtttgctgatggggacttggatgccgtgctgtctcgggccaatgccacggaatttggcctggcttctggtgtcttcaccagggacatcaacaaggccctgtatgtcagtgacaagctccaggcaggcactgtgtttgtcaacacgtacaacaagaccgacgtggccgctcccttcggaggattcaaacagtctggatttggcaaagatctaggagaggcggctctgaacgagtacctgcgggtcaagacagtgaccttcgaatactgaagaaaggtctttgtgagaagaaagtccctgcccctccctcgtggctggggccccctccctcttgagcctgggtgcacagcacctcccacctggggggctagtggaagccctcctgcctgcacaccatgtctgcatcttggacgccctctgtccagtcagaagcagcccttggctgggtgaggtgtgcccctcccagggagaataaagcttctgaagagagaaaaaccacatct

SEQ ID NO: 418260 - DNA, 2897 bp, Homo sapiens
ccgcgcccctcccctcacgggctctggccttaaccagagctcgcggactggcggggacaggtcccacctcctggctcccaggacgggtctgcaccaacctcagtttcggggctgcggctcacagaagtctaacctgcccgggacgcccgcaccaactcctgcgcgcggtccttccaaccctcctgctaccatgaagattgcagtgattggacagagcctgtttggccaggaagtttactgccacctgaggaaggagggccacgaagtggtgggtgtgttcactgttccagacaaggatggaaaggccgaccccctgggaccctcattcacggagataagaaaggggggttttccatcttctgggcggatgatggtctggacaccggagacctgctgctgcagaaggagtgtgaggtgctcccggacgacaccgtgagcacgctgtacaaccgcttcctcttccctgaaggcatcaaagggatggtgcaggccgtgaggctgatcgctgagggcaaagcccccagactccctcagcctgaggaaggagccacctatgaggggattcagaagaaggagacagccaagatcaactgggaccagccggcagaggccattcacaactggatccgcgggaacgacaaggtgccgggagcctggacagaggcctgtgaacagaaactgacatttttcaactcaacgctgaacacttcaggcctggtgcccgagggagacgctttgcccatcccaggagcccatcggccaggggtggtcaccaaagcaggactcatcctctttgggaatgatgacaaaatgctgctggtgaagaatattcagctggaggatggcaaaatgatcctggcctcgaacttctttaagggggcagccagcagtgtccttgagctgacagaggcagagctggttactgcggaggctgtgcggagtgtttggcagcggatcctccccaaagtcctggaggttgaagactccactgatttcttcaagtcaggggccgcgtctgtggacgttgtgaggctggtggaggaagtgaaggagctgtgtgatggcctggagttagaaaatgaagatgtgtacatggcatccacctttggggacttcatccagctgttagtgaggaagctgcgaggggacgatgaggagggcgagtgcagcattgactacgtggaaatggcagtgaacaagcgcactgtccgcatgccccaccagctcttcattgggggggagttcgtggatgccgagggcgccaagacctctgagaccatcaatcccaccgatggaagtgtcatctgccaggtatccctggcccaagtcaccgacgtcgacaaggcagtggccgcagccaaggatgcctttgagaatggacggtgggggaagatcagtgcgcgggaccggggccggctgatgtacaggttggcagatctcatggagcagcaccaggaggagctggccaccattgaggccctggatgcgggtgccgtctacacgctggccctgaagacccacgtgggcatgtccatccagaccttccgatactttgctggctggtgtgacaagatccagggctccaccatccccatcaaccaggccagacccaaccgcaacctgaccttgaccaggaaggagcctgttggggtttgtggcatcatcatcccctggaactatcccctgatgatgctgtcctggaagacagctgcctgcctggctgccgggaacacagtggtgatcaagcctgctcaggtgaccccactcacagccttgaagtttgcagagctgacattaaaggccggcattcccaaaggtgtggttaacgtcctcccaggatctggctccctggtcggccagagactctcagaccatcctgatgtgaggaaaatcgggttcacaggctccacagaggtgggcaagcacatcatgaaaagctgtgccataagtaacgtgaagaaggtgtccctggaactgggcgggaagtcacccctcatcatctttgctgactgtgacctcaacaaggctgtgcagatggggatgagttctgttttcttcaacaaaggagagaattgcattgcagcaggccgactctttgtggaggactccattcatgatgagttcgtgcggagagtggtagaagaggtgcggaagatgaaggtgggcaacccgctggacagggacaccgaccacgggccgcagaatcaccatgcccaccttgtgaagctgatggagtactgccagcatggcgtgaaggaaggggccacactggtctgcggcgggaatcaggtccctcggccagggttcttctttgagccaactgttttcacagacgtggaagaccacatgttcatagccaaggaggagtccttcgggcctgtcatgatcatctctcggtttgctgatggggacttggatgccgtgctgtctcgggccaatgccacggaatttggcctggcttctggtgtcttcaccagggacatcaacaaggccctgtatgtcagtgacaagctccaggcaggcactgtgtttgtcaacacgtacaacaagaccgacgtggccgctcccttcggaggattcaaacagtctggatttggcaaagatctaggagaggcggctctgaacgagtacctgcgggtcaagacagtgaccttcgaatactgaagaaaggtctttgtgagaagaaagtccctgcccctccctcgtggctggggccccctccctcttgagcctgggtgcacagcacctcccacctggggggctagtggaagccctcctgcctgcacaccatgtctgcatcttggacgccctctgtccagtcagaagcagcccttggctgggtgaggtgtgcccctcccagggagaataaagcttctgaagagagaaaaaccacatct

SEQ ID NO: 418261 - DNA, 2991 bp, Homo sapiens
taattgctgccttattccttctccaggtccttccaaccctcctgctaccatgaagattgcagtgattggacagagcctgtttggccaggaagtttactgccacctgaggaaggagggccacgaagtggtgggtgtgttcactgttccagacaaggatggaaaggccgaccccctgggtctggaagctgagaaggatggagtgccggtattcaagtactcccggtggcgtgcaaaaggacaggctttgcctgatgtggtggcaaaataccaggctttgggggccgagctcaacgtcctgcccttctgcagccaattcatccccatggagataatcagtgccccccggcatggctccatcatctatcacccgtcactgctccctaggcaccgaggggcctcggccatcaactggaccctcattcacggagataagaaaggggggttttccatcttctgggcggatgatggtctggacaccggagacctgctgctgcagaaggagtgtgaggtgctcccggacgacaccgtgagcacgctgtacaaccgcttcctcttccctgaaggcatcaaagggatggtgcaggccgtgaggctgatcgctgagggcaaagcccccagactccctcagcctgaggaaggagccacctatgaggggattcagaagaaggagacagccaagatcaactgggaccagccggcagaggccattcacaactggatccgcgggaacgacaaggtgccgggagcctggacagaggcctgtgaacagaaactgacatttttcaactcaacgctgaacacttcaggcctggtgcccgagggagacgctttgcccatcccaggagcccatcggccaggggtggtcaccaaagcaggactcatcctctttgggaatgatgacaaaatgctgctggtgaagaatattcagctggaggatggcaaaatgatcctggcctcgaacttctttaagggggcagccagcagtgtccttgagctgacagaggcagagctggttactgcggaggctgtgcggagtgtttggcagcggatcctccccaaagtcctggaggttgaagactccactgatttcttcaagtcaggggccgcgtctgtggacgttgtgaggctggtggaggaagtgaaggagctgtgtgatggcctggagttagaaaatgaagatgtgtacatggcatccacctttggggacttcatccagctgttagtgaggaagctgcgaggggacgatgaggagggcgagtgcagcattgactacgtggaaatggcagtgaacaagcgcactgtccgcatgccccaccagctcttcattgggggggagttcgtggatgccgagggcgccaagacctctgagaccatcaatcccaccgatggaagtgtcatctgccaggtatccctggcccaagtcaccgacgtcgacaaggcagtggccgcagccaaggatgcctttgagaatggacggtgggggaagatcagtgcgcgggaccggggccggctgatgtacaggttggcagatctcatggagcagcaccaggaggagctggccaccattgaggccctggatgcgggtgccgtctacacgctggccctgaagacccacgtgggcatgtccatccagaccttccgatactttgctggctggtgtgacaagatccagggctccaccatccccatcaaccaggccagacccaaccgcaacctgaccttgaccaggaaggagcctgttggggtttgtggcatcatcatcccctggaactatcccctgatgatgctgtcctggaagacagctgcctgcctggctgccgggaacacagtggtgatcaagcctgctcaggtgaccccactcacagccttgaagtttgcagagctgacattaaaggccggcattcccaaaggtgtggttaacgtcctcccaggatctggctccctggtcggccagagactctcagaccatcctgatgtgaggaaaatcgggttcacaggctccacagaggtgggcaagcacatcatgaaaagctgtgccataagtaacgtgaagaaggtgtccctggaactgggcgggaagtcacccctcatcatctttgctgactgtgacctcaacaaggctgtgcagatggggatgagttctgttttcttcaacaaaggagagaattgcattgcagcaggccgactctttgtggaggactccattcatgatgagttcgtgcggagagtggtagaagaggtgcggaagatgaaggtgggcaacccgctggacagggacaccgaccacgggccgcagaatcaccatgcccaccttgtgaagctgatggagtactgccagcatggcgtgaaggaaggggccacactggtctgcggcgggaatcaggtccctcggccagggttcttctttgagccaactgttttcacagacgtggaagaccacatgttcatagccaaggaggagtccttcgggcctgtcatgatcatctctcggtttgctgatggggacttggatgccgtgctgtctcgggccaatgccacggaatttggcctggcttctggtgtcttcaccagggacatcaacaaggccctgtatgtcagtgacaagctccaggcaggcactgtgtttgtcaacacgtacaacaagaccgacgtggccgctcccttcggaggattcaaacagtctggatttggcaaagatctaggagaggcggctctgaacgagtacctgcgggtcaagacagtgaccttcgaatactgaagaaaggtctttgtgagaagaaagtccctgcccctccctcgtggctggggccccctccctcttgagcctgggtgcacagcacctcccacctggggggctagtggaagccctcctgcctgcacaccatgtctgcatcttggacgccctctgtccagtcagaagcagcccttggctgggtgaggtgtgcccctcccagggagaataaagcttctgaagagagaaaaaccacatct

SEQ ID NO: 418262 - DNA, 1272 bp, Homo sapiens
cacgcgtcgcggacgcgtccgccaggtttgtggcatcatcatcccctggaactatcccctgatgatgctgtcctggaagacagctgcctgcctggctgccgggaacacagtggtgatcaagcctgctcaggtgaccccactcacagccttgaagtttgcagagctgacattaaaggccggcattcccaaaggtgtggttaacgtcctcccaggatctggctccctggtcggccagagactctcagaccatcctgatgtgaggaaaatcgggttcacaggctccacagaggtgggcaagcacatcatgaaaagctgtgccataagtaacgtgaagaaggtgtccctggaactgggcgggaagtcacccctcatcatctttgctgactgtgacctcaacaaggctgtgcagatggggatgagttctgttttcttcaacaaaggagagaattgcattgcagcaggccgactctttgtggaggactccattcatgatgagttcgtgcggagagtggtagaagaggtgcggaagatgaaggtgggcaacccgctggacagggacaccgaccacgggccgcagaatcaccatgcccaccttgtgaagctgatggagtactgccagcatggcgtgaaggaaggggccacactggtctgcggcgggaatcaggtccctcggccagggttcttctttgagccaactgttttcacagacgtggaagaccacatgttcatagccaaggaggagtccttcgggcctgtcatgatcatctctcggtttgctgatggggacttggatgccgtgctgtctcgggccaatgccacggaatttggcctggcttctggtgtcttcaccagggacatcaacaaggccctgtatgtcagtgacaagctccaggcaggcactgtgtttgtcaacacgtacaacaagaccgacgtggccgctcccttcggaggattcaaacagtctggatttggcaaagatctaggagaggcggctctgaacgagtacctgcgggtcaagacagtgaccttcgaatactgaagaaaggtctttgtgagaagaaagtccctgcccctccctcgtggctggggccccctccctcttgagcctgggtgcacagcacctcccacctggggggctagtggaagccctcctgcctgcacaccatgtctgcatcttggacgccctctgtccagtcagaagcagcccttggctgggtgaggtgtgcccctcccagggagaataaagcttctgaagagagaaaaaccacatct

SEQ ID NO: 418263 - DNA, 3377 bp, Homo sapiens
ccgcgcccctcccctcacgggctctggccttaaccagagctcgcggactggcggggacaggtcccacctcctggctcccaggacgggtctgcaccaacctcagtttcggggctgcggctcacagaagtctaacctgcccgggacgcccgcaccaactcctgcgcgcggtccttccaaccctcctgctaccatgaagattgcagtgattggacagagcctgtttggccaggaagtttactgccacctgaggaaggagggccacgaagtggtgggtgtgttcactgttccagacaaggatggaaaggccgaccccctgggtctggaagctgagaaggatggagtgccggtattcaagtactcccggtggcgtgcaaaaggacaggctttgcctgatgtggtggcaaaataccaggctttgggggccgagctcaacgtcctgcccttctgcagccaattcatccccatggagataatcagtgccccccggcatggctccatcatctatcacccgtcactgctccctaggcaccgaggggcctcggccatcaactggaccctcattcacggagataagaaaggggggttttccatcttctgggcggatgatggtctggacaccggagacctgctgctgcagaaggagtgtgaggtgctcccggacgacaccgtgagcacgctgtacaaccgcttcctcttccctgaaggcatcaaagggatggtgcaggccgtgaggctgatcgctgagggcaaagcccccagactccctcagcctgaggaaggagccacctatgaggggattcagaagaaggagacagccaagatcaactgggaccagccggcagaggccattcacaactggatccgcgggaacgacaaggtgccgggagcctggacagaggcctgtgaacagaaactgacatttttcaactcaacgctgaacacttcaggcctggtgcccgagggagacgctttgcccatcccaggagcccatcggccaggggtggtcaccaaagcaggactcatcctctttgggaatgatgacaaaatggtaagggcacggctgtgggtcacttgcctgctcaaagccacccatgctcctgtccttggactcaggcctcacaggaagaccctaggctcctctggagaaaatggaaaaaaccagacccaggaaggaacactgaccctgatttgtccctgaccacccggctggtcctgagcacagggtgtccgaggcagtttacccacttctctgttctgggaaagctgggctccctacccttcctggctaggcacccatctccaggctgagtgccctgtgtgggtgtcaggcaacctagaatcagagagaagccctcccagggagcctgggttcagggcctctctttggtctatcagaaacacctctgggtgtggggtcattaagcctctgtgcctcagctcccatctctttgaacggcgatgccatggtaacttagcacgtgcagagccttgggagccatgccggccacctgctcttgttattagcagactacaactcacggtaccagcaaacactgatggagcaccttttataccagaacaatgtatatgcgttaaatttaatctgcctaacaacactatgagatatgtataaatattatatccttatagaggaaaaaaacagagatttaaataacttgtccaggatcatccaagctagcccgtggcagagctgggattcagactctgaaattctggctccaaagccgtgatgctggtcttggccatggtagcttcctgttcatatgcactctactactccttctcacatgagcagccgggggtagggagagggcaggcagggatcttcccacacactgacagggtccggacaaaccccatgggcgtggtacccccagccgtgttgctgtgtccggcctaccagagtgaggcgtggcagtatggggcctggcctttgctcgctcttggtgtccagtctgccatgctcccctgtcagaaggtctaggctgctgttgatgtctgcaatgtagtgttttgggtatccaagattgatatatgcagttgcaagagaatatctgtctgtggtcaggttccctagaagcagcatctaaggtaaaaattcttgtgcaagtgatttattgagggaatgttccagaaaatcatgcgaggcagtaagggcagaggaaagcaaagcaaaagtaaaggttcaggagaagtctagcctggggctgctcccagggtgggttttggagtattaactgcaccctccaattatacctgcctgtccccacctctgtcagcctttggtttcagtggcccctggggtggggtggaggacccaccaggcataatccctcggcctctttgtgtacaggagctcttatccatccacagcaagcaaggatgggacagtgcaggccgttatcatccagcccttgctgcagctggaggacagggcaccagccacaggggtctgagcagggcacccacagcatctgtccagagacctgcaaagacaggaatgcaaagaaggcaattaagtgtcttaagaggaagctggggttatcagctctctcacaagagctttgtccactgtccagaggtggtcagggtgggaggggagtgaggagagaccagctgagcacacacaccctgctccccacagatcaacccagaagaccctgggttgaagcatctctcagccacgccctgtggagtctggctgggctttagcttgcagaaagctccagaacatctttgaaaggcaatggggcgagggtcaggccgagaggcaagttccagttctggcagagcatgcatacagagtaccattcttacacagccactcttaacgcacagtgacatgcacccacccatgagcttatccataactctttttgtacatgtgttttttttcctggcccctaacaaaagcatttgttgaaaaactattgataaacaagcaggccccaaacaattcaaacatcttattaaatacagtaaatctgaggcagacactagagtagcccagagtcatgagctacaatgggggcagttcatgtctggcagccagaatccccttgaactgatggctggacgcaggctctacctgggaccagcttgaagtgctatcctgaagctgcagactgcagggccggccagaccctttttcagcctctcctcttcccacctctgtatcccacacaggcatctggtgatgttctccaggtgtttctgtggcagttctgggagctactgggtgattgcaagattagtttttttttctaagttgactttctatgtggtgcctgaatgacgttttctttttttgttcagtaggaatccttttttatagaagtaataaagtcattacactt

SEQ ID NO: 418264 - DNA, 1434 bp, Homo sapiens
ccgcgcccctcccctcacgggctctggccttaaccagagctcgcggactggcggggacaggtcccacctcctggctcccaggacgggtctgcaccaacctcagtttcggggctgcggctcacagaagtctaacctgcccgggacgcccgcaccaactcctgcgcgcggtccttccaaccctcctgctaccatgaagattgcagtgattggacagagcctgtttggccaggaagtttactgccacctgaggaaggagggccacgaagtggtgggtgtgttcactgttccagacaaggatggaaaggccgaccccctgggtctggaagctgagaaggatggagtgccggtattcaagtactcccggtggcgtgcaaaaggacaggctttgcctgatgtggtggcaaaataccaggctttgggggccgagctcaacgtcctgcccttctgcagccaattcatccccatggagataatcagtgccccccggcatggctccatcatctatcacccgtcactgctccctaggcaccgaggggcctcggccatcaactggaccctcattcacggagataagaaaggggggttttccatcttctgggcggatgatggtctggacaccggagacctgctgctgcagaaggagtgtgaggtgctcccggacgacaccgtgagcacgctgtacaaccgcttcctcttccctgaaggcatcaaagggatggtgcaggccgtgaggctgatcgctgagggcaaagcccccagactccctcagcctgaggaaggagccacctatgaggggattcagaagaaggagacagccaagatcaactgggaccagccggcagaggccattcacaactggatccgcgggaacgacaaggtgccgggagcctggacagaggcctgtgaacagaaactgacatttttcaactcaacgctgaacacttcaggcctggtgcccgagggagacgctttgcccatcccaggagcccatcggccaggggtggtcaccaaagcaggactcatcctctttgggaatgatgacaaaatgctgctggtgaagaatattcagctggaggatggcaaaatgatcctggcctcgaacttctttaagggggcagccagcagtgtccttgagctgacagaggcagagctggttactgcggaggctgtgcggagtgtttggcagcggatcctccccaaagtcctggaggttgaagactccactgatttcttcaagtcaggggccgcgtctgtggacgttgtgaggctggtggaggaagtgaaggagctgtgtgatggcctggagttagaaaatgaagatgtgtacatggcatccacctttggggacttcatccatcagaagcagcccttggctgggtgaggtgtgcccctcccagggagaataaagcttctgaagagagaaaaaccacatct

SEQ ID NO: 418265 - DNA, 991 bp, Homo sapiens
ccgcgcccctcccctcacgggctctggccttaaccagagctcgcggactggcggggacaggtcccacctcctggctcccaggacgggtctgcaccaacctcagtttcggggctgcggctcacagaagtctaacctgcccgggacgcccgcaccaactcctgcgcgcggtccttccaaccctcctgctaccatgaagattgcagtgattggacagagcctgtttggccaggaagtttactgccacctgaggaaggagggccacgaagtggtgggtgtgttcactgttccagacaaggatggaaaggccgaccccctgggtctggaagctgagaaggatggagtgccggtattcaagtactcccggtggcgtgcaaaaggacaggctttgcctgatgtggtggcaaaataccaggctttgggggccgagctcaacgtcctgcccttctgcagccaattcatccccatggagataatcagtgccccccggcatggctccatcatctatcacccgtcactgctccctaggcaccgaggggcctcggccatcaactggaccctcattcacggagataagaaaggggggttttccatcttctgggcggatgatggtctggacaccggagacctgctgctgcagaaggagtgtgaggtgctcccggacgacaccgtgagcacgctgtacaaccgcttcctcttccctgaaggcatcaaagggatggtgcaggccgtgaggctgatcgctgagggcaaagcccccagactccctcagcctgaggaaggagccacctatgaggggattcagaagaaggagacagccaagatcaactgggaccagccggcagaggccattcacaactggatccgcgggaacgacaaggtgccgggagcctggacagaggcctgtgaacaggtgtgtccctgcatggctggaatccagccacgtgcattggtgtatcccactggccattaaactgtcacacatgtttgaact

SEQ ID NO: 418266 - DNA, 436 bp, Homo sapiens
cgtgagtacccgggtgcaagatatcagtctttcctctgtatctaatccccgaatgtcttcgactgagcaggagtggccaatgaggcgctggagatgtggccgctcccttcggaggattcaaacagtctggatttggcaaagatctaggagaggcggctctgaacgagtacctgcgggtcaagacagtgaccttcgaatactgaagaaaggtctttgtgagaagaaagtccctgcccctccctcgtggctggggccccctccctcttgagcctgggtgcacagcacctcccacctggggggctagtggaagccctcctgcctgcacaccatgtctgcatcttggacgccctctgtccagtcagaagcagcccttggctgggtgaggtgtgcccctcccagggagaataaagcttctgaagagagaaaaaccacatct

SEQ ID NO: 418267 - DNA, 690 bp, Homo sapiens
agggctgcttgcccctgcccgaggacaggctggcagggacggccacaggcagaggtgctgtccaggcatgcagcaggagggaaggaggccctggggagcccttgctgtttgggcgcagcaggaagagcagctgcagtgtccactgtcccctcgtcctcctcagctcctggccactgccttttatttttcggttgtgttaaacttgtcttccccacagattgaccagctcacaaaaatagtgaacaaagtagagttgctggagatttagtggtacagagagggagcttacctgtgcttcccacggcaagcaactcaaatactccttgaagctgcactgtccaacaaggcagccactggtaacatgcagctattaaatcaattaaaatgaattatactgaaaaattcagttcctcagtctcagccacattctaagtcccctggccaccgtgttggaccgtgcagacttggaactcatccatcaccacagagggctccattgggcagccctgcctcagatgctctgacacccggtcacttcccattcttggcacctcccggtctcttccctcaggctcttgctcacgtgggcccagactccttggctctccttctccctctctgattcctttcccaccaccttcctctttcctgtcacagagaaacaacttcctgcttcatctcagacctcca

SEQ ID NO: 418268 - DNA, 938 bp, Homo sapiens
  misc_feature (72)..(72): n is a, c, g, or t
  misc_feature (81)..(81): n is a, c, g, or t
agcggactttctggagacccgccctcgccaacatggcggcgcccagttggggcgggttcgttcgcttcgcgntttggccanggcgggggtctgggctttaggcaggtagtatttagtttcacaatgtttggggacctgtttgaagaggagtattccactgtgtctaataatcagtatggaaaagggaagaaattaaagactaaagctttggagccacctgctcctagagaattcaccaatttaagcggaatcagaaatcagggtggaacctgttacctcaattcccttcttcagactcttcatttcacacctgaattcagagaagctctattttctcttggcccagaagagcttggtttgtttgaagataaggataaacccgatgcaaaggttcgaatcatccctttacagttacagcgcttgtttgctcagcttctgctcttagaccaggaagctgcatccacagcagacctcactgacagctttgggtggaccagtaatgaggaaatgaggcaacatgatgtgcaggaactgaatcgaatcctcttcagcgctttggaaacttctttagttgggacctccggtcatgacctcatctatcgtctgtaccatggaaccattgttaaccagattgtttgtaaagaatgtaagaacgttagcgagaggcaggtaaatatgccagagtattttagtaataagttatgttgtaaattataatccatgtaattaaatgtatgatatataccacacaaggattaaagtgtttattactaaaagtaatttattgagtttttttttcttctaactacacctaaatcatgagcctataatccagatttctccatgtagattgaaagaagcaaatatcttgaaacttaatcttttattcagtaccctaatatttggaaaatagatttgggggatatttacaaatagaa

SEQ ID NO: 418269 - DNA, 885 bp, Homo sapiens
  misc_feature (72)..(72): n is a, c, g, or t
  misc_feature (81)..(81): n is a, c, g, or t
agcggactttctggagacccgccctcgccaacatggcggcgcccagttggggcgggttcgttcgcttcgcgntttggccanggcgggggtctgggctttaggcaggtagtatttagtttcacaatgtttggggacctgtttgaagaggagtattccactgtgtctaataatcagtatggaaaagggaagaaattaaagactaaagctttggagccacctgctcctagagaattcaccaatttaagcggaatcagaaatcagggtggaacctgttacctcaattcccttcttcagactcttcatttcacacctgaattcagagaagctctattttctcttggcccagaagagcttggtttgtttgaagataaggataaacccgatgcaaaggttcgaatcatccctttacagttacagcgcttgtttgctcagcttctgctcttagaccaggaagctgcatccacagcagacctcactgacagctttgggtggaccagtaatgaggaaatgaggcaacatgatgtgcaggaactgaatcgaatcctcttcagcgctttggaaacttctttagttgggacctccggtcatgacctcatctatcgtctgtagtcgcccaggtcctgaagaagcttgctgtcttcgatacgtggagctccttggcggtccacattgcaatggacaacactgttgtgatggaggaatcagaaggttgtgcaggacagcgtaccctgtgcaggcgccactgcgtatcctgcagattccagaccgggcacttgcaacggattccctgccggagctgaggtcaccaaacaggacgtccgccaatggagacccatggtacttctcatcccctgcgactggggctcacggaaatcaacgaggctc

SEQ ID NO: 418270 - DNA, 1164 bp, Homo sapiens
ctgtcgcccaggctggagtgcagtggcgtgatcatggctcaactacagcctcaacctcctgggctcaagtgatcctcccacctcagcctcctgtgtagctgggacctcaggcatgtgccacgacaccaggctaattttttgttttgacgaggtctccctatgttgcccagtctggtcgcgaactcctagcctcaagcaatccttccaccttggcctcccaaagtgctgggttactggcgtgagccactgtgcctggccaaggctgcttttaatcggttctgattaccaccccaaagtgactggcatgagaatcttaaccccgtctgaacagagggaaatttctttggcagtttggccatcttcccagagccagacctacatgtttagtaagaaatgactcaagtatctaaataatcaccgcagcaaggattctcattttttccccttttccaaaagtttgggtgttcttataagtactcagaaaacaattctttgcttaagaaaaaagcttaaaattgggggaaaaaaaattcaagaaaattaaatgttatgtcactcaatattatcttgtttcacttattatcagggaatataaactaggacggagaattgagatctgcttagagccccttcagaaaggcgaaaacttggggtaagaaattctcctgtgcatctgaagtgacacacacgtatcttaacctcgtttgccttttgaagctttaacaacttcatagtgtagcattttttttcactgcttctaagtagcctagcaacttgaaacagagtgtgtgctagaaatatgtttgtatgtctgggcatctaaaacttgggacttattctcccataaaaacagtaagggagaattaatttttcagtaatcaccaggtgcatattgaccccatgatggccctgaagtgtcagcaagaggcccacccgcagctgttgtcagtgtgttcggacagtctgccatccaacggattcatcattgctcccgtcgctctgcccccttattctactttcttcatcctagtatcacctgacatatctgtacttactgatttatttgttagtatctgtctcccactactagaatataagtacttggtttattcattgctatatccttaatacctagaatagtaattgtgcccatgtcatagtcaa

SEQ ID NO: 418271 - DNA, 810 bp, Homo sapiens
tacagcccccagagtcaagggcataactgcctacctcgagcccgctctcctcctgccagctgccgggctatcaagccaggcctctctcaccctgtccctctctgccacatcgtacctgctcaggccgccacctctttccttttctcccgcactgaggaagttccctaccacgtctgggggggctctgctgtgtaccgagaatgggatcttcacttccgctcttcattccaagattaaaggaaattgaaatgcggaataagagtttgccactagcatccagcatttagggaaaaatctctccttataaaaaccagaaaagctggaggagaagctttgcccattatgcctcaagttaccacgtggttttgtttgtttgtttggatctggcgcttgacggttttctggtacagcccccaggacgtgctgctgaggacacaggtgcgaaccaccacgaccgggtagtttttgtactttgtagtagagatgaggtttcaccacgttggccaggatggtatcaaacctgcggacctcaagtgatccacccggctcggcctaccaaagtacagcgcatgagccaattcgcccagtgataaatgcttgttttaagcttctggctttgggctggtgtgataggcagctcactgggcagtgctgacgggtacaatcagatgaaccctgaggcccctggaagcttcgagtgtctatgagggacctttaccagcctttcagccaaattggtagacccacttctctggactcggatgctgcattgattgagcaaaggatactgactcccctgggaagtttcca

SEQ ID NO: 418272 - DNA, 5716 bp, Homo sapiens
  misc_feature (72)..(72): n is a, c, g, or t
  misc_feature (81)..(81): n is a, c, g, or t
agcggactttctggagacccgccctcgccaacatggcggcgcccagttggggcgggttcgttcgcttcgcgntttggccanggcgggggtctgggctttaggcaggtagtatttagtttcacaatgtttggggacctgtttgaagaggagtattccactgtgtctaataatcagtatggaaaagggaagaaattaaagactaaagctttggagccacctgctcctagagaattcaccaatttaagcggaatcagaaatcagggtggaacctgttacctcaattcccttcttcagactcttcatttcacacctgaattcagagaagctctattttctcttggcccagaagagcttggtttgtttgaagataaggataaacccgatgcaaaggttcgaatcatccctttacagttacagcgcttgtttgctcagcttctgctcttagaccaggaagctgcatccacagcagacctcactgacagctttgggtggaccagtaatgaggaaatgaggcaacatgatgtgcaggaactgaatcgaatcctcttcagcgctttggaaacttctttagttgggacctccggtcatgacctcatctatcgtctgtaccatggaaccattgttaaccagattgtttgtaaagaatgtaagaacgttagcgagaggcaggaagacttcttagatctaacagtagcagtcaaaaatgtatccggtttggaagatgctctctggaacatgtatgtagaagaggaagtttttgattgtgacaacttgtaccactgtggaacttgtgacaggctggttaaagcagcaaagtcggccaaattacgtaagctgcctccttttcttactgtttcattactaagatttaattttgattttgtgaaatgcgaacgctacaaggaaactagctgttatacattccctctccggattaatctcaagcccttttgtgaacagagtgaattggatgacttagaatatatatatgacctcttctcagttattatacacaaaggtggctgctacggaggccattaccatgtatatattaaagatgttgatcatttgggaaactggcagtttcaagaggaaaaaagtaaaccagatgtgaatctgaaagatctccagagtgaagaagagattgatcatccactgatgattctaaaagcaatcttattagaggaggagaataatctaattcctgttgatcagctgggccagaaacttttgaaaaagataggaatatcttggaacaagaagtacagaaaacagcatggaccattgcggaagttcttacaggctccattctcagatatttctactcagttcagatgaaagtacagttcgtctcttgaagaatagttctctccaggctgagtctgatttccaaaggaatgaccagcaaattttcaagatgcttcctccagaatccccaggtttaaacaatagcatctcctgtccccactggtttgatataaatgattctaaagtccagccaatcagggaaaaggatattgaacagcaatttcagggtaaagaaagtgcctacatgttgttttatcggaaatcccagttgcagagaccccctgaagctcgagctaatccaagatatggggttccatgtcatttactgaatgaaatggatgcagctaacattgaactgcaaaccaaaagggcagaatgtgattctgcaaacaatacttttgaattgcatcttcacctgggccctcagtatcatttcttcaatggggctctgcacccagtagtctctcaaacagaaagcgtgtgggatttgacctttgataaaagaaaaactttaggagatctccggcagtcaatatttcagctgttagaattttgggaaggagacatggttcttagtgttgcaaagcttgtaccagcaggacttcacatttaccagtcacttggcggggatgaactgacactgtgtgaaactgaaattgctgatggggaagacatctttgtgtggaatggggtggaggttggtggagtccacattcaaactggtattgactgcgaacctctacttttaaatgttcttcatctagacacaagcagtgatggagaaaagtgttgtcaggtgatagaatctccacatgtctttccagctaatgcagaagtgggcactgtcctcacagccttagcaatcccagcaggtgtcatcttcatcaacagtgctggatgtccaggtggggagggttggacggccatccccaaggaagacatgaggaagacgttcagggagcaagggctcagaaatggaagctcaattttaattcaggattctcatgatgataacagcttgttgaccaaggaagagaaatgggtcactagtatgaatgagattgactggctccacgttaaaaatttatgccagttagaatctgaagagaagcaagttaaaatatcagcaactgttaacacaatggtgtttgatattcgaattaaagccataaaggaattaaaattaatgaaggaactagctgacaacagctgtttgagacctattgatagaaatgggaagcttctttgtccagtgccggacagctatactttgaaggaagcagaattgaagatgggaagttcattgggactgtgtcttggaaaagcaccaagttcgtctcagttgttcctgttttttgcaatggggagtgacgttcaacctgggacagaaatggaaatcgtagtagaagaaacaatatctgtgagagattgtttaaagttaatgctgaagaaatctggcctacaaggagatgcctggcatttacgaaaaatggattggtgctatgaagctggagagcctttatgtgaagaagatgcaacactgaaagaacttctgatatgttctggagatactttgcttttaattgaaggacaacttcctcctctgggtttcctgaaggtgcccatctggtggtaccagcttcagggtccctcaggacactgggagagtcatcaggaccagaccaactgtacttcgtcttggggcagagtttggagagccacttccagccaaggtgcttctgggaacgagcctgcgcaagtttctctcctctacttgggagacatagagatctcagaagatgccacgctggcggagctgaagtctcaggccatgaccttgcctcctttcctggagttcggtgtcccgtccccagcccacctcagagcctggacggtggagaggaagcgcccaggcaggcttttacgaactgaccggcagccactcagggaatataaactaggacggagaattgagatctgcttagagccccttcagaaaggcgaaaacttgggcccccaggacgtgctgctgaggacacaggtgcgcatccctggtgagaggacctatgcccctgccctggacctggtgtggaacgcggcccagggtgggactgccggctccctgaggcagagagttgccgatttctatcgtcttcccgtggagaagattgaaattgccaaatactttcccgaaaagttcgagtggcttccgatatctagctggaaccaacaaataaccaagaggaaaaagaaaaaaaaacaagattatttgcaaggggcaccgtattacttgaaagacggagatactattggtgttaagaatctcctgattgacgacgatgatgatttcagtacaatcagagatgacactggaaaagaaaagcagaaacaacgggccctggggagaaggaaaagccaagaagccctccatgagcagagcagctacatcctctccagtgcagagacgcctgcccggccccgagccccggaaacttctctctccatccacgtggggagcttcagataaccgcgccgctgcacggctctactcccgatgaactctccggctgatgccacaaacgtgggtttcctgggcatggggactggctgcctggcgcctccaatcccaaatcctctgcttcctttgagcacagggacggctcctctgaggcctggccagtgcatgtagtcacttagctctgcaacacgtggcagccacgggggctggtgcagctctggatgtcgcccacccagctgccagtaggtgctgggctctctcacacagcacccggccccagctgcctttttttttcttttaaccagaaaatgcacaacgtgtgcgtgaaccgcaggtatggaggcagcggcatgccgttgctccgctgtgggaggtgtgtggggtcaggccagccactttcctccgtgttcagatgactctcgttcgccctgaccggcttctcacagtgtctcaggccactgcgccaccgcgctggtgctgagcagaagcgggcagaagtggggtctgctttcaggacttcatttcccccactcgttccggccccgcatgctccacgtctgccctttggtctgagttaaaactgcgatgctgaaaagtgcgagctctttccacgaggaggagccacacagggtggcctccgagggtgagtcgctctgctaagcaagggcagccgctgcacgtcagcccgcaggccaagggtccagcttatcctgggtgctctgtgatcagaaggtccttggatcccgaggactgcagctgctgccgtccacagcgcctcagcctctcttcctgtgtggaagcggggcaggcagggctgtggcagacaggcctggcatagcccaggttccaggtgtcctgggcagcctgaccggtttcctgagtagcctcaatgaaaacacctgagaaaaagaaaatgtaaactaaggaagggttttcccacttaatccaacccagatttctattcaacttaaaggatttaattggcatttgtgagaaataatagtacctgtgtcactgagttgattgatttgggacatagacggttgactttcccagacagcagcttagcggaaagcagcatcccgaagacggtgtcgcatgtcctgagcctgcttgtcacctgggcctcacggtttctcgtcagccccgtcactgatgggaagcagcactgaagtgtgagggcagaaaggacaccgctggagtcaggcgctcccctgcctgtgacccttttccaacaagctgatgctgagccagcggcctgctttgtccctcatactcctcccaacagtccaaacccctaccagacagaagccacgtcgcttctgcacacgtgtctgagagcgtctgccatagacgtctgtgcgtttccgtgaagcactgcgccctaaggacccaactctgactagcagctgcctcccactcccaaacactaaccccgctcaggagactcgcactgggtgtagactgcgtctttgcagagggagatgatagaggcttctgatgacgccagagctgtaagtgtcgtgacgagctgggcgcccagcccttcttaagctgttctgtttctgtggctttaactgacatatttctgtagcatctgccttcatctcatctcagcgtaatgaaatattaatgaaatcgctgaaaagctttgccttcgagaggccagaagcctcgcggaatgtctgcaagtccaaagacgcgtgtgggttgtgccctgaagtgccgtccagcaggcgcgtgcggccgggccggcctgtgcgtgtggcctttgccttcttccctttcttcctgttttctgtttttttaatttggggattgagaaagctgtacgattttgttaaagaaaaaaataaaccattttttaaagttgtaaaaaaaaaaagcttt

SEQ ID NO: 418273 - DNA, 5662 bp, Homo sapiens
  misc_feature (72)..(72): n is a, c, g, or t
  misc_feature (81)..(81): n is a, c, g, or t
agcggactttctggagacccgccctcgccaacatggcggcgcccagttggggcgggttcgttcgcttcgcgntttggccanggcgggggtctgggctttaggcaggtagtatttagtttcacaatgtttggggacctgtttgaagaggagtattccactgtgtctaataatcagtatggaaaagggaagaaattaaagactaaagctttggagccacctgctcctagagaattcaccaatttaagcggaatcagaaatcagggtggaacctgttacctcaattcccttcttcagactcttcatttcacacctgaattcagagaagctctattttctcttggcccagaagagcttggtttgtttgaagataaggataaacccgatgcaaaggttcgaatcatccctttacagttacagcgcttgtttgctcagcttctgctcttagaccaggaagctgcatccacagcagacctcactgacagctttgggtggaccagtaatgaggaaatgaggcaacatgatgtgcaggaactgaatcgaatcctcttcagcgctttggaaacttctttagttgggacctccggtcatgacctcatctatcgtctgtaccatggaaccattgttaaccagattgtttgtaaagaatgtaagaacgttagcgagaggcaggaagacttcttagatctaacagtagcagtcaaaaatgtatccggtttggaagatgctctctggaacatgtatgtagaagaggaagtttttgattgtgacaacttgtaccactgtggaacttgtgacaggctggttaaagcagcaaagtcggccaaattacgtaagctgcctccttttcttactgtttcattactaagatttaattttgattttgtgaaatgcgaacgctacaaggaaactagctgttatacattccctctccggattaatctcaagcccttttgtgaacagagtgaattggatgacttagaatatatatatgacctcttctcagttattatacacaaaggtggctgctacggaggccattaccatgtatatattaaagatgttgatcatttgggaaactggcagtttcaagaggaaaaaagtaaaccagatgtgaatctgaaagatctccagagtgaagaagagattgatcatccactgatgattctaaaagcaatcttattagaggaggagaataatctaattcctgttgatcagctgggccagaaacttttgaaaaagataggaatatcttggaacaagaagtacagaaaacagcatggaccattgcggaagttcttacaggctccattctcagatatttctactcagttcagatgaaagtacagttcgtctcttgaagaatagttctctccaggctgagtctgatttccaaaggaatgaccagcaaattttcaagatgcttcctccagaatccccaggtttaaacaatagcatctcctgtccccactggtttgatataaatgattctaaagtccagccaatcagggaaaaggatattgaacagcaatttcagggtaaagaaagtgcctacatgttgttttatcggaaatcccagttgcagagaccccctgaagctcgagctaatccaagatatggggttccatgtcatttactgaatgaaatggatgcagctaacattgaactgcaaaccaaaagggcagaatgtgattctgcaaacaatacttttgaattgcatcttcacctgggccctcagtatcatttcttcaatggggctctgcacccagtagtctctcaaacagaaagcgtgtgggatttgacctttgataaaagaaaaactttaggagatctccggcagtcaatatttcagctgttagaattttgggaaggagacatggttcttagtgttgcaaagcttgtaccagcaggacttcacatttaccagtcacttggcggggatgaactgacactgtgtgaaactgaaattgctgatggggaagacatctttgtgtggaatggggtggaggttggtggagtccacattcaaactggtattgactgcgaacctctacttttaaatgttcttcatctagacacaagcagtgatggagaaaagtgttgtcaggtgatagaatctccacatgtctttccagctaatgcagaagtgggcactgtcctcacagccttagcaatcccagcaggtgtcatcttcatcaacagtgctggatgtccaggtggggagggttggacggccatccccaaggaagacatgaggaagacgttcagggagcaagggctcagaaatggaagctcaattttaattcaggattctcatgatgataacagcttgttgaccaaggaagagaaatgggtcactagtatgaatgagattgactggctccacgttaaaaatttatgccagttagaatctgaagagaagcaagttaaaatatcagcaactgttaacacaatggtgtttgatattcgaattaaagccataaaggaattaaaattaatgaaggaactagctgacaacagctgtttgagacctattgatagaaatgggaagcttctttgtccagtgccggacagctatactttgaaggaagcagaattgaagatgggaagttcattgggactgtgtcttggaaaagcaccaagttcgtctcagttgttcctgttttttgcaatggggagtgacgttcaacctgggacagaaatggaaatcgtagtagaagaaacaatatctgtgagagattgtttaaagttaatgctgaagaaatctggcctacaaggagatgcctggcatttacgaaaaatggattggtgctatgaagctggagagcctttatgtgaagaagatgcaacactgaaagaacttctgatatgttctggagatactttgcttttaattgaaggacaacttcctcctctgggtttcctgaaggtgcccatctggtggtaccagcttcagggtccctcaggacactgggagagtcatcaggaccagaccaactgtacttcgtcttggggcagagtttggagagccacttccagccaaggtgcttctgggaacgagcctgcgcaagtttctctcctctacttgggagacatagagatctcagaagatgccacgctggcggagctgaagtctcaggccatgaccttgcctcctttcctggagttcggtgtcccgtccccagcccacctcagagcctggacggtggagaggaagcgcccaggcaggcttttacgaactgaccggcagccactcagggaatataaactaggacggagaattgagatctgcttagagccccttcagaaaggcgaaaacttgggcccccaggacgtgctgctgaggacacaggtgcgcatccctggtgagaggacctatgcccctgccctggacctggtgtggaacgcggcccagggtgggactgccggctccctgaggcagagagttgccgatttctatcgtcttcccgtggagaagattgaaattgccaaatactttcccgaaaagttcgagtggcttccgatatctagctggaaccaacaaataaccaagaggaaaaagaaaaaaaaacaagattatttgcaaggggcaccgtattacttgaaagacggagatactattggtgttaagaatctcctgattgacgacgatgatgatttcagtacaatcagagatgacactggaaaagaaaagcagaaacaacgggccctggggagaaggaaaagccaagaagccctccatgagcagagcagctacatcctctccagtgcagagacgcctgcccggccccgagccccggaaacttctctctccatccacgtggggagcttcagataaccgcgccgctgcacggctctactcccgatgaactctccggctgatgccacaaacgtgggtttcctgggcatggggactggctgcctggcgcctccaatcccaaatcctctgcttcctttgagcacagggacggctcctctgaggcctggccagtgcatgtagtcacttagctctgcaacacgtggcagccacgggggctggtgcagctctggatgtcgcccacccagctgccagtaggtgctgggctctctcacacagcacccggccccagctgcctttttttttcttttaaccagaaaatgcacaacgtgtgcgtgaaccgcaggtatggaggcagcggcatgccgttgctccgctgtgggaggtgtgtggggtcaggccagccactttcctccgtgttcagatgactctcgttcgccctgaccggcttctcacagtgtctcaggccactgcgccaccgcgctggtgctgagcagaagcgggcagaagtggggtctgctttcaggacttcatttcccccactcgttccggccccgcatgctccacgtctgccctttggtctgagttaaaactgcgatgctgaaaagtgcgagctctttccacgaggaggagccacacagggtggcctccgagggtgagtcgctctgctaagcaagggcagccgctgcacgtcagcccgcaggccaagggtccagcttatcctgggtgctctgtgatcagaaggtccttggatcccgaggactgcagctgctgccgtccacagcgcctcagcctctcttcctgtgtggaagcggggcaggcagggctgtggcagacaggcctggcatagcccaggttccaggtgtcctgggcagcctgaccggtttcctgagtagcctcaatgaaaacacctgagaaaaagaaattaaaggatttaattggcatttgtgagaaataatagtacctgtgtcactgagttgattgatttgggacatagacggttgactttcccagacagcagcttagcggaaagcagcatcccgaagacggtgtcgcatgtcctgagcctgcttgtcacctgggcctcacggtttctcgtcagccccgtcactgatgggaagcagcactgaagtgtgagggcagaaaggacaccgctggagtcaggcgctcccctgcctgtgacccttttccaacaagctgatgctgagccagcggcctgctttgtccctcatactcctcccaacagtccaaacccctaccagacagaagccacgtcgcttctgcacacgtgtctgagagcgtctgccatagacgtctgtgcgtttccgtgaagcactgcgccctaaggacccaactctgactagcagctgcctcccactcccaaacactaaccccgctcaggagactcgcactgggtgtagactgcgtctttgcagagggagatgatagaggcttctgatgacgccagagctgtaagtgtcgtgacgagctgggcgcccagcccttcttaagctgttctgtttctgtggctttaactgacatatttctgtagcatctgccttcatctcatctcagcgtaatgaaatattaatgaaatcgctgaaaagctttgccttcgagaggccagaagcctcgcggaatgtctgcaagtccaaagacgcgtgtgggttgtgccctgaagtgccgtccagcaggcgcgtgcggccgggccggcctgtgcgtgtggcctttgccttcttccctttcttcctgttttctgtttttttaatttggggattgagaaagctgtacgattttgttaaagaaaaaaataaaccattttttaaagttgtaaaaaaaaaaagcttt

SEQ ID NO: 418274 - DNA, 5433 bp, Homo sapiens
  misc_feature (72)..(72): n is a, c, g, or t
  misc_feature (81)..(81): n is a, c, g, or t
agcggactttctggagacccgccctcgccaacatggcggcgcccagttggggcgggttcgttcgcttcgcgntttggccanggcgggggtctgggctttaggcaggtagtatttagtttcacaatgtttggggacctgtttgaagaggagtattccactgtgtctaataatcagtatggaaaagggaagaaattaaagactaaagctttggagccacctgctcctagagaattcaccaatttaagcggaatcagaaatcagggtggaacctgttacctcaattcccttcttcagactcttcatttcacacctgaattcagagaagctctattttctcttggcccagaagagcttggtttgtttgaagataaggataaacccgatgcaaaggttcgaatcatccctttacagttacagcgcttgtttgctcagcttctgctcttagaccaggaagctgcatccacagcagacctcactgacagctttgggtggaccagtaatgaggaaatgaggcaacatgatgtgcaggaactgaatcgaatcctcttcagcgctttggaaacttctttagttgggacctccggtcatgacctcatctatcgtctgtaccatggaaccattgttaaccagattgtttgtaaagaatgtaagaacgttagcgagaggcaggaagacttcttagatctaacagtagcagtcaaaaatgtatccggtttggaagatgctctctggaacatgtatgtagaagaggaagtttttgattgtgacaacttgtaccactgtggaacttgtgacaggctggttaaagcagcaaagtcggccaaattacgtaagctgcctccttttcttactgtttcattactaagatttaattttgattttgtgaaatgcgaacgctacaaggaaactagctgttatacattccctctccggattaatctcaagcccttttgtgaacagagtgaattggatgacttagaatatatatatgacctcttctcagttattatacacaaaggtggctgctacggaggccattaccatgtatatattaaagatgttgatcatttgggaaactggcagtttcaagaggaaaaaagtaaaccagatgtgaatctgaaagatctccagagtgaagaagagattgatcatccactgatgattctaaaagcaatcttattagaggaggagaataatctaattcctgttgatcagctgggccagaaacttttgaaaaagataggaatatcttggaacaagaagtacagaaaacagcatggaccattgcggaagttcttacaggctccattctcagatatttctactcagttcagatgaaagtacagttcgtctcttgaagaatagttctctccaggctgagtctgatttccaaaggaatgaccagcaaattttcaagatgcttcctccagaatccccaggtttaaacaatagcatctcctgtccccactggtttgatataaatgattctaaagtccagccaatcagggaaaaggatattgaacagcaatttcagggtaaagaaagtgcctacatgttgttttatcggaaatcccagttgcagagaccccctgaagctcgagctaatccaagatatggggttccatgtcatttactgaatgaaatggatgcagctaacattgaactgcaaaccaaaagggcagaatgtgattctgcaaacaatacttttgaattgcatcttcacctgggccctcagtatcatttcttcaatggggctctgcacccagtagtctctcaaacagaaagcgtgtgggatttgacctttgataaaagaaaaactttaggagatctccggcagtcaatatttcagctgttagaattttgggaaggagacatggttcttagtgttgcaaagcttgtaccagcaggacttcacatttaccagtcacttggcgggagggttggacggccatccccaaggaagacatgaggaagacgttcagggagcaagggctcagaaatggaagctcaattttaattcaggattctcatgatgataacagcttgttgaccaaggaagagaaatgggtcactagtatgaatgagattgactggctccacgttaaaaatttatgccagttagaatctgaagagaagcaagttaaaatatcagcaactgttaacacaatggtgtttgatattcgaattaaagccataaaggaattaaaattaatgaaggaactagctgacaacagctgtttgagacctattgatagaaatgggaagcttctttgtccagtgccggacagctatactttgaaggaagcagaattgaagatgggaagttcattgggactgtgtcttggaaaagcaccaagttcgtctcagttgttcctgttttttgcaatggggagtgacgttcaacctgggacagaaatggaaatcgtagtagaagaaacaatatctgtgagagattgtttaaagttaatgctgaagaaatctggcctacaaggagatgcctggcatttacgaaaaatggattggtgctatgaagctggagagcctttatgtgaagaagatgcaacactgaaagaacttctgatatgttctggagatactttgcttttaattgaaggacaacttcctcctctgggtttcctgaaggtgcccatctggtggtaccagcttcagggtccctcaggacactgggagagtcatcaggaccagaccaactgtacttcgtcttggggcagagtttggagagccacttccagccaaggtgcttctgggaacgagcctgcgcaagtttctctcctctacttgggagacatagagatctcagaagatgccacgctggcggagctgaagtctcaggccatgaccttgcctcctttcctggagttcggtgtcccgtccccagcccacctcagagcctggacggtggagaggaagcgcccaggcaggcttttacgaactgaccggcagccactcagggaatataaactaggacggagaattgagatctgcttagagccccttcagaaaggcgaaaacttgggcccccaggacgtgctgctgaggacacaggtgcgcatccctggtgagaggacctatgcccctgccctggacctggtgtggaacgcggcccagggtgggactgccggctccctgaggcagagagttgccgatttctatcgtcttcccgtggagaagattgaaattgccaaatactttcccgaaaagttcgagtggcttccgatatctagctggaaccaacaaataaccaagaggaaaaagaaaaaaaaacaagattatttgcaaggggcaccgtattacttgaaagacggagatactattggtgttaagaatctcctgattgacgacgatgatgatttcagtacaatcagagatgacactggaaaagaaaagcagaaacaacgggccctggggagaaggaaaagccaagaagccctccatgagcagagcagctacatcctctccagtgcagagacgcctgcccggccccgagccccggaaacttctctctccatccacgtggggagcttcagataaccgcgccgctgcacggctctactcccgatgaactctccggctgatgccacaaacgtgggtttcctgggcatggggactggctgcctggcgcctccaatcccaaatcctctgcttcctttgagcacagggacggctcctctgaggcctggccagtgcatgtagtcacttagctctgcaacacgtggcagccacgggggctggtgcagctctggatgtcgcccacccagctgccagtaggtgctgggctctctcacacagcacccggccccagctgcctttttttttcttttaaccagaaaatgcacaacgtgtgcgtgaaccgcaggtatggaggcagcggcatgccgttgctccgctgtgggaggtgtgtggggtcaggccagccactttcctccgtgttcagatgactctcgttcgccctgaccggcttctcacagtgtctcaggccactgcgccaccgcgctggtgctgagcagaagcgggcagaagtggggtctgctttcaggacttcatttcccccactcgttccggccccgcatgctccacgtctgccctttggtctgagttaaaactgcgatgctgaaaagtgcgagctctttccacgaggaggagccacacagggtggcctccgagggtgagtcgctctgctaagcaagggcagccgctgcacgtcagcccgcaggccaagggtccagcttatcctgggtgctctgtgatcagaaggtccttggatcccgaggactgcagctgctgccgtccacagcgcctcagcctctcttcctgtgtggaagcggggcaggcagggctgtggcagacaggcctggcatagcccaggttccaggtgtcctgggcagcctgaccggtttcctgagtagcctcaatgaaaacacctgagaaaaagaaaatgtaaactaaggaagggttttcccacttaatccaacccagatttctattcaacttaaaggatttaattggcatttgtgagaaataatagtacctgtgtcactgagttgattgatttgggacatagacggttgactttcccagacagcagcttagcggaaagcagcatcccgaagacggtgtcgcatgtcctgagcctgcttgtcacctgggcctcacggtttctcgtcagccccgtcactgatgggaagcagcactgaagtgtgagggcagaaaggacaccgctggagtcaggcgctcccctgcctgtgacccttttccaacaagctgatgctgagccagcggcctgctttgtccctcatactcctcccaacagtccaaacccctaccagacagaagccacgtcgcttctgcacacgtgtctgagagcgtctgccatagacgtctgtgcgtttccgtgaagcactgcgccctaaggacccaactctgactagcagctgcctcccactcccaaacactaaccccgctcaggagactcgcactgggtgtagactgcgtctttgcagagggagatgatagaggcttctgatgacgccagagctgtaagtgtcgtgacgagctgggcgcccagcccttcttaagctgttctgtttctgtggctttaactgacatatttctgtagcatctgccttcatctcatctcagcgtaatgaaatattaatgaaatcgctgaaaagctttgccttcgagaggccagaagcctcgcggaatgtctgcaagtccaaagacgcgtgtgggttgtgccctgaagtgccgtccagcaggcgcgtgcggccgggccggcctgtgcgtgtggcctttgccttcttccctttcttcctgttttctgtttttttaatttggggattgagaaagctgtacgattttgttaaagaaaaaaataaaccattttttaaagttgtaaaaaaaaaaagcttt

SEQ ID NO: 418275 - DNA, 3179 bp, Homo sapiens
tcatattatcaaaatttttttaagtgccggacagctatactttgaaggaagcagaattgaagatgggaagttcattgggactgtgtcttggaaaagcaccaagttcgtctcagttgttcctgttttttgcaatggggagtgacgttcaacctgggacagaaatggaaatcgtagtagaagaaacaatatctgtgagagattgtttaaagttaatgctgaagaaatctggcctacaaggagatgcctggcatttacgaaaaatggattggtgctatgaagctggagagcctttatgtgaagaagatgcaacactgaaagaacttctgatatgttctggagatactttgcttttaattgaaggacaacttcctcctctgggtttcctgaaggtgcccatctggtggtaccagcttcagggtccctcaggacactgggagagtcatcaggaccagaccaactgtacttcgtcttggggcagagtttggagagccacttccagccaaggtgcttctgggaacgagcctgcgcaagtttctctcctctacttgggagacatagagatctcagaagatgccacgctggcggagctgaagtctcaggccatgaccttgcctcctttcctggagttcggtgtcccgtccccagcccacctcagagcctggacggtggagaggaagcgcccaggcaggcttttacgaactgaccggcagccactcagggaatataaactaggacggagaattgagatctgcttagagccccttcagaaaggcgaaaacttgggcccccaggacgtgctgctgaggacacaggtgcgcatccctggtgagaggacctatgcccctgccctggacctggtgtggaacgcggcccagggtgggactgccggctccctgaggcagagagttgccgatttctatcgtcttcccgtggagaagattgaaattgccaaatactttcccgaaaagttcgagtggcttccgatatctagctggaaccaacaaataaccaagaggaaaaagaaaaaaaaacaagattatttgcaaggggcaccgtattacttgaaagacggagatactattggtgttaagaatctcctgattgacgacgatgatgatttcagtacaatcagagatgacactggaaaagaaaagcagaaacaacgggccctggggagaaggaaaagccaagaagccctccatgagcagagcagctacatcctctccagtgcagagacgcctgcccggccccgagccccggaaacttctctctccatccacgtggggagcttcagataaccgcgccgctgcacggctctactcccgatgaactctccggctgatgccacaaacgtgggtttcctgggcatggggactggctgcctggcgcctccaatcccaaatcctctgcttcctttgagcacagggacggctcctctgaggcctggccagtgcatgtagtcacttagctctgcaacacgtggcagccacgggggctggtgcagctctggatgtcgcccacccagctgccagtaggtgctgggctctctcacacagcacccggccccagctgcctttttttttcttttaaccagaaaatgcacaacgtgtgcgtgaaccgcaggtatggaggcagcggcatgccgttgctccgctgtgggaggtgtgtggggtcaggccagccactttcctccgtgttcagatgactctcgttcgccctgaccggcttctcacagtgtctcaggccactgcgccaccgcgctggtgctgagcagaagcgggcagaagtggggtctgctttcaggacttcatttcccccactcgttccggccccgcatgctccacgtctgccctttggtctgagttaaaactgcgatgctgaaaagtgcgagctctttccacgaggaggagccacacagggtggcctccgagggtgagtcgctctgctaagcaagggcagccgctgcacgtcagcccgcaggccaagggtccagcttatcctgggtgctctgtgatcagaaggtccttggatcccgaggactgcagctgctgccgtccacagcgcctcagcctctcttcctgtgtggaagcggggcaggcagggctgtggcagacaggcctggcatagcccaggttccaggtgtcctgggcagcctgaccggtttcctgagtagcctcaatgaaaacacctgagaaaaagaaaatgtaaactaaggaagggttttcccacttaatccaacccagatttctattcaacttaaaggatttaattggcatttgtgagaaataatagtacctgtgtcactgagttgattgatttgggacatagacggttgactttcccagacagcagcttagcggaaagcagcatcccgaagacggtgtcgcatgtcctgagcctgcttgtcacctgggcctcacggtttctcgtcagccccgtcactgatgggaagcagcactgaagtgtgagggcagaaaggacaccgctggagtcaggcgctcccctgcctgtgacccttttccaacaagctgatgctgagccagcggcctgctttgtccctcatactcctcccaacagtccaaacccctaccagacagaagccacgtcgcttctgcacacgtgtctgagagcgtctgccatagacgtctgtgcgtttccgtgaagcactgcgccctaaggacccaactctgactagcagctgcctcccactcccaaacactaaccccgctcaggagactcgcactgggtgtagactgcgtctttgcagagggagatgatagaggcttctgatgacgccagagctgtaagtgtcgtgacgagctgggcgcccagcccttcttaagctgttctgtttctgtggctttaactgacatatttctgtagcatctgccttcatctcatctcagcgtaatgaaatattaatgaaatcgctgaaaagctttgccttcgagaggccagaagcctcgcggaatgtctgcaagtccaaagacgcgtgtgggttgtgccctgaagtgccgtccagcaggcgcgtgcggccgggccggcctgtgcgtgtggcctttgccttcttccctttcttcctgttttctgtttttttaatttggggattgagaaagctgtacgattttgttaaagaaaaaaataaaccattttttaaagttgtaaaaaaaaaaagcttt

SEQ ID NO: 418276 - DNA, 2776 bp, Homo sapiens
gctgctgttgtgtcccttgttgtactgttagagcgggctctgccctggtgaattctactcccatggaagttaattccaaagtttcattttttaaacatgatgattaaaaagaagcttttgactcagatttagagagagggaactcacttctttctcaaggtgatttcagtgcagaggaatatgaagaccgctcagggccatgaccttgcctcctttcctggagttcggtgtcccgtccccagcccacctcagagcctggacggtggagaggaagcgcccaggcaggcttttacgaactgaccggcagccactcagggaatataaactaggacggagaattgagatctgcttagagccccttcagaaaggcgaaaacttgggcccccaggacgtgctgctgaggacacaggtgcgcatccctggtgagaggacctatgcccctgccctggacctggtgtggaacgcggcccagggtgggactgccggctccctgaggcagagagttgccgatttctatcgtcttcccgtggagaagattgaaattgccaaatactttcccgaaaagttcgagtggcttccgatatctagctggaaccaacaaataaccaagaggaaaaagaaaaaaaaacaagattatttgcaaggggcaccgtattacttgaaagacggagatactattggtgttaagaatctcctgattgacgacgatgatgatttcagtacaatcagagatgacactggaaaagaaaagcagaaacaacgggccctggggagaaggaaaagccaagaagccctccatgagcagagcagctacatcctctccagtgcagagacgcctgcccggccccgagccccggaaacttctctctccatccacgtggggagcttcagataaccgcgccgctgcacggctctactcccgatgaactctccggctgatgccacaaacgtgggtttcctgggcatggggactggctgcctggcgcctccaatcccaaatcctctgcttcctttgagcacagggacggctcctctgaggcctggccagtgcatgtagtcacttagctctgcaacacgtggcagccacgggggctggtgcagctctggatgtcgcccacccagctgccagtaggtgctgggctctctcacacagcacccggccccagctgcctttttttttcttttaaccagaaaatgcacaacgtgtgcgtgaaccgcaggtatggaggcagcggcatgccgttgctccgctgtgggaggtgtgtggggtcaggccagccactttcctccgtgttcagatgactctcgttcgccctgaccggcttctcacagtgtctcaggccactgcgccaccgcgctggtgctgagcagaagcgggcagaagtggggtctgctttcaggacttcatttcccccactcgttccggccccgcatgctccacgtctgccctttggtctgagttaaaactgcgatgctgaaaagtgcgagctctttccacgaggaggagccacacagggtggcctccgagggtgagtcgctctgctaagcaagggcagccgctgcacgtcagcccgcaggccaagggtccagcttatcctgggtgctctgtgatcagaaggtccttggatcccgaggactgcagctgctgccgtccacagcgcctcagcctctcttcctgtgtggaagcggggcaggcagggctgtggcagacaggcctggcatagcccaggttccaggtgtcctgggcagcctgaccggtttcctgagtagcctcaatgaaaacacctgagaaaaagaaaatgtaaactaaggaagggttttcccacttaatccaacccagatttctattcaacttaaaggatttaattggcatttgtgagaaataatagtacctgtgtcactgagttgattgatttgggacatagacggttgactttcccagacagcagcttagcggaaagcagcatcccgaagacggtgtcgcatgtcctgagcctgcttgtcacctgggcctcacggtttctcgtcagccccgtcactgatgggaagcagcactgaagtgtgagggcagaaaggacaccgctggagtcaggcgctcccctgcctgtgacccttttccaacaagctgatgctgagccagcggcctgctttgtccctcatactcctcccaacagtccaaacccctaccagacagaagccacgtcgcttctgcacacgtgtctgagagcgtctgccatagacgtctgtgcgtttccgtgaagcactgcgccctaaggacccaactctgactagcagctgcctcccactcccaaacactaaccccgctcaggagactcgcactgggtgtagactgcgtctttgcagagggagatgatagaggcttctgatgacgccagagctgtaagtgtcgtgacgagctgggcgcccagcccttcttaagctgttctgtttctgtggctttaactgacatatttctgtagcatctgccttcatctcatctcagcgtaatgaaatattaatgaaatcgctgaaaagctttgccttcgagaggccagaagcctcgcggaatgtctgcaagtccaaagacgcgtgtgggttgtgccctgaagtgccgtccagcaggcgcgtgcggccgggccggcctgtgcgtgtggcctttgccttcttccctttcttcctgttttctgtttttttaatttggggattgagaaagctgtacgattttgttaaagaaaaaaataaaccattttttaaagttgtaaaaaaaaaaagcttt

SEQ ID NO: 418277 - DNA, 2805 bp, Homo sapiens
tacagcccccagagtcaagggcataactgcctacctcgagcccgctctcctcctgccagctgccgggctatcaagccaggcctctctcaccctgtccctctctgccacatcgtacctgctcaggccgccacctctttccttttctcccgcactgaggaagttccctaccacgtctgggggggctctgctgtgtaccgagaatgggatcttcacttccgctcttcattccaagattaaaggaaattgaaatgcggaataagagtttgccactagcatccagcatttagggaaaaatctctccttataaaaaccagaaaagctggaggagaagctttgcccattatgcctcaagttaccacgtggttttgtttgtttgtttggatctggcgcttgacggttttctggtacagcccccaggacgtgctgctgaggacacaggtgcgcatccctggtgagaggacctatgcccctgccctggacctggtgtggaacgcggcccagggtgggactgccggctccctgaggcagagagttgccgatttctatcgtcttcccgtggagaagattgaaattgccaaatactttcccgaaaagttcgagtggcttccgatatctagctggaaccaacaaataaccaagaggaaaaagaaaaaaaaacaagattatttgcaaggggcaccgtattacttgaaagacggagatactattggtgttaagaatctcctgattgacgacgatgatgatttcagtacaatcagagatgacactggaaaagaaaagcagaaacaacgggccctggggagaaggaaaagccaagaagccctccatgagcagagcagctacatcctctccagtgcagagacgcctgcccggccccgagccccggaaacttctctctccatccacgtggggagcttcagataaccgcgccgctgcacggctctactcccgatgaactctccggctgatgccacaaacgtgggtttcctgggcatggggactggctgcctggcgcctccaatcccaaatcctctgcttcctttgagcacagggacggctcctctgaggcctggccagtgcatgtagtcacttagctctgcaacacgtggcagccacgggggctggtgcagctctggatgtcgcccacccagctgccagtaggtgctgggctctctcacacagcacccggccccagctgcctttttttttcttttaaccagaaaatgcacaacgtgtgcgtgaaccgcaggtatggaggcagcggcatgccgttgctccgctgtgggaggtgtgtggggtcaggccagccactttcctccgtgttcagatgactctcgttcgccctgaccggcttctcacagtgtctcaggccactgcgccaccgcgctggtgctgagcagaagcgggcagaagtggggtctgctttcaggacttcatttcccccactcgttccggccccgcatgctccacgtctgccctttggtctgagttaaaactgcgatgctgaaaagtgcgagctctttccacgaggaggagccacacagggtggcctccgagggtgagtcgctctgctaagcaagggcagccgctgcacgtcagcccgcaggccaagggtccagcttatcctgggtgctctgtgatcagaaggtccttggatcccgaggactgcagctgctgccgtccacagcgcctcagcctctcttcctgtgtggaagcggggcaggcagggctgtggcagacaggcctggcatagcccaggttccaggtgtcctgggcagcctgaccggtttcctgagtagcctcaatgaaaacacctgagaaaaagaaaatgtaaactaaggaagggttttcccacttaatccaacccagatttctattcaacttaaaggatttaattggcatttgtgagaaataatagtacctgtgtcactgagttgattgatttgggacatagacggttgactttcccagacagcagcttagcggaaagcagcatcccgaagacggtgtcgcatgtcctgagcctgcttgtcacctgggcctcacggtttctcgtcagccccgtcactgatgggaagcagcactgaagtgtgagggcagaaaggacaccgctggagtcaggcgctcccctgcctgtgacccttttccaacaagctgatgctgagccagcggcctgctttgtccctcatactcctcccaacagtccaaacccctaccagacagaagccacgtcgcttctgcacacgtgtctgagagcgtctgccatagacgtctgtgcgtttccgtgaagcactgcgccctaaggacccaactctgactagcagctgcctcccactcccaaacactaaccccgctcaggagactcgcactgggtgtagactgcgtctttgcagagggagatgatagaggcttctgatgacgccagagctgtaagtgtcgtgacgagctgggcgcccagcccttcttaagctgttctgtttctgtggctttaactgacatatttctgtagcatctgccttcatctcatctcagcgtaatgaaatattaatgaaatcgctgaaaagctttgccttcgagaggccagaagcctcgcggaatgtctgcaagtccaaagacgcgtgtgggttgtgccctgaagtgccgtccagcaggcgcgtgcggccgggccggcctgtgcgtgtggcctttgccttcttccctttcttcctgttttctgtttttttaatttggggattgagaaagctgtacgattttgttaaagaaaaaaataaaccattttttaaagttgtaaaaaaaaaaagcttt

SEQ ID NO: 418278 - DNA, 1943 bp, Homo sapiens
gggtccttggatcccgaggactgcagctgctgccgtccacagcgcctcagcctctcttcctgtgtggaagcggggcaggcagggctgtggcagacaggcctggcatagcccaggttccaggtttcctgggcatggggactggctgcctggcgcctccaatcccaaatcctctgcttcctttgagcacagggacggctcctctgaggcctggccagtgcatgtagtcacttagctctgcaacacgtggcagccacgggggctggtgcagctctggatgtcgcccacccagctgccagtaggtgctgggctctctcacacagcacccggccccagctgcctttttttttcttttaaccagaaaatgcacaacgtgtgcgtgaaccgcaggtatggaggcagcggcatgccgttgctccgctgtgggaggtgtgtggggtcaggccagccactttcctccgtgttcagatgactctcgttcgccctgaccggcttctcacagtgtctcaggccactgcgccaccgcgctggtgctgagcagaagcgggcagaagtggggtctgctttcaggacttcatttcccccactcgttccggccccgcatgctccacgtctgccctttggtctgagttaaaactgcgatgctgaaaagtgcgagctctttccacgaggaggagccacacagggtggcctccgagggtgagtcgctctgctaagcaagggcagccgctgcacgtcagcccgcaggccaagggtccagcttatcctgggtgctctgtgatcagaaggtccttggatcccgaggactgcagctgctgccgtccacagcgcctcagcctctcttcctgtgtggaagcggggcaggcagggctgtggcagacaggcctggcatagcccaggttccaggtgtcctgggcagcctgaccggtttcctgagtagcctcaatgaaaacacctgagaaaaagaaaatgtaaactaaggaagggttttcccacttaatccaacccagatttctattcaacttaaaggatttaattggcatttgtgagaaataatagtacctgtgtcactgagttgattgatttgggacatagacggttgactttcccagacagcagcttagcggaaagcagcatcccgaagacggtgtcgcatgtcctgagcctgcttgtcacctgggcctcacggtttctcgtcagccccgtcactgatgggaagcagcactgaagtgtgagggcagaaaggacaccgctggagtcaggcgctcccctgcctgtgacccttttccaacaagctgatgctgagccagcggcctgctttgtccctcatactcctcccaacagtccaaacccctaccagacagaagccacgtcgcttctgcacacgtgtctgagagcgtctgccatagacgtctgtgcgtttccgtgaagcactgcgccctaaggacccaactctgactagcagctgcctcccactcccaaacactaaccccgctcaggagactcgcactgggtgtagactgcgtctttgcagagggagatgatagaggcttctgatgacgccagagctgtaagtgtcgtgacgagctgggcgcccagcccttcttaagctgttctgtttctgtggctttaactgacatatttctgtagcatctgccttcatctcatctcagcgtaatgaaatattaatgaaatcgctgaaaagctttgccttcgagaggccagaagcctcgcggaatgtctgcaagtccaaagacgcgtgtgggttgtgccctgaagtgccgtccagcaggcgcgtgcggccgggccggcctgtgcgtgtggcctttgccttcttccctttcttcctgttttctgtttttttaatttggggattgagaaagctgtacgattttgttaaagaaaaaaataaaccattttttaaagttgtaaaaaaaaaaagcttt

SEQ ID NO: 418279 - DNA, 2702 bp, Homo sapiens
  misc_feature (72)..(72): n is a, c, g, or t
  misc_feature (81)..(81): n is a, c, g, or t
agcggactttctggagacccgccctcgccaacatggcggcgcccagttggggcgggttcgttcgcttcgcgntttggccanggcgggggtctgggctttaggcaggtagtatttagtttcacaatgtttggggacctgtttgaagaggagtattccactgtgtctaataatcagtatggaaaagggaagaaattaaagactaaagctttggagccacctgctcctagagaattcaccaatttaagcggaatcagaaatcagggtggaacctgttacctcaattcccttcttcagactcttcatttcacacctgaattcagagaagctctattttctcttggcccagaagagcttggtttgtttgaagataaggataaacccgatgcaaaggttcgaatcatccctttacagttacagcgcttgtttgctcagcttctgctcttagaccaggaagctgcatccacagcagacctcactgacagctttgggtggaccagtaatgaggaaatgaggcaacatgatgtgcaggaactgaatcgaatcctcttcagcgctttggaaacttctttagttgggacctccggtcatgacctcatctatcgtctgtaccatggaaccattgttaaccagattgtttgtaaagaatgtaagaacgttagcgagaggcaggaagacttcttagatctaacagtagcagtcaaaaatgtatccggtttggaagatgctctctggaacatgtatgtagaagaggaagtttttgattgtgacaacttgtaccactgtggaacttgtgacaggctggttaaagcagcaaagtcggccaaattacgtaagctgcctccttttcttactgtttcattactaagatttaattttgattttgtgaaatgcgaacgctacaaggaaactagctgttatacattccctctccggattaatctcaagcccttttgtgaacagagtgaattggatgacttagaatatatatatgacctcttctcagttattatacacaaaggtggctgctacggaggccattaccatgtatatattaaagatgttgatcatttgggaaactggcagtttcaagaggaaaaaagtaaaccagatgtgaatctgaaagatctccagagtgaagaagagattgatcatccactgatgattctaaaagcaatcttattagaggaggagaataatctaattcctgttgatcagctgggccagaaacttttgaaaaagataggaatatcttggaacaagaagtacagaaaacagcatggaccattgcggaagttcttacaggctccattctcagatatttctactcagttcagatgaaagtacagttcgtctcttgaagaatagttctctccaggctgagtctgatttccaaaggaatgaccagcaaattttcaagatgcttcctccagaatccccaggtttaaacaatagcatctcctgtccccactggtttgatataaatgattctaaagtccagccaatcagggaaaaggatattgaacagcaatttcagggtaaagaaagtgcctacatgttgttttatcggaaatcccagttgcagagaccccctgaagctcgagctaatccaagatatggggttccatgtcatttactgaatgaaatggatgcagctaacattgaactgcaaaccaaaagggcagaatgtgattctgcaaacaatacttttgaattgcatcttcacctgggccctcagtatcatttcttcaatggggctctgcacccagtagtctctcaaacagaaagcgtgtgggatttgacctttgataaaagaaaaactttaggagatctccggcagtcaatatttcagctgttagaattttgggaaggagacatggttcttagtgttgcaaagcttgtaccagcaggacttcacatttaccagtcacttggcggggatgaactgacactgtgtgaaactgaaattgctgatggggaagacatctttgtgtggaatggggtggaggttggtggagtccacattcaaactggtattgactgcgaacctctacttttaaatgttcttcatctagacacaagcagtgatggagaaaagtgttgtcaggtgatagaatctccacatgtctttccagctaatgcagaagtgggcactgtcctcacagccttagcaatcccagcaggtgtcatcttcatcaacagtgctggatgtccaggtggggagggttggacggccatccccaaggaagacatgaggaagacgttcagggagcaagggctcagaaatggaagctcaattttaattcaggattctcatgatgataacagcttgttgaccaaggaagagaaatgggtcactagtatgaatgagattgactggctccacgttaaaaatttatgccagttagaatctgaagagaagcaagttaaaatatcagcaactgttaacacaatggtgtttgatattcgaattaaagccataaaggaattaaaattaatgaaggaactaggtaatcatttacattttcttttcggttcttagtttagcttaattttggtcttgaattgaagaaaatataggagaatacaaaaaacagtttagggagaactcacatacctaccacccaaaatggacaaatattaacattttgtcatatgtttgtttttgtttgaaacattataaatgaagttaaagtcccctgtgt

SEQ ID NO: 418280 - DNA, 488 bp, Homo sapiens
attgtggtttatatttcctcataaaacagattttattgtatctttggtaaattcataaacttttcttatatttttctgatagattttaagctaaattatagttcaatttcaaaagaaggataatttagtgttatgaacttcacaacatctaatcaggagatctacatctttatttgtaatgttttagaaaacatatatctgattattcccaatatatatgtgagttgatgatgtgtttgtaaacctctgaaattgtttttcaatattatattcatgtctatttcaggaagacttcttagatctaacagtagcagtcaaaaatgtatccggtttggaagatgctctctggaacatgtatgtagaagaggaagtttttgattgtgacaacttgtaccactgtggaacttgtgacaggctggttaaagcagcaaaggtaaagacagataactgctttttcccagggtccccactttgtagttagtacaagt

SEQ ID NO: 418281 - DNA, 297 bp, Homo sapiens
ttaaaacagttttctcttggaattcatggtgacagaactgaatttttgctattgactgaaaaattaaagtgactaattgtggcacatagaagaaaaattgttactttggtgggatggagaactttattgtaagccagatatctttggtttgagataaaacacagtgtctgttataaaaacacagtatttatgtatttttgtgcctctttaaagggcagaatgtgattctgcaaacaatacttttgaattgcatcttcacctgggccctcagtatcatttcttcaatggggctctgca

SEQ ID NO: 418282 - DNA, 477 bp, Homo sapiens
cagaggctcttgagtggaattttaataacctatttacaatatcaaaacatggcaatgtatttcagaaacacaaaataagtttcaagttccttgtaaacatcccgctctgtcctttggaaggtgcttctgggaacgagcctgcgcaagtttctctcctctacttgggagacatagagatctcagaagatgccacgctggcggagctgaagtctcaggtcagacttcttcctgcaccataacttagtggtaatgtggcttcttccagtgagatattaatatattcttctatctccttttccctcaattacagtctgttctgatatggcatttgtcatatgccatgttcagtggtaagtacccgcaggcaatacacgcccatggtgcagacggctcctcgtggcctcactggtccctcctctgacaggcatgctgtgcttttgtttcaatctatcctcagtgacttgcggcttttgttca

SEQ ID NO: 418283 - DNA, 540 bp, Homo sapiens
ctgtctgtgcaattgcaaatgcacgtccttgtggcctataaaattggagtgtattttggggtcttcgtgaacccctcaccctgacacccactgcatccatgagtcaatgacagtgtctgtgtctctgcagccaagaagccctccatgagcagagcagctacatcctctccagtgcagagacgcctgcccggccccgagccccggaaacttctctctccatccacgtggggagcttcagataaccgcgccgctgcacggctctactcccgatgaactctccggctgatgccacaaacgtgggtttcctgggcatggggactggctgcctggcgcctccaatcccaaatcctctgcttcctttgagcacagggacggctcctctgaggcctggccagtgcatgtagtcacttagctctgcaacacgtggcagccacgggggctggtgcagctctggatgtcgcccacccagctgccagtaggtgctgggctctctcacacagcacccggccccagctgcctttttttttcttttaaccagaa

SEQ ID NO: 418284 - DNA, 448 bp, Homo sapiens
actgtcccaagttgctaagtgaacagaactatctcagcatcagaatgagaaagcctgagaagaaagaaccaaccacaagcacacaggaaggaaagcgcaggaggtgaaaatgcttttttggccagggtagtaagaattagaggttaatgcagggactgtaaaaccaccttttctgcttcaatatctaattcctgtgtagctttgttcattgcatttattaaacaaatgttgtataaccaatactaaatgtactactgagcttcggtgagttaagttatgaaactttcaaatccttcatcatgtcagttccaatgaggtggggatgcaccacccatgtgcgcccccataaccccacccctgcccaccccacccccacccccaccaagggcgcaagagtagcggtccaagcctgcaactcatctttcattaaaggcttctctctcaccag

SEQ ID NO: 418285 - DNA, 786 bp, Homo sapiens
cctcagagaaccccaggctgaggccccacacacagagggggatccaggttgagacccccagagaagagtcctggattgaaatccctctgtgggttctcagactcccaagactaagtttctcactgagggtcctctcagtgaggccccatggaggagccacagactaagaccccctcagcagaattccccccttaccgggctcaaccagcacagccagccacagctccagcagccacatttgcaaccttggccatctgtccagaacctgctcccacctcaggcccaggccaaccgtgcactgctgcaatgggctctgagctggagacggcgatggagaccctcatcaacgtgttccacgcccactcgggcaaagagggggacaagtacaagctgagcaagaaggagctgaaagagctgctgcagacggagctctctggcttcctggatgcccagaaggatgtggatgctgtggacaaggtgatgaaggagctagacgagaatggagacggggaggtggacttccaggagtatgtggtgcttgtggctgctctcacagtggcctgtaacaatttcttctgggagaacagttgagcagacagccacattgggcagcgcccttcctctccaccctcccagacctgcctcttccccctgcttccacctcaccccacttatccctctccataaccccacccctgcccaccccacccccacccccaccaagggcgcaagagtagcggtccaagcctgcaactcatctttcattaaaggcttctctctcaccag

SEQ ID NO: 418286 - DNA, 627 bp, Homo sapiens
  misc_feature (69)..(70): n is a, c, g, or t
  misc_feature (74)..(75): n is a, c, g, or t
  misc_feature (82)..(82): n is a, c, g, or t
actagttctagatcgcgatctagaactagtcggacgcgtgggtccggacgcgtgggtcgacccacgcgnncgcnnacgcgtnggaccttggccatctgtccagaacctgctcccacctcaggcccaggccaaccgtgcactgctgcaatgggctctgagctggagacggcgatggagaccctcatcaacgtgttccacgcccactcgggcaaagagggggacaagtacaagctgagcaagaaggagctgaaagagctgctgcagacggagctctctggcttcctggatgcccagaaggatgtggatgctgtggacaaggtgatgaaggagctagacgagaatggagacggggaggtggacttccaggagtatgtggtgcttgtggctgctctcacagtggcctgtaacaatttcttctgggagaacagttgagcagacagccacattgggcagcgcccttcctctccaccctcccagacctgcctcttccccctgcttccacctcaccccacttatccctctccataaccccacccctgcccaccccacccccacccccaccaagggcgcaagagtagcggtccaagcctgcaactcatctttcattaaaggcttctctctcaccag

SEQ ID NO: 418287 - DNA, 934 bp, Homo sapiens
cctcagagaaccccaggctgaggccccacacacagagggggatccaggttgagacccccagagaagagtcctggattgaaatccctctgtgggttctcagactcccaagactaagtttctcactgagggtcctctcagtgaggccccatggaggagccacagactaagaccccctcagcagaattccccccttaccgggctcaaccagcacagccagccacagctccagcagccacatttgcaaccttggccatctgtccagaacctgctcccacctcaggcccaggccaaccgtgcactgctgcaatgggctctgagctggagacggcgatggagaccctcatcaacgtgttccacgcccactcgggcaaagagggggacaagtacaagctgagcaagaaggagctgaaagagctgctgcagacggagctctctggcttcctggatgcccagaaggatgtggatgctgtggacaaggtgatgaaggagctagacgagaatggagacggggaggtggacttccaggagtatgtggtgcttgtggctgctctcacagtggcctgtaacaatttcttctgggagaacagttgagcagacagccacattgggcagcgcccttcctctccaccctcccagacctgcctcttccccctgcttccacctcaccccacttatccctctccataaccccacccctgcccaccccacccccacccccaccaagggcgcaagagtagcggtccaagcctgcaactcatctttcattaaaggcttctctctcaccaggtttcgccttcgattattcacgattcgttcacttgctttccgaccttctcttgatcttagttcttctactacgcattctctcgtcccgattccaaatcttctctccgtctttctcttcttcaacttccttcttcacttccctaccccg

SEQ ID NO: 418288 - DNA, 604 bp, Homo sapiens
  misc_feature (69)..(70): n is a, c, g, or t
  misc_feature (74)..(75): n is a, c, g, or t
  misc_feature (82)..(82): n is a, c, g, or t
actagttctagatcgcgatctagaactagtcggacgcgtgggtccggacgcgtgggtcgacccacgcgnncgcnnacgcgtnggacccacgcgtccgcggacgcgtgggtcgtgcactgctgcaatgggctctgagctggagacggcgatggagaccctcatcaacgtgttccacgcccactcgggcaaagagggggacaagtacaagctgagcaagaaggagctgaaagagctgctgcagacggagctctctggcttcctggatgcccagaaggatgtggatgctgtggacaaggtgatgaaggagctagacgagaatggagacggggaggtggacttccaggagtatgtggtgcttgtggctgctctcacagtggcctgtaacaatttcttctgggagaacagttgagcagacagccacattgggcagcgcccttcctctccaccctcccagacctgcctcttccccctgcttccacctcaccccacttatccctctccataaccccacccctgcccaccccacccccacccccaccaagggcgcaagagtagcggtccaagcctgcaactcatctttcattaaaggcttctctctcaccag

SEQ ID NO: 418289 - DNA, 946 bp, Homo sapiens
cctcagagaaccccaggctgaggccccacacacagagggggatccaggttgagacccccagagaagagtcctggattgaaatccctctgtgggttctcagactcccaagactaagtttctcactgagggtcctctcagtgaggccccatggaggagccacagactaagaccccctcagcagaattccccccttaccgggctcaaccagcacagccagccacagctccagcagccacatttgcaaccttggccatctgtccagaacctgctcccacctcaggcccaggccaaccgtgcactgctgcaatgggctctgagctggagacggcgatggagaccctcatcaacgtgttccacgcccactcgggcaaagagggggacaagtacaagctgagcaagaaggagctgaaagagctgctgcagacggagctctctggcttcctggatgcccagaaggatgtggatgctgtggacaaggtgatgaaggagctagacgagaatggagacggggaggtggacttccaggagtatgtggtgcttgtggctgctctcacagtggcctgtaacaatttcttctgggagaacagttgagcagacagccacattgggcagcgcccttcctctccaccctcccagacctgcctcttccccctgcttccacctcaccccacttatccctctattacgaccatctatcccgtatatataccatctcccatttatcaccaacacagtgggcaggtaaataagtgggaaggagaaggaagtgttctctgtctcttcctcactttgactggtcttattcccacatggtttctttagccaggactgttctactcagcctctgttggaagaaaacttcccacagggctgcactagcacagccagcctttgcttttacagcctgctcttgcctatttaccataccagtgtatgtatccttcca

SEQ ID NO: 418290 - DNA, 738 bp, Homo sapiens
gtctcggctctacctggttctctcggctctacctgtctctcggctctaccttgtctcccgtgcactgctgcaatgggctctgagctggagacggcgatggagaccctcatcaacgtgttccacgcccactcgggcaaagagggggacaagtacaagctgagcaagaaggagctgaaagagctgctgcagacggagctctctggcttcctggatgtgaaagagcttatgctgtaggcaacagaagccctcaagacctttgaggaggcctagaagagtcccataattcaatgcagttcctctcgctcatctttgcctcctgctcctcaaccacccccttgcctctgactcagtgctgtacccttccctatacacctccctcttcctctcctcccaccacaggcccagaaggatgtggatgctgtggacaaggtgatgaaggagctagacgagaatggagacggggaggtggacttccaggagtatgtggtgcttgtggctgctctcacagtggcctgtaacaatttcttctgggagaacagttgagcagacagccacattgggcagcgcccttcctctccaccctcccagacctgcctcttccccctgcttccacctcaccccacttatccctctccataaccccacccctgcccaccccacccccacccccaccaagggcgcaagagtagcggtccaagcctgcaactcatctttcattaaaggcttctctctcaccag

SEQ ID NO: 418291 - DNA, 605 bp, Homo sapiens
taaagctcctagtgtagtgcttgctttattataggcactgaacatacggtaactggtgtcattattattcattctgccaggtgaaagagcttatgctgtaggcaacagaagccctcaagacctttgaggaggcctagaagagtcccataattcaatgcagttcctctcgctcatctttgcctcctgctcctcaaccacccccttgcctctgactcagtgctgtacccttccctatacacctccctcttcctctcctcccaccacaggcccagaaggatgtggatgctgtggacaaggtgatgaaggagctagacgagaatggagacggggaggtggacttccaggagtatgtggtgcttgtggctgctctcacagtggcctgtaacaatttcttctgggagaacagttgagcagacagccacattgggcagcgcccttcctctccaccctcccagacctgcctcttccccctgcttccacctcaccccacttatccctctccataaccccacccctgcccaccccacccccacccccaccaagggcgcaagagtagcggtccaagcctgcaactcatctttcattaaaggcttctctctcaccag

SEQ ID NO: 418292 - DNA, 972 bp, Homo sapiens
  misc_feature (69)..(70): n is a, c, g, or t
  misc_feature (74)..(75): n is a, c, g, or t
  misc_feature (82)..(82): n is a, c, g, or t
  misc_feature (696)..(696): n is a, c, g, or t
  misc_feature (702)..(702): n is a, c, g, or t
  misc_feature (705)..(705): n is a, c, g, or t
  misc_feature (709)..(710): n is a, c, g, or t
  misc_feature (719)..(720): n is a, c, g, or t
  misc_feature (760)..(761): n is a, c, g, or t
actagttctagatcgcgatctagaactagtcggacgcgtgggtccggacgcgtgggtcgacccacgcgnncgcnnacgcgtnggaccttggccatctgtccagaacctgctcccacctcaggcccaggccaaccgtgcactgctgcaatgggctctgagctggagacggcgatggagaccctcatcaacgtgttccacgcccactcgggcaaagagggggacaagtacaagctgagcaagaaggagctgaaagagctgctgcagacggagctctctggcttcctggatgcccagaaggatgtggatgctgtggacaaggtgatgaaggagctagacgagaatggagacggggaggtggacttccaggagtatgtggtgcttgtggctgctctcacagtggcctgtaacaatttcttctgggagaacagttgagcagacagccacattgggcagcgcccttcctctccaccacatcccagacctgacttcattccaccctgctatacatctaaccacacattatacctctccaataaaccccacaccataaccaaccacaaaagaaaaaaacaacaaaaaaagcaaaaatacaaaacacaaacaaggaacaacataaacacataaagggatccagcgcaacaggacggacgcacagaagacgagaaaaaaaaaagaggggccgaaaaaaaacgaggnaagganaangaannaaagaaagnnaggaaagggaagaagaaagaaggggcggggaacaaaaaanngggggagaacagggaagcaaacagcaacaaggggaagggccattcctagccaccctcccagacctgcctcttccccctgcttccacctcaccccacttatccctctccataaccccacccctgcccaccccacccccacccccaccaagggcgcaagagtagcggtccaagcctgcaactcatctttcattaaaggcttctctctcaccag

SEQ ID NO: 418293 - DNA, 499 bp, Homo sapiens
  misc_feature (69)..(70): n is a, c, g, or t
  misc_feature (74)..(75): n is a, c, g, or t
  misc_feature (82)..(82): n is a, c, g, or t
actagttctagatcgcgatctagaactagtcggacgcgtgggtccggacgcgtgggtcgacccacgcgnncgcnnacgcgtnggaccttggccatctgtccagaacctgctcccacctcaggcccaggccaaccgtgcactgctgcaatgggctctgagctggagacggcgatggagaccctcatcaacgtgttccacgcccactcgggcaaagagggggacaagtacaagctgagcaagaaggagctgaaagagctgctgcagacggagctctctggcttcctggatgcccagaaggatgtggatgctgtggacaaggtgatgaaggagctagacgagaatggagacggggaggtggacttccaggagtatgtggtgcttgtggctgctctcacagtggcctgtaacaatttcttctgggagaacagtttgatgcaagaccaggccactatttgggggcaaggtgtcctcctttccttttgttgccaaacgcattttc

SEQ ID NO: 418294 - DNA, 890 bp, Homo sapiens
  misc_feature (614)..(614): n is a, c, g, or t
  misc_feature (620)..(620): n is a, c, g, or t
  misc_feature (623)..(623): n is a, c, g, or t
  misc_feature (627)..(628): n is a, c, g, or t
  misc_feature (637)..(638): n is a, c, g, or t
  misc_feature (678)..(679): n is a, c, g, or t
ggctccctgaagtatctcgggcccctcggggtgcacaagcaacacgaggcaggtgcactgctgcaatgggctctgagctggagacggcgatggagaccctcatcaacgtgttccacgcccactcgggcaaagagggggacaagtacaagctgagcaagaaggagctgaaagagctgctgcagacggagctctctggcttcctggatgcccagaaggatgtggatgctgtggacaaggtgatgaaggagctagacgagaatggagacggggaggtggacttccaggagtatgtggtgcttgtggctgctctcacagtggcctgtaacaatttcttctgggagaacagttgagcagacagccacattgggcagcgcccttcctctccaccacatcccagacctgacttcattccaccctgctatacatctaaccacacattatacctctccaataaaccccacaccataaccaaccacaaaagaaaaaaacaacaaaaaaagcaaaaatacaaaacacaaacaaggaacaacataaacacataaagggatccagcgcaacaggacggacgcacagaagacgagaaaaaaaaaagaggggccgaaaaaaaacgaggnaagganaangaannaaagaaagnnaggaaagggaagaagaaagaaggggcggggaacaaaaaanngggggagaacagggaagcaaacagcaacaaggggaagggccattcctagccaccctcccagacctgcctcttccccctgcttccacctcaccccacttatccctctccataaccccacccctgcccaccccacccccacccccaccaagggcgcaagagtagcggtccaagcctgcaactcatctttcattaaaggcttctctctcaccag

SEQ ID NO: 418295 - DNA, 593 bp, Homo sapiens
ggactgttgaagacaggtctccacacacagctccagcagccacatttgcaaccttggccatctgtccagaacctgctcccacctcaggcccaggccaaccgtgcactgctgcaatgggctctgagctggagacggcgatggagaccctcatcaacgtgttccacgcccactcgggcaaagagggggacaagtacaagctgagcaagaaggagctgaaagagctgctgcagacggagctctctggcttcctggatgcccagaaggatgtggatgctgtggacaaggtgatgaaggagctagacgagaatggagacggggaggtggacttccaggagtatgtggtgcttgtggctgctctcacagtggcctgtaacaatttcttctgggagaacagttgagcagacagccacattgggcagcgcccttcctctccaccctcccagacctgcctcttccccctgcttccacctcaccccacttatccctctccataaccccacccctgcccaccccacccccacccccaccaagggcgcaagagtagcggtccaagcctgcaactcatctttcattaaaggcttctctctcaccag

SEQ ID NO: 418296 - DNA, 1131 bp, Homo sapiens
cctcagagaaccccaggctgaggccccacacacagagggggatccaggttgagacccccagagaagagtcctggattgaaatccctctgtgggttctcagactcccaagactaagtttctcactgagggtcctctcagtgaggccccatggaggagccacagactaagaccccctcagcagaattccccccttaccgggctcaaccagcacagccagccacagctccagcagccacatttgcaaccttggccatctgtccagaacctgctcccacctcaggcccaggccaaccgtgcactgctgcaatgggctctgagctggagacggcgatggagaccctcatcaacgtgttccacgcccactcgggcaaagagggggacaagtacaagctgagcaagaaggagctgaaagagctgctgcagacggagctctctggcttcctggatgcccagaaggatgtggatgctgtggacaaggtgatgaaggagctagacgagaatggagacggggaggtggacttccaggagtatgtggtgcttgtggctgctctcacagtggcctgtaacaatttcttctgggagaacagttgagcagacagccacattgggcagcgcccttcctctccaccctcccagacctgcctcttccccctgcttccacctcaccccacttatccctctccataaccccacccctgcccaccccacccccacccccaccaagggcgcaagagtagcggtccaagcctgcaactcatctttcattaaaggcttctctctcaccagaaaaaaaatgcttacagttaataatacaccgagttattaccgatcaacaagtaacaccgatacccaagtgacctaacaagaacaagaaaagccgcctccatgggggacgccaaggagttggcggaccaagagcctggaatagccatatacgccataacaggggcgtcacctgctcaaccaaacacgcacaccgggaatccagttgtgaataaggacagcaatagagctatagagacttcacgcagccacagagttagcagataatcgggcattattcatgatgcactagagccagacacgacatacactattttagtactcatgaaccacgcaccgaaccgcatc

SEQ ID NO: 418297 - DNA, 813 bp, Homo sapiens
  misc_feature (69)..(70): n is a, c, g, or t
  misc_feature (74)..(75): n is a, c, g, or t
  misc_feature (82)..(82): n is a, c, g, or t
actagttctagatcgcgatctagaactagtcggacgcgtgggtccggacgcgtgggtcgacccacgcgnncgcnnacgcgtnggaccttggccatctgtccagaacctgctcccacctcaggcccaggccaaccgtgcactgctgcaatgggctctgagctggagacggcgatggagaccctcatcaacgtgttccacgcccactcgggcaaagagggggacaagtacaagctgagcaagaaggagctgaaagagctgctgcagacggagctctctggcttcctggatgtgaaagagcttatgctgtaggcaacagaagccctcaagacctttgaggaggcctagaagagtcccataattcaatgcagttcctctcgctcatctttgcctcctgctcctcaaccacccccttgcctctgactcagtgctgtacccttccctatacacctccctcttcctctcctcccaccacaggcccagaaggatgtggatgctgtggacaaggtgatgaaggagctagacgagaatggagacggggaggtggacttccaggagtatgtggtgcttgtggctgctctcacagtggcctgtaacaatttcttctgggagaacagttgagcagacagccacattgggcagcgcccttcctctccaccctcccagacctgcctcttccccctgcttccacctcaccccacttatccctctccataaccccacccctgcccaccccacccccacccccaccaagggcgcaagagtagcggtccaagcctgcaactcatctttcattaaaggcttctctctcaccag

SEQ ID NO: 418298 - DNA, 713 bp, Homo sapiens
  misc_feature (69)..(70): n is a, c, g, or t
  misc_feature (74)..(75): n is a, c, g, or t
  misc_feature (82)..(82): n is a, c, g, or t
actagttctagatcgcgatctagaactagtcggacgcgtgggtccggacgcgtgggtcgacccacgcgnncgcnnacgcgtnggaccttggccatctgtccagaacctgctcccacctcaggcccaggccaaccggagccctcaagtccctgccaaggccccctctgtctcccaggtgttgggaagggtcccagccctcccctgcctcgcctcctgtggggtgcactgctgcaatgggctctgagctggagacggcgatggagaccctcatcaacgtgttccacgcccactcgggcaaagagggggacaagtacaagctgagcaagaaggagctgaaagagctgctgcagacggagctctctggcttcctggatgcccagaaggatgtggatgctgtggacaaggtgatgaaggagctagacgagaatggagacggggaggtggacttccaggagtatgtggtgcttgtggctgctctcacagtggcctgtaacaatttcttctgggagaacagttgagcagacagccacattgggcagcgcccttcctctccaccctcccagacctgcctcttccccctgcttccacctcaccccacttatccctctccataaccccacccctgcccaccccacccccacccccaccaagggcgcaagagtagcggtccaagcctgcaactcatctttcattaaaggcttctctctcaccag

SEQ ID NO: 418299 - DNA, 849 bp, Homo sapiens
cctcagagaaccccaggctgaggccccacacacagagggggatccaggttgagacccccagagaagagtcctggattgaaatccctctgtgggttctcagactcccaagactaagtttctcactgagggtcctctcagtgaggccccatggaggagccacagactaagaccccctcagcagaattccccccttaccgggctcaaccagcacagccagccacagctccagcagccacatttgcaaccttggccatctgtccagaacctgctcccacctcaggcccaggccaaccgtgcactgctgcaatgggctctgagctggagacggcgatggagaccctcatcaacgtgttccacgcccactcgggcaaagagggggacaagtacaagctgagcaagaaggagctgaaagagctgctgcagacggagctctctggcttcctggatgcccagaaggatgtggatgctgtggacaaggtgatgaaggagctagacgagaatggagacggggaggtggacttccaggagtatgtggtgcttgtggctgctctcacagtggcctgtaacaatttcttctgggagaacagttgagcagacagccacattgggcagcgcccttcctctccaccctcccagacctgcctcttccccctgcttccacctcaccccacttatccctcttggctgatgcccttgcacatggagctgatgtcgactgggtcaaagggggacaagataatgccacaccgagtgatccaggccacagctgctacttctcttctggcctgtgagtatctcatccagaacggggcgaacgtgaaccaagcggacagtgcgggcaggggccag

SEQ ID NO: 418300 - DNA, 516 bp, Homo sapiens
aagggcaggccgggtgagcagacggatcggccgactagacagccaaccagcaacaacgaactgagctcgcatactaccgcttacgcatctaaccaaccgcccatctagctaacccgagcccctccaccgtcaactcaggttcggccggtccccggcccgcctgccggagccgtggtggcagccccgggaggagcactggcgtctgtttccttcggtgagctagacgagaatggagacggggaggtggacttccaggagtatgtggtgcttgtggctgctctcacagtggcctgtaacaatttcttctgggagaacagttgagcagacagccacattgggcagcgcccttcctctccaccctcccagacctgcctcttccccctgcttccacctcaccccacttatccctctccataaccccacccctgcccaccccacccccacccccaccaagggcgcaagagtagcggtccaagcctgcaactcatctttcattaaaggcttctctctcaccag

SEQ ID NO: 418301 - DNA, 572 bp, Homo sapiens
  misc_feature (69)..(70): n is a, c, g, or t
  misc_feature (74)..(75): n is a, c, g, or t
  misc_feature (82)..(82): n is a, c, g, or t
actagttctagatcgcgatctagaactagtcggacgcgtgggtccggacgcgtgggtcgacccacgcgnncgcnnacgcgtnggaccttggccatctgtccagaacctgctcccacctcaggcccaggccaaccgtgcactgctgcaatgggctctgagctggagacggcgatggagaccctcatcaacgtgttccacgcccactcgggcaaagagggggacaagtacaagctgagcaagaaggagctgaaagagctgctgcagacggagctctctggcttcctggatgcccagaaggatgtggatgctgtggacaaggtgatgaaggagctagacgagaatggagacgtaacaatttcttctgggagaacagttgagcagacagccacattgggcagcgcccttcctctccaccctcccagacctgcctcttccccctgcttccacctcaccccacttatccctctccataaccccacccctgcccaccccacccccacccccaccaagggcgcaagagtagcggtccaagcctgcaactcatctttcattaaaggcttctctctcaccag

SEQ ID NO: 418302 - DNA, 600 bp, Homo sapiens
  misc_feature (77)..(77): n is a, c, g, or t
ggagcttccggatagctgaacgcatggaggctgacaggacagtgaaggagaactcatccacgcgctgggcagtggtngcaccccaactccacaggaacggaagctcctccagatcttgccttgtgttatctttccatctggctatttatttgcatcctttttaaatgtaagtaagtgcttccatgagttccgtgagctcctccagcaaattaatcaaccccgaagagggtggggtcatggtaaccccaacttgaagccagctggtcagacattctggaagcccagactcgtgactggtgggaaggagggagcagttctgtggaactgattcctcaacctgtggtttctgaggctatttccaggtagatggtgtcacagttgaattaactggtggacacccggctgtgtccactgcagaactaattgcttacttggtgtgtgggaagaaacccctacatattttgtcacagaagtcttctgtattattatggtgtaagagaacaggaaaaatgcatgttgactgttttttccacactccagcctgggcaacagagtgagactccatctaaaacaaacacgcacacaccaccaccaccccac

SEQ ID NO: 418303 - DNA, 707 bp, Homo sapiens
ggagcttccggatagctgaacgcatggaggctgacaggacatgaagggatgtgtgaaaaggtaggaatgagtgggtaagcggaggaggacagtgctgctcacagaagttcatgagctaaatggtaaagtgagtcctaggcctttgatggatacgagggaaagaaggtatgttactccctcagccttacccataggagaagtaatgtgaactgattttaggagcaaacaggaaacttacccccaaatctcactctagtatactagaaatcctttacttttgtatcttttaactaaaaaaaaaaaaaaaaaaaataaaaacaaaaccatggttctgggcgcgccctgtgggcccttcagaagaacgttttttaaaaaccactgtctgtttgtggcgcgcgcgcggggcgcccatgtatggtgatagtgtgtgacaacgtgtctggcaatagcgcggtgttcccctgaaaggaacaccgtgggacagagcgacaaaacaagggtgtgcgtggggaatttctcctaccaccatatataaaagaaaagcgccccggggggggacaacaagcggagtgttgctctgtgaagacaaaaactctcccaaaatggggaattccgagagaggggactcaaaaacacggggggacctcttatcagcaaggagagagctcccaaggcagacagacctaagattattcaaaattaagccc

SEQ ID NO: 418304 - DNA, 2690 bp, Homo sapiens
  misc_feature (77)..(77): n is a, c, g, or t
ggagcttccggatagctgaacgcatggaggctgacaggacagtgaaggagaactcatccacgcgctgggcagtggtngcaccccaactccacaggaacggaagctcctccagatcttgccttgtgttatctttccatctggctatttatttgcatcctttttaaatgtaagtaagtgcttccatgagttccgtgagctcctccagcaaattaatcaaccccgaagagggtggggtcatggtaaccccaacttgaagccagctggtcagacattctggaagcccagactcgtgactggtgggaaggagggagcagttctgtggaactgattcctcaacctgtggtttctgaggctatttccaggtagatggtgtcacagttgaattaactggtggacacccggctgtgtccactgcagaactaattgcttacttggtgtgtgggaagaaacccctacatattttgtcacagaagtcttctgtattattatggtgtaagagaacaggaaaaatgcatgttgactgttttttccacactcccagtccacaaaagttttctccacttatgaacaaataatgtgtgtgtgtgtttttttgtttttttgtttttttgtttttcctgagacagggtctcactctgtcatccaggctggggtgcagtggtgtgatcatggctcactgcagcttcaatctcccaggtccaagtgatccttctacctcagcctcccaagtagctgggaccacaggtgtgtgccaccatacccagttaatttttaaattttttgtagagacagggtctccctatgttgcccaggctggttttgaacttctgaagcgatcctctcacctcagcctccaaaagtcctgggataacaggcatgagccactgtgcctggccatgaatacaaagaattttaacagacacaagatgcagatatgaaggaatagatgaatgaatagacgcgtgctggacaggatggagtgaagggatgtgtgaaaaggtaggaatgagtgggtaagcggaggaggacagtgctgctcacagaagttcatgagctaaatggtaaagtgagtcctaggcctttgatggatacgagggaaagaaggtatgttactccctcagccttacccataggagaagtaatgtgaactgattttaggagcaaacaggaaacttacccccaaatctcactctagtatactagaaatcctttacttttgtatcttttaactaagagggaaataaataacattgtcagaccctcatttcacagatgaggaaacttaggcctacaaagggcaagtggtttgccaaaatgtaacaagtgggtttggagctacaatgggactagagcttaggtctcttaattcccattccttgctcttttcaccacccaaagctgacactagaaggaatgactacggtgcagaatttccaaaccctaatttgaggaaattccccaaggggactttttcatgcaagctggagagcctcaaaaatgcaatgaatgcctaggaaggttctaagggccctaatattctaacctgaacactagaaagcagggcaagcagcatagtggggaagcaggggactgggacccccgtccctgagaatggaagtaataggcaagaagccaaggggcttcccaggacaagctaaaaaagagcagatccagactacaactacagaatcctgtaagattctgaaactttgtcacttcctttctaaggcttccttcctaagcctctctgtgaaactctttgaaaaggggtatgtgggctagcctgcaaggacagccagaagggagaaggatcacatccccctccgtggccaggctctgagagacagaaatccagtgaaggacagagcatggggctgagtgtctgtagcccactgcattgagggcaggagagctcagggcaggtctgagtcatcaccattttctgtgtgtttcttcctaataagtgaaataatgtgtagtgtctagcacggtgcctgacagctcacagaaaatccccaacttcccctcccccaccgccatgccttctaactctcggtgagatgaacatctctactgggaggggaagccattgagggaagaaatgctggcaccttgacatttggggaaagaaagggaaggaattgttttccaagtatctactttgtgccagaaatggtgttgggcaatttactgattgcctcatttaatcctttgacgtatcctaggagttaggtattctcagccccatttccagaaagcaaaccaaggtgaaaaagagttaataatttgttcaaagacatatggaaaagtgccaggcatggtggctcacgcctgtaatcctagcactttgggaggccaaggcgggcagatcacttgaggtcaggagttcaagaccagcctggccaacaaggcgaaatgctgtctcgactaaaaatacaaaaattagccagaaatcacttgaatctgggaggcggaagttgcagtaagccaagatcgtgccactgcactccagcctgggcaacagagtgagactccatctaaaaaaaaaaaaaaaaagtcatacagaaagggttggatgtggtggctcacacctgtaatcccagcactttgggaggccaaagtgagaggatcacgtgaagctaggagtttgagaccagcctaggcaacatagtgagatcccctctttaggg

SEQ ID NO: 418305 - DNA, 2267 bp, Homo sapiens
  misc_feature (77)..(77): n is a, c, g, or t
ggagcttccggatagctgaacgcatggaggctgacaggacagtgaaggagaactcatccacgcgctgggcagtggtngcaccccaactccacaggaacggaagctcctccagatcttgccttgtgttatctttccatctggctatttatttgcatcctttttaaatgtaagtaagtgcttccatgagttccgtgagctcctccagcaaattaatcaaccccgaagagggtggggtcatggtaaccccaacttgaagccagctggtcagacattctggaagcccagactcgtgactggtgggaaggagggagcagttctgtggaactgattcctcaacctgtggtttctgaggctatttccaggtagatggtgtcacagttgaattaactggtggacacccggctgtgtccactgcagaactaattgcttacttggtgtgtgggaagaaacccctacatattttgtcacagaagtcttctgtattattatggtgtaagagaacaggaaaaatgcatgttgactgttttttccacactcccagtccacaaaagttttctccacttatgaacaaataatgtgtgtgtgtgtttttttgtttttttgtttttttgtttttcctgagacagggtctcactctgtcatccaggctggggtgcagtggtgtgatcatggctcactgcagcttcaatctcccaggtccaagtgatccttctacctcagcctcccaagtagctgggaccacaggtgtgtgccaccatacccagttaatttttaaattttttgtagagacagggtctccctatgttgcccaggctggttttgaacttctgaagcgatcctctcacctcagcctccaaaagtcctgggataacaggcatgagccactgtgcctggccatgaatacaaagaattttaacagacacaagatgcagatatgaaggaatagatgaatgaatagacgcgtgctggacaggatggagtgaagggatgtgtgaaaaggtaggaatgagtgggtaagcggaggaggacagtgctgctcacagaagttcatgagctaaatggtaaagtgagtcctaggcctttgatggatacgagggaaagaaggtatgttactccctcagccttacccataggagaagtaatgtgaactgattttaggagcaaacaggaaacttacccccaaatctcactctagtatactagaaatcctttacttttgtatcttttaactaagagggaaataaataacattgtcagaccctcatttcacagatgaggaaacttaggcctacaaagggcaagtggtttgccaaaatgtaacaagtgggtttggagctacaatgggactagagcttaggtctcttaattcccattccttgctcttttcaccacccaaagctgacactagaaggaatgactacggtgcagaatttccaaaccctaatttgaggaaattccccaaggggactttttcatgcaagctggagagcctcaaaaatgcaatgaatgcctaggaaggttctaagggccctaatattctaacctgaacactagaaagcagggcaagcagcatagtggggaagcaggggactgggacccccgtccctgagaatggaagtaataggcaagaagccaaggggcttcccaggacaagctaaaaaagagcagatccagactacaactacagaatcctgtaagattctgaaactttgtcacttcctttctaaggcttccttcctaagcctctctgtgaaactctttgaaaaggggtatgtgggctagcctgcaaggacagccagaagggagaaggatcacatccccctccgtggccaggctctgagagacagaaatccagtgaaggacagagcatggggctgagtgtctgtagcccactgcattgagggcaggagagctcagggcaggtctgagtcatcaccattttctgtgtgtttcttcctaataagtgaaataatgtgtagtgtctagcacggtgcctgacagctcacagaaaatccccaacttcccctcccccaccgccatgccttctaactctcggtgagatgaacatctctactgggaggggaagccattgagggaagaaatgctggcaccttgacatttggggaaagaaagggaaggaattgttttccaagtatctactttgtgccagaaatggtgttgggcaatttactgattgcctcatttaatcctttgacgtatcctaggagttaggtattctcagcggctcaaacggtaccggctcattc

SEQ ID NO: 418306 - DNA, 821 bp, Homo sapiens
  misc_feature (77)..(77): n is a, c, g, or t
ggagcttccggatagctgaacgcatggaggctgacaggacagtgaaggagaactcatccacgcgctgggcagtggtngcaccccaactccacaggaacggaagctcctccagatcttgccttgtgttatctttccatctggctatttatttgcatcctttttaaatgtaagtaagtgcttccatgagttccgtgagctcctccagcaaattaatcaaccccgaagagggtggggtcatggtaaccccaacttgaagccagctggtcagacattctggaagcccagactcgtgactggtgggaaggagggagcagttctgtggaactgattcctcaacctgtggtttctgaggctatttccaggtagatggtgtcacagttgaattaactggtggacacccggctgtgtccactgcagaactaattgcttacttggtgtgtgggaagaaacccctacatattttgtcacagaagtcttctgtattattatggtgtaagagaacaggaaaaatgcatgttgactgttttttccacactcccagtccacaaaagttttctccacttatgaacaaataatgtgtgtgtgtgtttttttgtttttttgtttttttgtttttcctgagacagggtctcactctgtcatccaggctggggtgcagtggtgtgatcatggctcactgcagcttcaatctcccaggtccaagtgatccttctacctcagcctcccaagtagctgggaccacaggtgtgtgccaccatacccagttaatttttaaattttttgtagagacagggcaacatagtgagatcccctctttaggg

SEQ ID NO: 418307 - DNA, 812 bp, Homo sapiens
  misc_feature (77)..(77): n is a, c, g, or t
ggagcttccggatagctgaacgcatggaggctgacaggacagtgaaggagaactcatccacgcgctgggcagtggtngcaccccaactccacaggaacggaagctcctccagatcttgccttgtgttatctttccatctggctatttatttgcatcctttttaaatgtaagtaagtgcttccatgagttccgtgagctcctccagcaaattaatcaaccccgaagagggtggggtcatggtaaccccaacttgaagccagctggtcagacattctggaagcccagactcgtgactggtgggaaggagggagcagttctgtggaactgattcctcaacctgtggtttctgaggctatttccaggtagatggtgtcacagttgaattaactggtggacacccggctgtgtccactgcagaactaattgcttacttggtgtgtgggaagaaacccctacatattttgtcacagaagtcttctgtattattatggtgtaagagaacaggaaaaatgcatgttgactgttttttccacactcccagtccacaaaagttttctccacttatgaacaaataatgtgtgtgtgtgtttttttgtttttttgtttttttgtttttcctgagacagggttccagcctgggcaacagagtgagactccatctaaaaaaaaaaaaaaaaagtcatacagaaagggttggatgtggtggctcacacctgtaatcccagcactttgggaggccaaagtgagaggatcacgtgaagctaggagtttgagaccagcctaggcaacatagtgagatcccctctttaggg

SEQ ID NO: 418308 - DNA, 3157 bp, Homo sapiens
ccaacttgtccatcggtggatgaatgcaccaagaatctgcagcgagtatgacgaggaggaggtggactatgaggagtcggacagcgatgagtcctggaccacagagagtgccatcagctccgaagccatcctcagctccatgtgcatgaatggaggggaagagaagccttttgcctgcccagttcctggatgtaaaaagagatacaagaatgtgaatggcataaagtatcacgctaagaatggtcacagaacacagattcgtgtccgcaaaccattcaagtgtcgctgtgggaagagttacaagacagctcagggcctgcggcaccacacaatcaatttccatcccccggtgtcggctgagattatcaggaagatgcagcaataacatgctggtcataactgtgccaagaaatcctcaccagcagttgctgattttgaaaacagccaccttttttcaggggaagcattcagcaaccctttaaagaaaaagaattaaatgcatgctttaaattttttctgtaattttggaatgatgtatctttgtagagttaatgattttgtacatttgcacatgtaatcatcatacccattttcattactttgatataaggtgctaaacaaaaaaagctctaggttcttcagcacatttcccccaaaacaaaataaaattgagggcatgttgcatattgttgaattgtattgcggtggtatcaacctggggggaggaggggctggcactgagatttttttttcaagattgtaatgtgattgaagttttcaacacatcaactcacatatgttcaaaaccaaaataataccttcattatcaaactggttaccatgccttacataatggagttagtatttgtgagtagaaagactttaggtaatggaaatataaataagaaagaatgtttaacataatatgctaaaaatattttcatatttaaataacatacgtaaaggtgtgctttctgtgttttatattatcttgcaaatccttttgccctttaaaaagctgaaaatcttgccatctgacttactagtcattttagtgttataaatggcattttgtacaaaatagtctattcagttcgttcattcatttaacacacattgattgagtgcctgctgggtacaagggattcaatttatgcctattgatatctgcggaccaagatacccatttagtgaaatacttttttccctgaaatctgttagaaaagactttgaaatacttcagtgcaaagtgtgtgtgtgtgaagtttagttatatcttcatcttcagatgaagttttaaagcactttgtagttctctattgccaacaatttaatgtttatgtgttgccaattcttgcaaccactgccctaccaaacctgtgggttgcaaatcagaactaaaattctaagcacgtttcaaagatgaacacttttgttaagacccctattgcctcttcttcatgctcattttttactttttttaaaaggtacttttctcatcacattgtagagaggtctgcattctcattggaaatgtctgtttagctttataaaacaaacactttgctgaaataggaaaatgagccttattgacaattaagtgcttcttgcagcaggtggtcaaagaaaagcatgactaatacgacctattagagtaatctacatctggaccattccttaagtttttcctcaccgacagtaccatcatgccttgagtgttcttttctcccaagtgctattccttaaacacgagagtttaccagttgcctaataatgcaataaaaaatgctttgagatagctaactgcccataaaacaaactcaaattgcttataaagtttcttcccatgttcccatttgatgaaaagtcttacatcacatataactgggaagcaggggtccctcctcaattttcagacattttgaaaggatgacagttctgtttgttagatgagtaaacctctatattcataagttctaaaatccttcattatgagggattcaaagtatttataaaaacactgccctctaaaaatttcctcagatctgaagtatggtcttggtcctgaatatacagtgttatcctatgtttaaaagggtgatccagacatgagacgcaactagttggtgcataagaaggccccacttggctatttcatatctacctacaattgaccaaaaaaaattttttaggccagcaattattatttagcttcgctctttctagtgcaagaaactgcaggctggatcagtagttcaacagctaaacagtcataaaatagtcattgtgcatgttaaatttctttcaatgctttcaaagataaattccaatttctatttacttattcattgtgacagtattactaaacaggtaaggatgggaatattttgttatactgtgtatagtgaatgtattgtactgtgtctgtgaaaactgtgctttaaattatattttcatatgttttgttggggacagagcacattaagtctgaaagcaacagaggtttgttttagaactgaaggcaatttaatcaaaattcctgtcaagaaaagctgcttataaatgtaaatgaaatcacatttaaaataaactgcctctgacccaaaaataaatatggctctttattttccttagtgtccattatgaaaaccagtatcaagtttaccatggaaattaatatatccattcagttcctcattctaaggctgttcagttgatgcatgtagactttattcccttacatttttgcttagattagattaggctgtattacttttctgtcaataacaaattaagcttggacttacttacttaaactattttaaaataagttctaggctagtaagatgaacagtgtctactactataataaatattccaaggatacttttggattaacatggtccataattattaactccaacaaaaatgctcccattgttgaacatattttacctaagtatataacctatctggaagctgaaagtctccaaagctattgcttcctaggactgctgtgtcctaacagctggcatatgaatgcctcatactgggttgccctagactcaaaaaactttttaaaggattctaacaatatacaaactctgcttccacaaacaaatacaagtgacgacatgatatgctgcagttcacatat

SEQ ID NO: 418309 - DNA, 3008 bp, Homo sapiens
tccctcgcccgcccggcgctcgcagagccgacaccagggggctctcgatgtagcaccatgacaggcatcgccgccgcctccttcttctccaatacctgccgattcgggggctgcggactccacttccccaccctggccgacctcatcgagcacatcgaggacaaccacatcgatacagatccacgggttttagaaaaacaagaattacagcagccaacctatgttgccctgagttacataaatagattcatgacagatgctgcccgccgagagcaggagtccctaaagaagaagattcagccgaagctctcgctgactctgtccagctcagtgtctcgagggaatgtgtccactcccccacgccacagcagtggaagccttactccccccgtgaccccacccatcaccccctcctcttcattccgcagcagcactccgacaggcagcgagtatgacgaggaggaggtggactatgaggagtcggacagcgatgagtcctggaccacagagagtgccatcagctccgaagccatcctcagctccatgtgcatgaatggaggggaagagaagccttttgcctgcccagttcctggatgtaaaaagagatacaagaatgtgaatggcataaagtatcacgctaagaatggtcacagaacacagattcgtgtccgcaaaccattcaagtgtcgctgtgggaagagttacaagacagctcagggcctgcggcaccacacaatcaatttccatcccccggtgtcggctgagattatcaggaagatgcagcaataacatgctggtcataactgtgccaagaaatcctcaccagcagttgctgattttgaaaacagccaccttttttcaggggaagcattcagcaaccctttaaagaaaaagaattaaatgcatgctttaaattttttctgtaattttggaatgatgtatctttgtagagttaatgattttgtacatttgcacatgtaatcatcatacccattttcattactttgatataaggtgctaaacaaaaaaagctctaggttcttcagcacatttcccccaaaacaaaataaaattgagggcatgttgcatattgttgaattgtattgcggtggtatcaacctggggggaggaggggctggcactgagatttttttttcaagattgtaatgtgattgaagttttcaacacatcaactcacatatgttcaaaaccaaaataataccttcattatcaaactggttaccatgccttacataatggagttagtatttgtgagtagaaagactttaggtaatggaaatataaataagaaagaatgtttaacataatatgctaaaaatattttcatatttaaataacatacgtaaaggtgtgctttctgtgttttatattatcttgcaaatccttttgccctttaaaaagctgaaaatcttgccatctgacttactagtcattttagtgttataaatggcattttgtacaaaatagtctattcagttcgttcattcatttaacacacattgattgagtgcctgctgggtacaagggattcaatttatgcctattgatatctgcggaccaagatacccatttagtgaaatacttttttccctgaaatctgttagaaaagactttgaaatacttcagtgcaaagtgtgtgtgtgtgaagtttagttatatcttcatcttcagatgaagttttaaagcactttgtagttctctattgccaacaatttaatgtttatgtgttgccaattcttgcaaccactgccctaccaaacctgtgggttgcaaatcagaactaaaattctaagcacgtttcaaagatgaacacttttgttaagacccctattgcctcttcttcatgctcattttttactttttttaaaaggtacttttctcatcacattgtagagaggtctgcattctcattggaaatgtctgtttagctttataaaacaaacactttgctgaaataggaaaatgagccttattgacaattaagtgcttcttgcagcaggtggtcaaagaaaagcatgactaatacgacctattagagtaatctacatctggaccattccttaagtttttcctcaccgacagtaccatcatgccttgagtgttcttttctcccaagtgctattccttaaacacgagagtttaccagttgcctaataatgcaataaaaaatgctttgagatagctaactgcccataaaacaaactcaaattgcttataaagtttcttcccatgttcccatttgatgaaaagtcttacatcacatataactgggaagcaggggtccctcctcaattttcagacattttgaaaggatgacagttctgtttgttagatgagtaaacctctatattcataagttctaaaatccttcattatgagggattcaaagtatttataaaaacactgccctctaaaaatttcctcagatctgaagtatggtcttggtcctgaatatacagtgttatcctatgtttaaaagggtgatccagacatgagacgcaactagttggtgcataagaaggccccacttggctatttcatatctacctacaattgaccaaaaaaaattttttaggccagcaattattatttagcttcgctctttctagtgcaagaaactgcaggctggatcagtagttcaacagctaaacagtcataaaatagtcattgtgcatgttaaatttctttcaatgctttcaaagataaattccaatttctatttacttattcattgtgacagtattactaaacaggtaaggatgggaatattttgttatactgtgtatagtgaatgtattgtactgtgtctgtgaaaactgtgctttaaattatattttcatatgttttgttggggacagagcacattaagtctgaaagcaacagaggtttgttttagaactgaaggcaatttaatcaaaattcctgtcaagaaaagctgcttataaatgtaaatgaaatcacatttaaaataaactgcctctgaccca

SEQ ID NO: 418310 - DNA, 3561 bp, Homo sapiens
tccctcgcccgcccggcgctcgcagagccgacaccagggggctctcgatgtagcaccatgacaggcatcgccgccgcctccttcttctccaatacctgccgattcgggggctgcggactccacttccccaccctggccgacctcatcgagcacatcgaggacaaccacatcgatacagatccacgggttttagaaaaacaagaattacagcagccaacctatgttgccctgagttacataaatagattcatgacagatgctgcccgccgagagcaggagtccctaaagaagaagattcagccgaagctctcgctgactctgtccagctcagtgtctcgagggaatgtgtccactcccccacgccacagcagtggaagccttactccccccgtgaccccacccatcaccccctcctcttcattccgcagcagcactccgacaggcagcgagtatgacgaggaggaggtggactatgaggagtcggacagcgatgagtcctggaccacagagagtgccatcagctccgaagccatcctcagctccatgtgcatgaatggaggggaagagaagccttttgcctgcccagttcctggatgtaaaaagagatacaagaatgtgaatggcataaagtatcacgctaagaatggtcacagaacacagattcgtgtccgcaaaccattcaagtgtcgctgtgggaagagttacaagacagctcagggcctgcggcaccacacaatcaatttccatcccccggtgtcggctgagattatcaggaagatgcagcaataacatgctggtcataactgtgccaagaaatcctcaccagcagttgctgattttgaaaacagccaccttttttcaggggaagcattcagcaaccctttaaagaaaaagaattaaatgcatgctttaaattttttctgtaattttggaatgatgtatctttgtagagttaatgattttgtacatttgcacatgtaatcatcatacccattttcattactttgatataaggtgctaaacaaaaaaagctctaggttcttcagcacatttcccccaaaacaaaataaaattgagggcatgttgcatattgttgaattgtattgcggtggtatcaacctggggggaggaggggctggcactgagatttttttttcaagattgtaatgtgattgaagttttcaacacatcaactcacatatgttcaaaaccaaaataataccttcattatcaaactggttaccatgccttacataatggagttagtatttgtgagtagaaagactttaggtaatggaaatataaataagaaagaatgtttaacataatatgctaaaaatattttcatatttaaataacatacgtaaaggtgtgctttctgtgttttatattatcttgcaaatccttttgccctttaaaaagctgaaaatcttgccatctgacttactagtcattttagtgttataaatggcattttgtacaaaatagtctattcagttcgttcattcatttaacacacattgattgagtgcctgctgggtacaagggattcaatttatgcctattgatatctgcggaccaagatacccatttagtgaaatacttttttccctgaaatctgttagaaaagactttgaaatacttcagtgcaaagtgtgtgtgtgtgaagtttagttatatcttcatcttcagatgaagttttaaagcactttgtagttctctattgccaacaatttaatgtttatgtgttgccaattcttgcaaccactgccctaccaaacctgtgggttgcaaatcagaactaaaattctaagcacgtttcaaagatgaacacttttgttaagacccctattgcctcttcttcatgctcattttttactttttttaaaaggtacttttctcatcacattgtagagaggtctgcattctcattggaaatgtctgtttagctttataaaacaaacactttgctgaaataggaaaatgagccttattgacaattaagtgcttcttgcagcaggtggtcaaagaaaagcatgactaatacgacctattagagtaatctacatctggaccattccttaagtttttcctcaccgacagtaccatcatgccttgagtgttcttttctcccaagtgctattccttaaacacgagagtttaccagttgcctaataatgcaataaaaaatgctttgagatagctaactgcccataaaacaaactcaaattgcttataaagtttcttcccatgttcccatttgatgaaaagtcttacatcacatataactgggaagcaggggtccctcctcaattttcagacattttgaaaggatgacagttctgtttgttagatgagtaaacctctatattcataagttctaaaatccttcattatgagggattcaaagtatttataaaaacactgccctctaaaaatttcctcagatctgaagtatggtcttggtcctgaatatacagtgttatcctatgtttaaaagggtgatccagacatgagacgcaactagttggtgcataagaaggccccacttggctatttcatatctacctacaattgaccaaaaaaaattttttaggccagcaattattatttagcttcgctctttctagtgcaagaaactgcaggctggatcagtagttcaacagctaaacagtcataaaatagtcattgtgcatgttaaatttctttcaatgctttcaaagataaattccaatttctatttacttattcattgtgacagtattactaaacaggtaaggatgggaatattttgttatactgtgtatagtgaatgtattgtactgtgtctgtgaaaactgtgctttaaattatattttcatatgttttgttggggacagagcacattaagtctgaaagcaacagaggtttgttttagaactgaaggcaatttaatcaaaattcctgtcaagaaaagctgcttataaatgtaaatgaaatcacatttaaaataaactgcctctgacccaaaaataaatatggctctttattttccttagtgtccattatgaaaaccagtatcaagtttaccatggaaattaatatatccattcagttcctcattctaaggctgttcagttgatgcatgtagactttattcccttacatttttgcttagattagattaggctgtattacttttctgtcaataacaaattaagcttggacttacttacttaaactattttaaaataagttctaggctagtaagatgaacagtgtctactactataataaatattccaaggatacttttggattaacatggtccataattattaactccaacaaaaatgctcccattgttgaacatattttacctaagtatataacctatctggaagctgaaagtctccaaagctattgcttcctaggactgctgtgtcctaacagctggcatatgaatgcctcatactgggttgccctagactcaaaaaactttttaaaggattctaacaatatacaaactctgcttccacaaacaaatacaagtgacgacatgatatgctgcagttcacatat

SEQ ID NO: 418311 - DNA, 1088 bp, Homo sapiens
tccctcgcccgcccggcgctcgcagagccgacaccagggggctctcgatgtagcaccatgacaggcatcgccgccgcctccttcttctccaatacctgccgattcgggggctgcggactccacttccccaccctggccgacctcatcgagcacatcgaggacaaccacatcgatacagatccacgggttttagaaaaacaagaattacagcagccaacctatgttgccctgagttacataaatagattcatgacagatgctgcccgccgagagcaggagtccctaaagaagaagattcagccgaagctctcgctgactctgtccagctcagtgtctcgagggaatgtgtccactcccccacgccacagcagtggaagccttactccccccgtgaccccacccatcaccccctcctcttcattccgcagcagcactccgacaggcagcgagtatgacgaggaggaggtggactatgaggagtcggacagcgatgagtcctggaccacagagagtgccatcagctccgaagccatcctcagctccatgtgcatgaatggaggggaagagaagccttttgcctgcccagttcctggatgtaaaaagagatacaagaatgtgaatggcataaagtatcacgctaagaatggtcacagaacacagattcgtgtccgcaaaccattcaagtgtcgctgtgggaagagttacaagacagctcagggcctgcggcaccacacaatcaatttccatcccccggtgtcggctgagattatcaggaagatgcagcaataacatgctggtcataactgtgccaagaaatcctcaccagcagttgctgattttgaaaacagccaccttttttcaggggaagcattcagcaaccctttaaagaaaaagaattaaatgcatgctttaaattttttctgtaattttggaatgatgtatctttgtagagttaatgattttgtacatttgcacatgtaatcatcatacccattttcattactttgatataaggtgctaaacaaaaaaagctctaggttcttcagcacatttcccccaaaacaaaataaaattgagggcatgttgca

SEQ ID NO: 418312 - DNA, 3119 bp, Homo sapiens
gttttagggacagactgcttccgggtcgaagggcttgcttccggagagcgggaaggctaaaacgcggtagctaaactgcagccaactttggttgtgtgtggaaaaggctttagccatggacaggagtggctttggagagatatcatcccctgtaatccgggaggcagaggtgacacggactgcacggaaacagagtgctcagaaaagagttttacttcaggcatctcaagatgaaaattttggtaatactacaccaagaaaccaggttatccctcgaactcctagctcatttcgacagccttttaccccaacaagccgaagcttactaaggcagccagatatttcctgcattcttggaacaggagggaagtcgccccgacttacgcagtcttcagggttctttggaaatctctccatggttactaatctggatgacagtaactgggcagctgcattttcatcacagcgttccgggctgttcacaaacacagagccccacagtataacagaagatgtaactatcagtgctgttatgttacgtgaggatgatcctggagaagctgcatccatgagtatgttttctgatttcctgcagtcttttctgaagcactcttcgagtacagtttttgatcttgtggaagagtatgaaaacatctgtggtagtcaggtgaatatactgagtaaaatagtgagtcgagcaacacctggacttcaaaaattttcaaaaacagccagtatgctctggcttcttcaacaggagatggtcacatggaggctgctggcttctttgtatagagacagaatacagtctgcattagaagaggaaagtgtattcgcagttactgctgttaatgccagtgaaaaaacagttgtggaagcgttatttcagagggattcacttgttcgacaaagtcagctggtggtagattggttagagagtattgccaaagatgaaattggagaattttctgataatattgagttttatgcaaaatcagtatattgggaaaatactctgcataccttaaaacaacggcagctgacttcttacgttggaagtgttcgtccgcttgtcactgaattggaccctgatgctcccataagacagaaaatgccccttgatgatctggatagagaagatgaagttagattactcaaatatctctttactctaatccgtgctggaatgacagaagaggcacaacgactctgtaaacgctgtggtcaagcatggagagctgcaacacttgaaggctggaaactgtaccatgaccctaatgttaatggaggaacagaattagaacctgttgaagggaatccatatagacgcatttggaaaataagttgctggagaatggcagaagatgagctttttaatagatacgagagagcaatttatgcagctttaagtgggaatcttaagcagctgcttcctgtctgtgacacctgggaagacacagtttgggcctacttccgggtgatggtggacagtctggtagaacaggagatccagacatcagtagcaactctggatgaaactgaagaactccctagagaatatctgggagcaaactggacgttagaaaaggtttttgaggaacttcaagctactgacaaaaagagagttctggaagagaatcaagaacattatcatatagttcaaaagtttcttatcctgggagacattgatggtttgatggatgagtttagcaaatggctttccaaaagcagaaacaatctacctggacacctgcttcgctttatgactcaccttattttgtttttccgtactctgggactacagaccaaggaggaagtttctattgaagttttaaagacatacatacagcttttaataagagagaaacatacaaatcttatagcattttatacctgtcatttgcctcaagacctagctgttgcccagtatgcattatttttggaaagtgttacagaatttgaacagcgccaccattgcctggagttggctaaagaagcagatttggatgttgcaacaataacaaaaactgtagttgagaatattcgaaagaaagataatggtgaatttagtcatcatgacctggccccagccctagatactggcactactgaggaggatcgtttaaaaattgatgtaattgactggttggtatttgacccagcgcagagggcagaagcactgaaacaaggcaatgcaattatgagaaaattcttggcatcaaaaaagcacgaagctgcaaaagaagtatttgtgaaaattcctcaggattctatagcagaaatctataatcagtgcgaggaacaaggaatggaaagtccacttcctgctgaagatgataatgctatccgagaacatttgtgcatcagagcttatttggaagcccatgaaacctttaatgagtggtttaagcatatgaattcagttccacaaaaacctgctttgatacctcaaccaacttttactgagaaagtggctcatgaacacaaagaaaagaaatatgaaatggattttggtatttggaaagggcatttggatgccctaactgctgatgtgaaggagaaaatgtataacgtcttgttgtttgttgatggagggtggatggtggatgttagagaggatgccaaagaagaccatgaaagaacacatcaaatggtcttactgagaaagctttgtctgccaatgttgtgttttctgcttcatacgatattgcacagtactggtcagtatcaggaatgcctacagttagcagatatggtatcctctgagcgccacaaactgtacctggtattttctaaggaagagctaaggaagttgctgcagaagctcagagagtcctctctaatgctcctagaccagggacttgacccattagggtatgaaattcagttatagtttaatctttgtaatctcactaattttcatgataaatgaagtttttaataaaatatacttgttattagtaattttttcttttgcattaccatgtaaaatttagacatttgaattttgtacttttcagaatattatcgtgacactttcaacatgtagggatatcagcgtttctctgtgtgcttgttaataaaactatataaaaattaaaattttctgtttttacaaa

SEQ ID NO: 418313 - DNA, 879 bp, Homo sapiens
  misc_feature (25)..(25): n is a, c, g, or t
taggctaggtacgaggctgggtgtngggcttgcttccggagagcgggaaggctaaaacgcggtagctaaactgcagccaactttggttgtgtgtggaaaaggctttagccatggacaggagtggctttggagagatatcatcccctgtaatccgggaggcagaggtgacacggactgcacggaaacagagtgctcagaaaagagttttacttcaggcatctcaagatgaaaattttggtaatactacaccaagaaaccaggttatccctcgaactcctagctcatttcgacagccttttaccccaacaagccgaagcttactaaggcagccagatatttcctgcattcttggaacaggagggaagtcgccccgacttacgcagtcttcagggttctttggaaatctctccatggttactaatctggatgacagtaactgggcagctgcattttcatcacagcgttccgggctgttcacaaacacagagccccacagtataacagaagatgtaactatcagtgctgttatgttacgtgaggatgatcctggagaagctgcatccatgagtatgttttctgatttcctgcagtcttttctgaagcactcttcgagtacagtttttgatcttgtggaagagtatgaaaacatctgtggtagtcaggtgaatatactgagtaaaatagtgagtcgagcaacacctggacttcaaaaattttcaaaaacagccagtatgctctggcttcttcaacaggagatggtcacatggaggctgctggcttctttgtatagagaccgaatacaggctgcttagaagaggaaagtgtttcgaggtatggggaatgccggggaaaaacgggggggagggatcaggggtcacg

SEQ ID NO: 418314 - DNA, 589 bp, Homo sapiens
tccagttttaatgttttaatgtttgtacttttttcccaaaatgtgtgtatatttgtaagcagttagaaatatatagactgactctgagaattcaccttgaaattcctgaaccactctaatttactaggctctggctacataaatcttaaagaggcatttcttcttatatgaagctaatcagatcgattaggtaactaagttcatacttgtctacttgtctttgttctcattcttatttctctttttaaaaatcaggtattttctaaggaagagctaaggaagttgctgcagaagctcagagagtcctctctaatgctcctagaccagggacttgacccattagggtatgaaattcagttatagtttaatctttgtaatctcactaattttcatgataaatgaagtttttaataaaatatacttgttattagtaattttttcttttgcattaccatgtaaaatttagacatttgaattttgtacttttcagaatattatcgtgacactttcaacatgtagggatatcagcgtttctctgtgtgcttgttaataaaactatataaaaattaaaattttctgtttttacaaa

SEQ ID NO: 418315 - DNA, 3287 bp, Homo sapiens
  misc_feature (138)..(139): n is a, c, g, or t
agcgggctgttcgctcctggggtgggcggggtaggtagcgcggcgttcgaaatgctaagtgaccagcctgagatcacaaagccagtcagtgaagatactgggatctcagcccagactttctgattacaagtgccagcnnagattctgagttccctctatgatctgggtactgtgctagccgcctacaacaaagatcagttattcaagatccttcccctcggggaattagttgtgtaatggagacaaccaagcagtgtaaagtggagtggctttggagagatatcatcccctgtaatccgggaggcagaggtgacacggactgcacggaaacagagtgctcagaaaagagttttacttcaggcatctcaagatgaaaattttggtaatactacaccaagaaaccaggttatccctcgaactcctagctcatttcgacagccttgttctttctaccaaccttttgtttatagttaccccaacaagccgaagcttactaaggcagccagatatttcctgcattcttggaacaggagggaagtcgccccgacttacgcagtcttcagggttctttggaaatctctccatggttactaatctggatgacagtaactgggcagctgcattttcatcacagcgttccgggctgttcacaaacacagagccccacagtataacagaagatgtaactatcagtgctgttatgttacgtgaggatgatcctggagaagctgcatccatgagtatgttttctgatttcctgcagtcttttctgaagcactcttcgagtacagtttttgatcttgtggaagagtatgaaaacatctgtggtagtcaggtgaatatactgagtaaaatagtgagtcgagcaacacctggacttcaaaaattttcaaaaacagccagtatgctctggcttcttcaacaggagatggtcacatggaggctgctggcttctttgtatagagacagaatacagtctgcattagaagaggaaagtgtattcgcagttactgctgttaatgccagtgaaaaaacagttgtggaagcgttatttcagagggattcacttgttcgacaaagtcagctggtggtagattggttagagagtattgccaaagatgaaattggagaattttctgataatattgagttttatgcaaaatcagtatattgggaaaatactctgcataccttaaaacaacggcagctgacttcttacgttggaagtgttcgtccgcttgtcactgaattggaccctgatgctcccataagacagaaaatgccccttgatgatctggatagagaagatgaagttagattactcaaatatctctttactctaatccgtgctggaatgacagaagaggcacaacgactctgtaaacgctgtggtcaagcatggagagctgcaacacttgaaggctggaaactgtaccatgaccctaatgttaatggaggaacagaattagaacctgttgaagggaatccatatagacgcatttggaaaataagttgctggagaatggcagaagatgagctttttaatagatacgagagagcaatttatgcagctttaagtgggaatcttaagcagctgcttcctgtctgtgacacctgggaagacacagtttgggcctacttccgggtgatggtggacagtctggtagaacaggagatccagacatcagtagcaactctggatgaaactgaagaactccctagagaatatctgggagcaaactggacgttagaaaaggtttttgaggaacttcaagctactgacaaaaagagagttctggaagagaatcaagaacattatcatatagttcaaaagtttcttatcctgggagacattgatggtttgatggatgagtttagcaaatggctttccaaaagcagaaacaatctacctggacacctgcttcgctttatgactcaccttattttgtttttccgtactctgggactacagaccaaggaggaagtttctattgaagttttaaagacatacatacagcttttaataagagagaaacatacaaatcttatagcattttatacctgtcatttgcctcaagacctagctgttgcccagtatgcattatttttggaaagtgttacagaatttgaacagcgccaccattgcctggagttggctaaagaagcagatttggatgttgcaacaataacaaaaactgtagttgagaatattcgaaagaaagataatggtgaatttagtcatcatgacctggccccagccctagatactggcactactgaggaggatcgtttaaaaattgatgtaattgactggttggtatttgacccagcgcagagggcagaagcactgaaacaaggcaatgcaattatgagaaaattcttggcatcaaaaaagcacgaagctgcaaaagaagtatttgtgaaaattcctcaggattctatagcagaaatctataatcagtgcgaggaacaaggaatggaaagtccacttcctgctgaagatgataatgctatccgagaacatttgtgcatcagagcttatttggaagcccatgaaacctttaatgagtggtttaagcatatgaattcagttccacaaaaacctgctttgatacctcaaccaacttttactgagaaagtggctcatgaacacaaagaaaagaaatatgaaatggattttggtatttggaaagggcatttggatgccctaactgctgatgtgaaggagaaaatgtataacgtcttgttgtttgttgatggagggtggatggtggatgttagagaggatgccaaagaagaccatgaaagaacacatcaaatggtcttactgagaaagctttgtctgccaatgttgtgttttctgcttcatacgatattgcacagtactggtcagtatcaggaatgcctacagttagcagatatggtatcctctgagcgccacaaactgtacctggtattttctaaggaagagctaaggaagttgctgcagaagctcagagagtcctctctaatgctcctagaccagggacttgacccattagggtatgaaattcagttatagtttaatctttgtaatctcactaattttcatgataaatgaagtttttaataaaatatacttgttattagtaattttttcttttgcattaccatgtaaaatttagacatttgaattttgtacttttcagaatattatcgtgacactttcaacatgtagggatatcagcgtttctctgtgtgcttgttaataaaactatataaaaattaaaattttctgtttttacaaa

SEQ ID NO: 418316 - DNA, 3259 bp, Homo sapiens
  misc_feature (138)..(139): n is a, c, g, or t
agcgggctgttcgctcctggggtgggcggggtaggtagcgcggcgttcgaaatgctaagtgaccagcctgagatcacaaagccagtcagtgaagatactgggatctcagcccagactttctgattacaagtgccagcnnagattctgagttccctctatgatctgggtactgtgctagccgcctacaacaaagatcagttattcaagatccttcccctcggggaattagttgtgtaatggagacaaccaagcagtgtaaagtggagtggctttggagagatatcatcccctgtaatccgggaggcagaggtgacacggactgcacggaaacagagtgctcagaaaagagttttacttcaggcatctcaagatgaaaattttggtaatactacaccaagaaaccaggttatccctcgaactcctagctcatttcgacagccttttaccccaacaagccgaagcttactaaggcagccagatatttcctgcattcttggaacaggagggaagtcgccccgacttacgcagtcttcagggttctttggaaatctctccatggttactaatctggatgacagtaactgggcagctgcattttcatcacagcgttccgggctgttcacaaacacagagccccacagtataacagaagatgtaactatcagtgctgttatgttacgtgaggatgatcctggagaagctgcatccatgagtatgttttctgatttcctgcagtcttttctgaagcactcttcgagtacagtttttgatcttgtggaagagtatgaaaacatctgtggtagtcaggtgaatatactgagtaaaatagtgagtcgagcaacacctggacttcaaaaattttcaaaaacagccagtatgctctggcttcttcaacaggagatggtcacatggaggctgctggcttctttgtatagagacagaatacagtctgcattagaagaggaaagtgtattcgcagttactgctgttaatgccagtgaaaaaacagttgtggaagcgttatttcagagggattcacttgttcgacaaagtcagctggtggtagattggttagagagtattgccaaagatgaaattggagaattttctgataatattgagttttatgcaaaatcagtatattgggaaaatactctgcataccttaaaacaacggcagctgacttcttacgttggaagtgttcgtccgcttgtcactgaattggaccctgatgctcccataagacagaaaatgccccttgatgatctggatagagaagatgaagttagattactcaaatatctctttactctaatccgtgctggaatgacagaagaggcacaacgactctgtaaacgctgtggtcaagcatggagagctgcaacacttgaaggctggaaactgtaccatgaccctaatgttaatggaggaacagaattagaacctgttgaagggaatccatatagacgcatttggaaaataagttgctggagaatggcagaagatgagctttttaatagatacgagagagcaatttatgcagctttaagtgggaatcttaagcagctgcttcctgtctgtgacacctgggaagacacagtttgggcctacttccgggtgatggtggacagtctggtagaacaggagatccagacatcagtagcaactctggatgaaactgaagaactccctagagaatatctgggagcaaactggacgttagaaaaggtttttgaggaacttcaagctactgacaaaaagagagttctggaagagaatcaagaacattatcatatagttcaaaagtttcttatcctgggagacattgatggtttgatggatgagtttagcaaatggctttccaaaagcagaaacaatctacctggacacctgcttcgctttatgactcaccttattttgtttttccgtactctgggactacagaccaaggaggaagtttctattgaagttttaaagacatacatacagcttttaataagagagaaacatacaaatcttatagcattttatacctgtcatttgcctcaagacctagctgttgcccagtatgcattatttttggaaagtgttacagaatttgaacagcgccaccattgcctggagttggctaaagaagcagatttggatgttgcaacaataacaaaaactgtagttgagaatattcgaaagaaagataatggtgaatttagtcatcatgacctggccccagccctagatactggcactactgaggaggatcgtttaaaaattgatgtaattgactggttggtatttgacccagcgcagagggcagaagcactgaaacaaggcaatgcaattatgagaaaattcttggcatcaaaaaagcacgaagctgcaaaagaagtatttgtgaaaattcctcaggattctatagcagaaatctataatcagtgcgaggaacaaggaatggaaagtccacttcctgctgaagatgataatgctatccgagaacatttgtgcatcagagcttatttggaagcccatgaaacctttaatgagtggtttaagcatatgaattcagttccacaaaaacctgctttgatacctcaaccaacttttactgagaaagtggctcatgaacacaaagaaaagaaatatgaaatggattttggtatttggaaagggcatttggatgccctaactgctgatgtgaaggagaaaatgtataacgtcttgttgtttgttgatggagggtggatggtggatgttagagaggatgccaaagaagaccatgaaagaacacatcaaatggtcttactgagaaagctttgtctgccaatgttgtgttttctgcttcatacgatattgcacagtactggtcagtatcaggaatgcctacagttagcagatatggtatcctctgagcgccacaaactgtacctggtattttctaaggaagagctaaggaagttgctgcagaagctcagagagtcctctctaatgctcctagaccagggacttgacccattagggtatgaaattcagttatagtttaatctttgtaatctcactaattttcatgataaatgaagtttttaataaaatatacttgttattagtaattttttcttttgcattaccatgtaaaatttagacatttgaattttgtacttttcagaatattatcgtgacactttcaacatgtagggatatcagcgtttctctgtgtgcttgttaataaaactatataaaaattaaaattttctgtttttacaaa

SEQ ID NO: 418317 - DNA, 2217 bp, Homo sapiens
  misc_feature (28)..(28): n is a, c, g, or t
aagaggcatgagtacgagcctggggttnatatcggccgaggccaagagatgaaattggagaattttctgataatattgagttttatgcaaaatcagtatattgggaaaatactctgcataccttaaaacaacggcagctgacttcttacgttggaagtgttcgtccgcttgtcactgaattggaccctgatgctcccataagacagaaaatgccccttgatgatctggatagagaagatgaagttagattactcaaatatctctttactctaatccgtgctggaatgacagaagaggcacaacgactctgtaaacgctgtggtcaagcatggagagctgcaacacttgaaggctggaaactgtaccatgaccctaatgttaatggaggaacagaattagaacctgttgaagggaatccatatagacgcatttggaaaataagttgctggagaatggcagaagatgagctttttaatagatacgagagagcaatttatgcagctttaagtgggaatcttaagcagctgcttcctgtctgtgacacctgggaagacacagtttgggcctacttccgggtgatggtggacagtctggtagaacaggagatccagacatcagtagcaactctggatgaaactgaagaactccctagagaatatctgggagcaaactggacgttagaaaaggtttttgaggaacttcaagctactgacaaaaagagagttctggaagagaatcaagaacattatcatatagttcaaaagtttcttatcctgggagacattgatggtttgatggatgagtttagcaaatggctttccaaaagcagaaacaatctacctggacacctgcttcgctttatgactcaccttattttgtttttccgtactctgggactacagaccaaggaggaagtttctattgaagttttaaagacatacatacagcttttaataagagagaaacatacaaatcttatagcattttatacctgtcatttgcctcaagacctagctgttgcccagtatgcattatttttggaaagtgttacagaatttgaacagcgccaccattgcctggagttggctaaagaagcagatttggatgttgcaacaataacaaaaactgtagttgagaatattcgaaagaaagataatggtgaatttagtcatcatgacctggccccagccctagatactggcactactgaggaggatcgtttaaaaattgatgtaattgactggttggtatttgacccagcgcagagggcagaagcactgaaacaaggcaatgcaattatgagaaaattcttggcatcaaaaaagcacgaagctgcaaaagaagtatttgtgaaaattcctcaggattctatagcagaaatctataatcagtgcgaggaacaaggaatggaaagtccacttcctgctgaagatgataatgctatccgagaacatttgtgcatcagagcttatttggaagcccatgaaacctttaatgagtggtttaagcatatgaattcagttccacaaaaacctgctttgatacctcaaccaacttttactgagaaagtggctcatgaacacaaagaaaagaaatatgaaatggattttggtatttggaaagggcatttggatgccctaactgctgatgtgaaggagaaaatgtataacgtcttgttgtttgttgatggagggtggatggtggatgttagagaggatgccaaagaagaccatgaaagaacacatcaaatggtcttactgagaaagctttgtctgccaatgttgtgttttctgcttcatacgatattgcacagtactggtcagtatcaggaatgcctacagttagcagatatggtatcctctgagcgccacaaactgtacctggtattttctaaggaagagctaaggaagttgctgcagaagctcagagagtcctctctaatgctcctagaccagggacttgacccattagggtatgaaattcagttatagtttaatctttgtaatctcactaattttcatgataaatgaagtttttaataaaatatacttgttattagtaattttttcttttgcattaccatgtaaaatttagacatttgaattttgtacttttcagaatattatcgtgacactttcaacatgtagggatatcagcgtttctctgtgtgcttgttaataaaactatataaaaattaaaattttctgtttttacaaa

SEQ ID NO: 418318 - DNA, 3049 bp, Homo sapiens
gttttagggacagactgcttccgggtcgaagggcttgcttccggagagcgggaaggctaaaacgcggtagctaaactgcagccaactttggttgtgtgtggaaaaggctttagccatggacaggagtggctttggagagatatcatcccctgtaatccgggaggcagaggtgacacggactgcacggaaacagagtgctcagaaaagagttttacttcaggcatctcaagatgaaaattttggtaatactacaccaagaaaccaggttatccctcgaactcctagctcatttcgacagccttttaccccaacaagccgaagcttactaaggcagccagatatttcctgcattcttggaacaggagggaagtcgccccgacttacgcagtcttcagggttctttggaaatctctccatggttactaatctggatgacagtaactgggcagctgcattttcatcacagcgttccgggctgttcacaaacacagagccccacagtataacagaagatgtaactatcagtgctgttatgttacgtgaggatgatcctggagaagctgcatccatgagtatgttttctgatttcctgcagtcttttctgaagcactcttcgagtacagtttttgatcttgtggaagagtatgaaaacatctgtggtagtcaggtgaatatactgagtaaaatagtgagtcgagcaacacctggacttcaaaaattttcaaaaacagccagtatgctctggcttcttcaacaggagatggtcacatggaggctgctggcttctttgtatagagacagaatacagtctgcattagaagaggaaagtgtattcgcagttactgctgttaatgccagtgaaaaaacagttgtggaagcgttatttcagagggattcacttgttcgacaaagtcagctggtggtagattggttagagagtattgccaaagatgaaattggagaattttctgataatattgagttttatgcaaaatcagtatattgggaaaatactctgcataccttaaaacaacggcagctgacttcttacgttggaagtgttcgtccgcttgtcactgaattggaccctgatgctcccataagacagaaaatgccccttgatgatctggatagagaagatgaagttagattactcaaatatctctttactctaatccgtgctggaatgacagaagaggcacaacgactctgtaaacgctgtggtcaagcatggagagctgcaacacttgaaggctggaaactgtaccatgaccctaatgttaatggaggaacagaattagaacctgttgaagggaatccatatagacgcatttggaaaataagttgctggagaatggcagaagatgagctttttaatagatacgagagagcaatttatgcagctttaagtgggaatcttaagcagctgcttcctgtctgtgacacctgggaagacacagtttgggcctacttccgggtgatggtggacagtctggtagaacaggagatccagacatcagtagcaactctggatgaaactgaagaactccctagagaatatctgggagcaaactggacgttagaaaaggtttttgaggaacttcaagctactgacaaaaaggtttgatggatgagtttagcaaatggctttccaaaagcagaaacaatctacctggacacctgcttcgctttatgactcaccttattttgtttttccgtactctgggactacagaccaaggaggaagtttctattgaagttttaaagacatacatacagcttttaataagagagaaacatacaaatcttatagcattttatacctgtcatttgcctcaagacctagctgttgcccagtatgcattatttttggaaagtgttacagaatttgaacagcgccaccattgcctggagttggctaaagaagcagatttggatgttgcaacaataacaaaaactgtagttgagaatattcgaaagaaagataatggtgaatttagtcatcatgacctggccccagccctagatactggcactactgaggaggatcgtttaaaaattgatgtaattgactggttggtatttgacccagcgcagagggcagaagcactgaaacaaggcaatgcaattatgagaaaattcttggcatcaaaaaagcacgaagctgcaaaagaagtatttgtgaaaattcctcaggattctatagcagaaatctataatcagtgcgaggaacaaggaatggaaagtccacttcctgctgaagatgataatgctatccgagaacatttgtgcatcagagcttatttggaagcccatgaaacctttaatgagtggtttaagcatatgaattcagttccacaaaaacctgctttgatacctcaaccaacttttactgagaaagtggctcatgaacacaaagaaaagaaatatgaaatggattttggtatttggaaagggcatttggatgccctaactgctgatgtgaaggagaaaatgtataacgtcttgttgtttgttgatggagggtggatggtggatgttagagaggatgccaaagaagaccatgaaagaacacatcaaatggtcttactgagaaagctttgtctgccaatgttgtgttttctgcttcatacgatattgcacagtactggtcagtatcaggaatgcctacagttagcagatatggtatcctctgagcgccacaaactgtacctggtattttctaaggaagagctaaggaagttgctgcagaagctcagagagtcctctctaatgctcctagaccagggacttgacccattagggtatgaaattcagttatagtttaatctttgtaatctcactaattttcatgataaatgaagtttttaataaaatatacttgttattagtaattttttcttttgcattaccatgtaaaatttagacatttgaattttgtacttttcagaatattatcgtgacactttcaacatgtagggatatcagcgtttctctgtgtgcttgttaataaaactatataaaaattaaaattttctgtttttacaaa

SEQ ID NO: 418319 - DNA, 2086 bp, Homo sapiens
aaaggagctcagacaatttctgtccagcaacatgacagcaagctcaggctggaccctgatgctcccataagacagaaaatgccccttgatgatctggatagagaagatgaagttagattactcaaatatctctttactctaatccgtgctggaatgacagaagaggcacaacgactctgtaaacgctgtggtcaagcatggagagctgcaacacttgaaggctggaaactgtaccatgaccctaatgttaatggaggaacagaattagaacctgttgaagggaatccatatagacgcatttggaaaataagttgctggagaatggcagaagatgagctttttaatagatacgagagagcaatttatgcagctttaagtgggaatcttaagcagctgcttcctgtctgtgacacctgggaagacacagtttgggcctacttccgggtgatggtggacagtctggtagaacaggagatccagacatcagtagcaactctggatgaaactgaagaactccctagagaatatctgggagcaaactggacgttagaaaaggtttttgaggaacttcaagctactgacaaaaagagagttctggaagagaatcaagaacattatcatatagttcaaaagtttcttatcctgggagacattgatggtttgatggatgagtttagcaaatggctttccaaaagcagaaacaatctacctggacacctgcttcgctttatgactcaccttattttgtttttccgtactctgggactacagaccaaggaggaagtttctattgaagttttaaagacatacatacagcttttaataagagagaaacatacaaatcttatagcattttatacctgtcatttgcctcaagacctagctgttgcccagtatgcattatttttggaaagtgttacagaatttgaacagcgccaccattgcctggagttggctaaagaagcagatttggatgttgcaacaataacaaaaactgtagttgagaatattcgaaagaaagataatggtgaatttagtcatcatgacctggccccagccctagatactggcactactgaggaggatcgtttaaaaattgatgtaattgactggttggtatttgacccagcgcagagggcagaagcactgaaacaaggcaatgcaattatgagaaaattcttggcatcaaaaaagcacgaagctgcaaaagaagtatttgtgaaaattcctcaggattctatagcagaaatctataatcagtgcgaggaacaaggaatggaaagtccacttcctgctgaagatgataatgctatccgagaacatttgtgcatcagagcttatttggaagcccatgaaacctttaatgagtggtttaagcatatgaattcagttccacaaaaacctgctttgatacctcaaccaacttttactgagaaagtggctcatgaacacaaagaaaagaaatatgaaatggattttggtatttggaaagggcatttggatgccctaactgctgatgtgaaggagaaaatgtataacgtcttgttgtttgttgatggagggtggatggtggatgttagagaggatgccaaagaagaccatgaaagaacacatcaaatggtcttactgagaaagctttgtctgccaatgttgtgttttctgcttcatacgatattgcacagtactggtcagtatcaggaatgcctacagttagcagatatggtatcctctgagcgccacaaactgtacctggtattttctaaggaagagctaaggaagttgctgcagaagctcagagagtcctctctaatgctcctagaccagggacttgacccattagggtatgaaattcagttatagtttaatctttgtaatctcactaattttcatgataaatgaagtttttaataaaatatacttgttattagtaattttttcttttgcattaccatgtaaaatttagacatttgaattttgtacttttcagaatattatcgtgacactttcaacatgtagggatatcagcgtttctctgtgtgcttgttaataaaactatataaaaattaaaattttctgtttttacaaa

SEQ ID NO: 418320 - DNA, 3164 bp, Homo sapiens
gttttagggacagactgcttccgggtcgaagggcttgcttccggagagcgggaaggctaaaacgcggtagctaaactgcagccaactttggttgtgtgtggaaaaggctttagccatggacaggagtggctttggagagatatcatcccctgtaatccgggaggcagaggtgacacggactgcacggaaacagagtgctcagaaaagagttttacttcaggcatctcaagatgaaaattttggtaatactacaccaagaaaccaggttatccctcgaactcctagctcatttcgacagccttttaccccaacaagccgaagcttactaaggcagccagatatttcctgcattcttggaacaggagggaagtcgccccgacttacgcagtcttcagggttctttggaaatctctccatggttactaatctggatgacagtaactgggcagctgcattttcatcacagcgttccgggctgttcacaaacacagagccccacagtataacagaagatgtaactatcagtgctgttatgttacgtgaggatgatcctggagaagctgcatccatgagtatgttttctgatttcctgcagtcttttctgaagcactcttcgagtacagtttttgatcttgtggaagagtatgaaaacatctgtggtagtcaggtgaatatactgagtaaaatagtgagtcgagcaacacctggacttcaaaaattttcaaaaacagccagtatgctctggcttcttcaacaggagatggtcacatggaggctgctggcttctttgtatagagacagaatacagtctgcattagaagaggaaagtgtattcgcagttactgctgttaatgccagtgaaaaaacagttgtggaagcgttatttcagagggattcacttgttcgacaaagtcagctggtggtagattggttagagagtattgccaaagatgaaattggagaattttctgataatattgagttttatgcaaaatcagtatattgggaaaatactctgcataccttaaaacaacggcagctgacttcttacgttggaagtgttcgtccgcttgtcactgaattggaccctgatgctcccataagacagaaaatgccccttgatgatctggatagagaagatgaagttagattactcaaatatctctttactctaatccgtgctggaatgacagaagaggcacaacgactctgtaaacgctgtggtcaagcatggagagctgcaacacttgaaggctggaaactgtaccatgaccctaatgttaatggaggaacagaattagaacctgttgaagggaatccatatagacgcatttggaaaataagttgctggagaatggcagaagatgagctttttaatagatacgagagagcaatttatgcagctttaagtgggaatcttaagcagctgcttcctgtctgtgacacctgggaagacacagtttgggcctacttccgggtgatggtggacagtctggtagaacaggagatccagacatcagtagcaactctggatgaaactgaagaactccctagagaatatctgggagcaaactggacgttagaaaaggtttttgaggaacttcaagctactgacaaaaagagagttctggaagagaatcaagaacattatcatatagttcaaaagtttcttatcctgggagacattgatggtttgatggatgagtttagcaaatggctttccaaaagcagaaacaatctacctggacacctgcttcgctttatgactcaccttattttgtttttccgtactctgggactacagaccaaggaggaagtttctattgaagttttaaagacatacatacagcttttaataagagagaaacatacaaatcttatagcattttatacctgtcatttgcctcaagacctagctgttgcccagtatgcattatttttggaaagtgttacagaatttgaacagcgccaccattgcctggagttggctaaagaagcagatttggatgttgcaacaataacaaaaactgtagttgagaatattcgaaagaaagataatggtgaatttagtcatcatgacctggccccagccctagatactggcactactgaggaggatcgtttaaaaattgatgtaattgactggttggtatttgacccagcgcagagggcagaagcactgaaacaaggcaatgcaattatgagaaaattcttggcatcaaaaaagcacgaagctgcaaaagaagtatttgtgaaaattcctcaggattctatagcagaaatctataatcagtgcgaggaacaaggaatggaaagtccacttcctgctgaagatgataatgctatccgagaacatttgtgcatcagagcttatttggaagcccatgaaacctttaatgagtggtttaagcatatgaattcagttccacaaaaacctgctttgatacctcaaccaacttttactgagaaagtggctcatgaacacaaagaaaagaaatatgaaatggattttggtatttggaaagggcatttggatgccctaactgctgatgtgaaggagaaaatgtataacgtcttgttgtttgttgatggagggtggatggtggatgttagagaggatgccaaagaagaccatgaaagaacacatcaaatggtcttactgagaaagctttgtctgccaatgttgtgttttctgcttcatacgatattgcacagtactggtcagtatcaggaatgcctacagttagcagatatggtatcctctgagcgccacaaactgtacctggtattttctaaggaagagctaaggaagttgctgcagaagctcagagagtcctctctaatgctcctagaccagggacttgacccattagggtatgaaattcagttatagtttaatctttgtaatctcactaattttcatgataaatgaagtttttaataaaatatacttgttattagtaattttttcttttgcattaccatgtaaaatttagacatttgaattttgtacttttcagaatattatcgtgacactttcaacatgtagggatatcagcgtttctctgtgtgcttgttaataaaactatataaaaattaaaattttctgtttttacaaaaaatagacaacaaacaacaaagataacaaaaacaaaaagaattat

SEQ ID NO: 418321 - DNA, 2633 bp, Homo sapiens
gttttagggacagactgcttccgggtcgaagggcttgcttccggagagcgggaaggctaaaacgcggtagctaaactgcagccaactttggttgtgtgtggaaaaggctttagccatggacaggagtggctttggagagatatcatcccctgtaatccgggaggcagaggtgacacggactgcacggaaacagagtgctcagaaaagagttttacttcaggcatctcaagatgaaaattttggtaatactacaccaagaaaccaggttatccctcgaactcctagctcatttcgacagccttttaccccaacaagccgaagcttactaaggcagccagatatttcctgcattcttggaacaggagggaagtcgccccgacttacgcagtcttcagggttctttggaaatctctccatggttactaatctggatgacagtaactgggcagctgcattttcatcacagcgttccgggctgttcacaaacacagagccccacagtataacagaagatgtaactatcagtgctgttatgttacgtgaggatgatcctggagaagctgcatccatgagtatgttttctgatttcctgcagtcttttctgaagcactcttcgagtacagtttttgatcttgtggaagagtatgaaaacatctgtggtagtcaggtgaatatactgagtaaaatagtgagtcgagcaacacctggacttcaaaaattttcaaaaacagccagtatgctctggcttcttcaacaggagatggtcacatggaggctgctggcttctttgtatagagacagaatacagtctgcattagaagaggaaagtgtattcgcagttactgctgttaatgccagtgaaaaaacagttgtggaagcgttatttcagagggattcacttgttcgacaaagtcagctggtggtagattggttagagagtattgccaaagatgaaattggagaattttctgataatattgagttttatgcaaaatcagtatattgggaaaatactctgcataccttaaaacaacggcagctgacttcttacgttggaagtgttcgtccgcttgtcactgaattggaccctgatgctcccataagacagaaaatgccccttgatgatctggatagagaagatgaagttagattactcaaatatctctttactctaatccgtgctggaatgacagaagaggcacaacgactctgtaaacgctgtggtcaagcatggagagctgcaacacttgaaggctggaaactgtaccatgaccctaatgttaatggaggaacagaattagaacctgttgaagggaatccatatagacgcatttggaaaataagttgctggagaatggcagaagatgagctttttaatagatacgagagagcaatttatgcagctttaagtgggaatcttaagcagctgcttcctgtctgtgacacctgggaagacacagtttgggcctacttccgggtgatggtggacagtctggtagaacaggagatccagacatcagtagcaactctggatgaaactgaagaactccctagagaatatctgggagcaaactggacgttagaaaaggtttttgaggaacttcaagctactgacaaaaagagagttctggaagagaatcaagaacattatcatatagttcaaaagtttcttatcctgggagacattgatggtttgatggatgagtttagcaaatggctttccaaaagcagaaacaatctacctggacacctgcttcgctttatgactcaccttattttgtttttccgtactctgggactacagaccaaggaggaagtttctattgaagttttaaagacatacatacagcttttaataagagagaaacatacaaatcttatagcattttatacctgtcatttgcctcaagacctagctgttgcccagtatgcattatttttggaaagtgttacagaatttgaacagcgccaccattgcctggagttggctaaagaagcagatttggatgttgcaacaataacaaaaactgtagttgagaatattcgaaagaaagataatggtgaatttagtcatcatgacctggccccagccctagatactggcactactgaggaggatcgtttaaaaattgatgtaattgactggttggtatttgacccagcgcagagggcagaagcactgaaacaaggcaatgcaattatgagaaaattcttggcatcaaaaaagcacgaagctgcaaaagaagtatttgtgaaaattcctcaggattctatagcagaaatctataatcagtgcgaggaacaaggaatggaaagtccacttcctgctgaagatgataatgctatccgagaacatttgtgcatcagagcttatttggaagcccatgaaacctttaatgagtggtttaagcatatgaattcagttccacaaaaacctgctttgatacctcaaccaacttttactgagaaagtggctcatgaacacaaagaaaagaaatatgaaatggattttggtatttggaaagggcatttggatgccctaactgctgatgtgaaggagaaaatgtataacgtcttgttgtttgttgatggaggtgctacggttcaaggaggtcgcggggtgcgagctcgat

SEQ ID NO: 418322 - DNA, 390 bp, Homo sapiens
gttttagggacagactgcttccgggtcgaagggcttgcttccggagagcgggaaggctaaaacgcggtagctaaactgcagccaactttggttgtgtgtggaaaaggctttagccatggacaggagtggctttggagagatatcatcccctgtaatccgggaggcagaggtgacacggactgcacggaaacagagtgctcagaaaagagttttacttcaggcatctcaagatgaaaattttggtaatactacaccaagaaaccaggttatccctcgaactcctagctcatttcgacagccttgtaagattttttgcttttaaagcatttaataataacggtaattataatagcaactaacatttattgtaacataattagtatagtattt

SEQ ID NO: 418323 - DNA, 346 bp, Homo sapiens
ctggaataaaatttgattttaaatattcaaagcatccactagagttggatctgctttcacctgatatttggcatttaaatgttttactttttcctctagatttcagcatttattatttcatcacactgaagttcttccttgttattaccccactagatctttcactaaagtttaaaaactatcaagtgaataggttcagtctagaagagtttgcaagactccacattatgaggaaaattgacatactaagaaaaacaatatttcaaatttgtttatattcattgtgttttaggagctttttaatagatacgagagagcaatttatgcagctttaagtgggaatctt

SEQ ID NO: 418324 - DNA, 2124 bp, Homo sapiens
gagagcttcatacctggtacgctgctgattggatgaaggacagagggcttccgggagttttcaagccgactgtgtggcagctgagaagagttttgcacgtggatcgccgttcgggtgggcgagatggagacagcccccaagccgggcaaggatgtcccgcccaagaaagacaaacttcagaccaagagaaagaaaccgcggcgatactgggaggaagagaccgttccgaccacagccggagcctctccagggcctcctcgtaacaagaagaatcgggagctccgtcctcagagaccaaaaaatgcttacatcttaaagaagtctcggatctctaagaagcctcaggtcccgaagaaaccccgagaatggaagaacccggagtcccagcgcggcttgtccggggcccaagatccattcccaggccccgcccccgtccctgtggaagtggtccagaagttctgtcgcattgacaaatcccgaaagctaccacattctaaagccaaaactcgaagccgacttgaggtggctgaagctgaggaagaggaaacaagtatcaaagctgctcgttctgagctgctgcttgctgaagaacctgggtttctggaaggggaggatggggaagacacagcaaagatatgccaggctgacattgtggaggctgtggacattgcaagtgcagccaagcactttgacttgaatctgcggcagtttggaccctacagactaaactactctcgaactggaagacacctggcttttggagggcgccgaggtcatgtggctgcccttgattgggtaacaaagaagcttatgtgcgagatcaacgtcatggaggcggtgcgggacatccggtttctccattctgaggcactgcttgctgttgctcagaaccgctggctccacatctatgacaatcagggcattgagctccactgtatccgccgctgtgaccgagtaacacggcttgagttcctgcccttccacttcctcctggctacagcttcagaaacagggtttctaacctacctggatgtgtcagtggggaagattgtggcagctctgaatgctcgagctgggcggctcgatgttatgagtcagaacccttacaatgccgtcatccatctcggacacagcaatggtactgtgtctttatggagtccagctatgaaggagccactggcaaagattctctgtcatcgtggtggggtccgggctgtggcagtagattctacaggcacgtacatggccacctctggcctagaccaccagctgaagatctttgacttgcgagggacgtaccagcctctgagcactcggaccctgccccatggagcagggcacctggccttctcccagaggggactgctggtggcgggaatgggtgacgttgtcaacatctgggcagggcagggcaaggccagcccaccctcccttgaacagccctacctcacccaccggctctcaggccctgtgcatggccttcagttctgcccctttgaagatgtgctgggggtggggcacactgggggcatcaccagcatgctggtccctggggccggtgagcccaacttcgatggcctggagagtaatccatacagaagccggaagcagcgccaggagtgggaggtgaaggccctgctagagaaggtacctgcagagcttatttgtctggacccacgagccctggccgaggtggatgtcatctccctggagcagggaaagaaggagcagatagagaggctgggctatgacccgcaggctaaggctcccttccagccaaagccaaagcagaagggccgcagctccacggcaagcctggtgaagaggaagaggaaggtcatggatgaggaacacagggacaaggtccggcagagccttcagcagcagcatcataaggaggcgaaggccaagcccacgggggcccggccatctgccctggacagatttgtgcgctgagccagactccagggttgcctgggaacagtctctccccaagatcacctgtagggaaatgagtgttccctggaacaaggaggtgggggcagtgtggccccttccccaactgggggtggacagctgtctcctggggtgggttggtattaaagaggaaagcgattttttgga

SEQ ID NO: 418325 - DNA, 2249 bp, Homo sapiens
gagagcttcatacctggtacgctgctgattggatgaaggacagagggcttccgggagttttcaagccgactgtgtggcagctgagaagagttttgcacgtggatcgccgttcgggtgggcgagatggagacagcccccaagccgggcaaggatgtcccgcccaagaaagacaaacttcagaccaagagaaagaaaccgcggcgatactgggaggaagagaccgttccgaccacagccggagcctctccagggcctcctcgtaacaagaagaatcgggagctccgtcctcagagaccaaaaaatgcttacatcttaaagaagtctcggatctctaagaagcctcaggtcccgaagaaaccccgagaatggaagaacccggagtcccagcgcggcttgtccggggcccaagatccattcccaggccccgcccccgtccctgtggaagtggtccagaagttctgtcgcattgacaaatcccgaaagctaccacattctaaagccaaaactcgaagccgacttgaggtggctgaagctgaggaagaggaaacaagtatcaaagctgctcgttctgagctgctgcttgctgaagaacctgggtttctggaaggggaggatggggaagacacagcaaagatatgccaggctgacattgtggaggctgtggacattgcaagtgcagccaagcactttgacttgaatctgcggcagtttggaccctacagactaaactactctcgaactggaagacacctggcttttggagggcgccgaggtcatgtggctgcccttgattgggtaacaaagaagcttatgtgcgagatcaacgtcatggaggcggtgcgggacatccggtttctccattctgaggcactgcttgctgttgctcagaaccgctggctccacatctatgacaatcagggcattgagctccactgtatccgccgctgtgaccgagtaacacggcttgagttcctgcccttccacttcctcctggctacagcttcagaaacagggtttctaacctacctggatgtgtcagtggggaagattgtggcagctctgaatgctcgagctgggcggctcgatgttatgagtcagaacccttacaatgccgtcatccatctcggacacagcaatggtactgtgtctttatggagtccagctatgaaggagccactggcaaagattctctgtcatcgtggtggggtccgggctgtggcagtagattctacaggcacgtacatggccacctctggcctagaccaccagctgaagatctttgacttgcgagggacgtaccagcctctgagcactcggaccctgccccatggagcagggcacctggccttctcccagaggggactgctggtggcgggaatgggtgacgttgtcaacatctgggcagggcagggcaaggccagcccaccctcccttgaacagccctacctcacccaccggctctcaggccctgtgcatggccttcagttctgcccctttgaagatgtgctgggggtggggcacactgggggcatcaccagcatgctggtccctggggccggtgagcccaacttcgatggcctggagagtaatccatacagaagccggaagcagcgccaggagtgggaggtgaaggccctgctagagaaggtacctgcagagcttatttgtctggacccacgagccctggccgaggtggatgtcatctccctggagcagggaaagaaggagcagatagagaggctgggctatgacccgcaggctaaggctcccttccagccaaagccaaagcagaagggccgcagctccacggcaagcctggtgaagaggaagaggaaggtcatggatgaggaacacagggtaaatgagcattggcatgggccgggccttccacaggctgcaccctcctgcttgtgcctctgcccttgtcagcctgccacttctcactctgtgcctgtgtcctccccgtctccggtccccaggacgacaaggtccggcagagccttcagcagcagcatcataaggaggcgaaggccaagcccacgggggcccggccatctgccctggacagatttgtgcgctgagccagactccagggttgcctgggaacagtctctccccaagatcacctgtagggaaatgagtgttccctggaacaaggaggtgggggcagtgtggccccttccccaactgggggtggacagctgtctcctggggtgggttggtattaaagaggaaagcgattttttgga

SEQ ID NO: 418326 - DNA, 1983 bp, Homo sapiens
gagagcttcatacctggtacgctgctgattggatgaaggacagagggcttccgggagttttcaagccgactgtgtggcagctgagaagagttttgcacgtggatcgccgttcgggtgggcgagatggagacagcccccaagccgggcaaggatgtcccgcccaagaaagacaaacttcagaccaagagaaagaaaccgcggcgatactgggaggaagagaccgttccgaccacagccggagcctctccagggcctcctcgtaacaagaagaatcgggagctccgtcctcagagaccaaaaaatgcttacatcttaaagaagtctcggatctctaagaagcctcaggtcccgaagaaaccccgagaatggaagaacccggagtcccagcgcggcttgtccggggcccaagatccattcccaggccccgcccccgtccctgtggaagtggtccagaagttctgtcgcattgacaaatcccgaaagctaccacattctaaagccaaaactcgaagccgacttgaggtggctgaagctgaggaagaggaaacaagtatcaaagctgctcgttctgagctgctgcttgctgaagaacctgggtttctggaaggggaggatggggaagacacagcaaagatatgccaggctgacattgtggaggctgtggacattgcaagtgcagccaagcactttgacttgaatctgcggcagtttggaccctacagactaaactactctcgaactggaagacacctggcttttggagggcgccgaggtcatgtggctgcccttgattgggtaacaaagaagcttatgtgcgagatcaacgtcatggaggcggtgcgggacatccggtttctccattctgaggcactgcttgctgttgctcagaaccgctggctccacatctatgacaatcagggcattgagctccactgtatccgccgctgtgaccgagtaacacggcttgagttcctgcccttccacttcctcctggctacagcttcagaaacagggtttctaacctacctggatgtgtcagtggggaagattgtggcagctctgaatgctcgagctgggcggctcgatgttatgagtcagaacccttacaatgccgtcatccatctcggacacagcaatggtactgtgtctttatggagtccagctatgaaggagccactggcaaagattctctgtcatcgtggtggggtccgggctgtggcagtagattctacaggcacgtacatggccacctctggcctagaccaccagctgaagatctttgacttgcgagggacgtaccagcctctgagcactcggaccctgccccatggagcagggcacctggccttctcccagaggggactgctggtggcgggaatgggtgacgttgtcaacatctgggcagggcagggggccggtgagcccaacttcgatggcctggagagtaatccatacagaagccggaagcagcgccaggagtgggaggtgaaggccctgctagagaaggtacctgcagagcttatttgtctggacccacgagccctggccgaggtggatgtcatctccctggagcagggaaagaaggagcagatagagaggctgggctatgacccgcaggctaaggctcccttccagccaaagccaaagcagaagggccgcagctccacggcaagcctggtgaagaggaagaggaaggtcatggatgaggaacacagggacaaggtccggcagagccttcagcagcagcatcataaggaggcgaaggccaagcccacgggggcccggccatctgccctggacagatttgtgcgctgagccagactccagggttgcctgggaacagtctctccccaagatcacctgtagggaaatgagtgttccctggaacaaggaggtgggggcagtgtggccccttccccaactgggggtggacagctgtctcctggggtgggttggtattaaagaggaaagcgattttttgga

SEQ ID NO: 418327 - DNA, 2010 bp, Homo sapiens
gagagcttcatacctggtacgctgctgattggatgaaggacagagggcttccgggagttttcaagccgactgtgtggcagctgagaagagttttgcacgtggatcgccgttcgggtgggcgagatggagacagcccccaagccgggcaaggatgtcccgcccaagaaagacaaacttcagaccaagagaaagaaaccgcggcgatactgggaggaagagaccgttccgaccacagccggagcctctccagggcctcctcgtaacaagaagaatcgggagctccgtcctcagagaccaaaaaatgcttacatcttaaagaagtctcggatctctaagaagcctcaggtcccgaagaaaccccgagaatggaagaacccggagtcccagcgcggcttgtccggggcccaagatccattcccaggccccgcccccgtccctgtggaagtggtccagaagttctgtcgcattgacaaatcccgaaagctaccacattctaaagccaaaactcgaagccgacttgaggtggctgaagctgaggaagaggaaacaagtatcaaagctgctcgttctgagctgctgcttgctgaagaacctgggtttctggaaggggaggatggggaagacacagcaaagatatgccaggctgacattgtggaggctgtggacattgcaagtgcagccaagcactttgacttgaatctgcggcagtttggaccctacagactaaactactctcgaactggaagacacctggcttttggagggcgccgaggtcatgtggctgcccttgattgggtaacaaagaagcttatgtgcgagatcaacgtcatggaggcggtgcgggacatccggtttctccattctgaggcactgcttgctgttgctcagaaccgctggctccacatctatgacaatcagggcattgagctccactgtatccgccgctgtgaccgagtaacacggcttgagttcctgcccttccacttcctcctggctacagcttcagaaacagggtttctaacctacctggatgtgtcagtggggaagattgtggcagctctgaatgctcgagctgggcggctcgatgttatgagtcagaacccttacaatgccgtcatccatctcggacacagcaatggtactgtgtctttatggagtccagctatgaaggagccactggcaaagattctctgtcatcgtggtggggtccgggctgtggcagtagattctacaggcacgtacatggccacctctggcctagaccaccagctgaagatctttgacttgcgagggacgtaccagcctctgagcactcggaccctgccccatggagcagggcacctggccttctcccagaggggactgctggtggcgggaatgggtgacgttgtcaacatctgggcagggcagggcaaggccagcccaccctcccttgaacagccctacctcacccaccggctctcaggccctgtgcatggccttcagttctgcccctttgaagatgtgctgggggtggggcacactgggggcatcaccagcatgctggtccctggggccggtgagcccaacttcgatggcctggagagtaatccatacagaagccggaagcagcgccaggagtgggaggtgaaggccctgctagagaaggtacctgcagagcttatttgtctggacccacgagccctggccgaggtggatgtcatctccctggagcagggaaagaaggagcagatagagaggctggacaaggtccggcagagccttcagcagcagcatcataaggaggcgaaggccaagcccacgggggcccggccatctgccctggacagatttgtgcgctgagccagactccagggttgcctgggaacagtctctccccaagatcacctgtagggaaatgagtgttccctggaacaaggaggtgggggcagtgtggccccttccccaactgggggtggacagctgtctcctggggtgggttggtattaaagaggaaagcgattttttgga

SEQ ID NO: 418328 - DNA, 2174 bp, Homo sapiens
gagagcttcatacctggtacgctgctgattggatgaaggacagagggcttccgggagttttcaagccgactgtgtggcagctgagaagagttttgcacgtggatcgccgttcgggtgggcgagatggagacagcccccaagccgggcaaggatgtcccgcccaagaaagacaaacttcagaccaagagaaagaaaccgcggcgatactgggaggaagagaccgttccgaccacagccggagcctctccagggcctcctcgtaacaagaagaatcgggagctccgtcctcagagaccaaaaaatgcttacatcttaaagaagtctcggatctctaagaagcctcaggtcccgaagaaaccccgagaatggaagaacccggagtcccagcgcggcttgtccggggcccaagatccattcccaggccccgcccccgtccctgtggaagtggtccagaagttctgtcgcattgacaaatcccgaaaggtgaggtccagccggagagttgggaagtgctggaggcagggagtgtctggctaccacattctaaagccaaaactcgaagccgacttgaggtggctgaagctgaggaagaggaaacaagtatcaaagctgctcgttctgagctgctgcttgctgaagaacctgggtttctggaaggggaggatggggaagacacagcaaagatatgccaggctgacattgtggaggctgtggacattgcaagtgcagccaagcactttgacttgaatctgcggcagtttggaccctacagactaaactactctcgaactggaagacacctggcttttggagggcgccgaggtcatgtggctgcccttgattgggtaacaaagaagcttatgtgcgagatcaacgtcatggaggcggtgcgggacatccggtttctccattctgaggcactgcttgctgttgctcagaaccgctggctccacatctatgacaatcagggcattgagctccactgtatccgccgctgtgaccgagtaacacggcttgagttcctgcccttccacttcctcctggctacagcttcagaaacagggtttctaacctacctggatgtgtcagtggggaagattgtggcagctctgaatgctcgagctgggcggctcgatgttatgagtcagaacccttacaatgccgtcatccatctcggacacagcaatggtactgtgtctttatggagtccagctatgaaggagccactggcaaagattctctgtcatcgtggtggggtccgggctgtggcagtagattctacaggcacgtacatggccacctctggcctagaccaccagctgaagatctttgacttgcgagggacgtaccagcctctgagcactcggaccctgccccatggagcagggcacctggccttctcccagaggggactgctggtggcgggaatgggtgacgttgtcaacatctgggcagggcagggcaaggccagcccaccctcccttgaacagccctacctcacccaccggctctcaggccctgtgcatggccttcagttctgcccctttgaagatgtgctgggggtggggcacactgggggcatcaccagcatgctggtccctggggccggtgagcccaacttcgatggcctggagagtaatccatacagaagccggaagcagcgccaggagtgggaggtgaaggccctgctagagaaggtacctgcagagcttatttgtctggacccacgagccctggccgaggtggatgtcatctccctggagcagggaaagaaggagcagatagagaggctgggctatgacccgcaggctaaggctcccttccagccaaagccaaagcagaagggccgcagctccacggcaagcctggtgaagaggaagaggaaggtcatggatgaggaacacagggacaaggtccggcagagccttcagcagcagcatcataaggaggcgaaggccaagcccacgggggcccggccatctgccctggacagatttgtgcgctgagccagactccagggttgcctgggaacagtctctccccaagatcacctgtagggaaatgagtgttccctggaacaaggaggtgggggcagtgtggccccttccccaactgggggtggacagctgtctcctggggtgggttggtattaaagaggaaagcgattttttgga

SEQ ID NO: 418329 - DNA, 1798 bp, Homo sapiens
gagagcttcatacctggtacgctgctgattggatgaaggacagagggcttccgggagttttcaagccgactgtgtggcagctgagaagagttttgcacgtggatcgccgttcgggtgggcgagatggagacagcccccaagccgggcaaggatgtcccgcccaagaaagacaaacttcagaccaagagaaagaaaccgcggcgatactgggaggaagagaccgttccgaccacagccggagcctctccagggcctcctcgtaacaagaagaatcgggagctccgtcctcagagaccaaaaaatgcttacatcttaaagaagtctcggatctctaagaagcctcaggtcccgaagaaaccccgagaatggaagaacccggagtcccagcgcggcttgtccggggcccaagatccattcccaggccccgcccccgtccctgtggaagtggtccagaagttctgtcgcattgacaaatcccgaaagctaccacattctaaagccaaaactcgaagccgacttgaggtggctgaagctgaggaagaggaaacaagtatcaaagctgctcgttctgagctgctgcttgctgaagaacctgggtttctggaaggggaggatggggaagacacagcaaagatatgccaggctgacattgtggaggctgtggacattgcaagtgcagccaagcactttgacttgaatctgcggcagtttggaccctacagactaaactactctcgaactggaagacacctggcttttggagggcgccgaggtcatgtggctgcccttgattgggtaacaaagaagcttatgtgcgagatcaacgtcatggaggcggtgcgggacatccggtttctccattctgaggcactgcttgctgttgctcagaaccgctggctccacatctatgacaatcagggcattgagctccactgtatccgccgctgtgaccgagtaacacggcttgagttcctgcccttccacttcctcctggctacagcttcagaaacagggtttctaacctacctggatgtgtcagtggggaagattgtggcagctctgaatgctcgagctgggcggctcgatgttatgagtcagaacccttacaatgccgtcatccatctcggacacagcaatggtactgtgtctttatggagtccagctatgaaggagccactggcaaagattctctgtcatcgtggtggggtccgggctgtggcagtagattctacaggcacgtaatgataggtgatatgtgaggtgcttgaaatgctgtgaagcacttacgactgtgtcactgtgacttgtagtgtacaaagcagcagtgcaaatcaggatgctgtagtcgctgtcgtgaccactcggctgtgtgttgtagagcaaaagcagccacagtattaagtaaatagtgtggccccgttccaataaaactttatttgttggatattggaatttgaatttcatacggttttcacagtctcaaaatattcttttgattttttttcaaccacttaaaaatgtaaaaaccattcttggcttgtgggctatacagaactagatgatgggccaggtttggcccatgggcagtagtttaccaagccttggtttaaagccctcatataagctgttgtagacattaagatgagttaaggcatatagtttagcacagcgcttagcaaaatagggagcgctgtgttcatcattgtcattcaagatgatcgttctctccaggtctggctgatgtgaggggtggaggtggtgtctgctttggatttctgctgttcctgagggagtatct

SEQ ID NO: 418330 - DNA, 1584 bp, Homo sapiens
gagagcttcatacctggtacgctgctgattggatgaaggacagagggcttccgggagttttcaagccgactgtgtggcagctgagaagagttttgcacgtggatcgccgttcgggtgggcgagatggagacagcccccaagccgggcaaggatgtcccgcccaagaaagacaaacttcagaccaagagaaagaaaccgcggcgatactgggaggaagagaccgttccgaccacagccggagcctctccagggcctcctcgtaacaagaagaatcgggagctccgtcctcagagaccaaaaaatgcttacatgtttctccattctgaggcactgcttgctgttgctcagaaccgctggctccacatctatgacaatcagggcattgagctccactgtatccgccgctgtgaccgagtaacacggcttgagttcctgcccttccacttcctcctggctacagcttcagaaacagggtttctaacctacctggatgtgtcagtggggaagattgtggcagctctgaatgctcgagctgggcggctcgatgttatgagtcagaacccttacaatgccgtcatccatctcggacacagcaatggtactgtgtctttatggagtccagctatgaaggagccactggcaaagattctctgtcatcgtggtggggtccgggctgtggcagtagattctacaggcacgtacatggccacctctggcctagaccaccagctgaagatctttgacttgcgagggacgtaccagcctctgagcactcggaccctgccccatggagcagggcacctggccttctcccagaggggactgctggtggcgggaatgggtgacgttgtcaacatctgggcagggcagggcaaggccagcccaccctcccttgaacagccctacctcacccaccggctctcaggccctgtgcatggccttcagttctgcccctttgaagatgtgctgggggtggggcacactgggggcatcaccagcatgctggtccctggggccggtgagcccaacttcgatggcctggagagtaatccatacagaagccggaagcagcgccaggagtgggaggtgaaggccctgctagagaaggtacctgcagagcttatttgtctggacccacgagccctggccgaggtggatgtcatctccctggagcagggaaagaaggagcagatagagaggctgggctatgacccgcaggctaaggctcccttccagccaaagccaaagcagaagggccgcagctccacggcaagcctggtgaagaggaagaggaaggtcatggatgaggaacacagggacaaggtccggcagagccttcagcagcagcatcataaggaggcgaaggccaagcccacgggggcccggccatctgccctggacagatttgtgcgctgagccagactccagggttgcctgggaacagtctctccccaagatcacctgtagggaaatgagtgttccctggaacaaggaggtgggggcagtgtggccccttccccaactgggggtggacagctgtctcctggggtgggttggtattaaagaggaaagcgattttttgga

SEQ ID NO: 418331 - DNA, 1098 bp, Homo sapiens
gagagcttcatacctggtacgctgctgattggatgaaggacagagggcttccgggagttttcaagccgactgtgtggcagctgagaagagttttgcacgtggatcgccgttcgggtgggcgagatggagacagcccccaagccgggcaaggatgtcccgcccaagaaagacaaacttcagaccaagagaaagaaaccgcggcgatactgggaggaagagaccgttccgaccacagccggagcctctccagggcctcctcgtaacaagaagaatcgggagctccgtcctcagagaccaaaaaatgcttacatcttaaagaagtctcggatctctaagaagcctcaggtcccgaagaaaccccgagaatggaagaacccggagtcccagcgcggcttgtccggggcccaagatccattcccaggccccgcccccgtccctgtggaagtggtccagaagttctgtcgcattgacaaatcccgaaagctaccacattctaaagccaaaactcgaagccgacttgaggtggctgaagctgaggaagaggaaacaagtatcaaagctgctcgttctgagctgctgcttgctgaagaacctgggtttctggaaggggaggatggggaagacacacctgccacttctcactctgtgcctgtgtcctccccgtctccggtccccaggacgacaaggtccggcagagccttcagcagcagcatcataaggaggcgaaggccaagcccacgggggcccggccatctgccctggacagatttgtgcgctgagccagactccagggttgcctgggaacagtctctccccaagatcacctgtagggaaatgagtgttccctggaacaaggaggtgggggcagtgtggccccttccccaactgggggtggacagctgtctcctggggtgggttggtattaaagaggaaagcgattttttggagataatgtgtctggatcatcttgtggacctgttcccctcccccttgccaagcatgaggccattctaggatcggaggggtcagtgtcctgcctctacccccaccccataccttgtggctgctgtggccttagctttgccttttaggggcctt

SEQ ID NO: 418332 - DNA, 550 bp, Homo sapiens
gagagcttcatacctggtacgctgctgattggatgaaggacagagggcttccgggagttttcaagccgactgtgtggcagctgagaagagttttgcacgtggatcgccgttcgggtgggcgagatggagacagcccccaagccgggcaaggatgtcccgcccaagaaagacaaacttcagaccaagagaaagaaaccgcggcgatactgggaggaagagaccgttccgaccacagccggagcctctccagggcctcctcgtaacaagaagaatcgggagctccgtcctcagagaccaaaaaatgcttacatcttaaagaagtctcggatctctaagaagcctcagggcccggccatctgccctggacagatttgtgcgctgagccagactccagggttgcctgggaacagtctctccccaagatcacctgtagggaaatgagtgttccctggaacaaggaggtgggggcagtgtggccccttccccaactgggggtggacagctgtctcctggggtgggttggtattaaagaggaaagcgattttttgga

SEQ ID NO: 418333 - DNA, 2275 bp, Homo sapiens
gagagcttcatacctggtacgctgctgattggatgaaggacagagggcttccgggagttttcaagccgactgtgtggcagctgagaagagttttgcacgtggatcgccgttcgggtgggcgagatggagacagcccccaagccgggcaaggatgtcccgcccaagaaagacaaacttcagaccaagagaaagaaaccgcggcgatactgggaggaagagaccgttccgaccacagccggagcctctccagggcctcctcgtaacaagaagaatcgggagctccgtcctcagagaccaaaaaatgcttacatcttaaagaagtctcggatctctaagaagcctcaggtcccgaagaaaccccgagaatggaagaacccggagtcccagcgcggcttgtccggggcccaagatccattcccaggccccgcccccgtccctgtggaagtggtccagaagttctgtcgcattgacaaatcccgaaagctaccacattctaaagccaaaactcgaagccgacttgaggtggctgaagctgaggaagaggaaacaagtatcaaagctgctcgttctgagctgctgcttgctgaagaacctgggtttctggaaggggaggatggggaagacacagcaaagatatgccaggctgacattgtggaggctgtggacattgcaagtgcagccaagcactttgacttgaatctgcggcagtttggaccctacagactaaactactctcgaactggaagacacctggcttttggagggcgccgaggtcatgtggctgcccttgattgggtaacaaagaagcttatgtgcgagatcaacgtcatggaggcggtgcgggacatccggtttctccattctgaggcactgcttgctgttgctcagaaccgctggctccacatctatgacaatcagggcattgagctccactgtatccgccgctgtgaccgagtaacacggcttgagttcctgcccttccacttcctcctggctacagcttcagaaacagggtttctaacctacctggatgtgtcagtggggaagattgtggcagctctgaatgctcgagctgggcggctcgatgttatgagtcagaacccttacaatgccgtcatccatctcggacacagcaatggtactgtgtctttatggagtccagctatgaaggagccactggcaaagattctctgtcatcgtggtggggtccgggctgtggcagtagattctacaggcacgtacatggccacctctggcctagaccaccagctgaagatctttgacttgcgagggacgtaccagcctctgagcactcggaccctgccccatggagcagggcacctggccttctcccagaggggactgctggtggcgggaatgggtgacgttgtcaacatctgggcagggcagggcaaggccagcccaccctcccttgaacagccctacctcacccaccggctctcaggccctgtgcatggccttcagttctgcccctttgaagatgtgctgggggtggggcacactgggggcatcaccagcatgctggtccctggggccggtgagcccaacttcgatggcctggagagtaatccatacagaagccggaagcagcgccaggagtgggaggtgaaggccctgctagagaaggtacctgcagagcttatttgtctggacccacgagccctggccgaggtggatgtcatctccctggagcagggaaagaaggagcagatagagaggctgggctatgacccgcaggctaaggctcccttccagccaaagccaaagcagaagggccgcagctccacggcaagcctggtgaagaggaagaggaaggtcatggatgaggaacacagggacaaggtccggcagagccttcagcagcagcatcataaggaggcgaaggccaagcccacgggggcccggccatctgccctggacagatttgtgcgctgagccagactccagggttgcctgggaacagtctctccccaagatcacctgtagggaaatgagtgttccctggaacaaggaggtgggggcagtgtggccccttccccaactgggggtggacagctgtctcctggggtgggttggtattaaagaggaaagcgattttttggagataatgtgtctggatcatcttgtggacctgttcccctcccccttgccaagcatgaggccattctaggatcggaggggtcagtgtcctgcctctacccccaccccataccttgtggctgctgtggccttagctttgccttttaggggcctt

SEQ ID NO: 418334 - DNA, 2275 bp, Homo sapiens
gagagcttcatacctggtacgctgctgattggatgaaggacagagggcttccgggagttttcaagccgactgtgtggcagctgagaagagttttgcacgtggatcgccgttcgggtgggcgagatggagacagcccccaagccgggcaaggatgtcccgcccaagaaagacaaacttcagaccaagagaaagaaaccgcggcgatactgggaggaagagaccgttccgaccacagccggagcctctccagggcctcctcgtaacaagaagaatcgggagctccgtcctcagagaccaaaaaatgcttacatcttaaagaagtctcggatctctaagaagcctcaggtcccgaagaaaccccgagaatggaagaacccggagtcccagcgcggcttgtccggggcccaagatccattcccaggccccgcccccgtccctgtggaagtggtccagaagttctgtcgcattgacaaatcccgaaagctaccacattctaaagccaaaactcgaagccgacttgaggtggctgaagctgaggaagaggaaacaagtatcaaagctgctcgttctgagctgctgcttgctgaagaacctgggtttctggaaggggaggatggggaagacacagcaaagatatgccaggctgacattgtggaggctgtggacattgcaagtgcagccaagcactttgacttgaatctgcggcagtttggaccctacagactaaactactctcgaactggaagacacctggcttttggagggcgccgaggtcatgtggctgcccttgattgggtaacaaagaagcttatgtgcgagatcaacgtcatggaggcggtgcgggacatccggtttctccattctgaggcactgcttgctgttgctcagaaccgctggctccacatctatgacaatcagggcattgagctccactgtatccgccgctgtgaccgagtaacacggcttgagttcctgcccttccacttcctcctggctacagcttcagaaacagggtttctaacctacctggatgtgtcagtggggaagattgtggcagctctgaatgctcgagctgggcggctcgatgttatgagtcagaacccttacaatgccgtcatccatctcggacacagcaatggtactgtgtctttatggagtccagctatgaaggagccactggcaaagattctctgtcatcgtggtggggtccgggctgtggcagtagattctacaggcacgtacatggccacctctggcctagaccaccagctgaagatctttgacttgcgagggacgtaccagcctctgagcactcggaccctgccccatggagcagggcacctggccttctcccagaggggactgctggtggcgggaatgggtgacgttgtcaacatctgggcagggcagggcaaggccagcccaccctcccttgaacagccctacctcacccaccggctctcaggccctgtgcatggccttcagttctgcccctttgaagatgtgctgggggtggggcacactgggggcatcaccagcatgctggtccctggtgagtgggccaggggatggggcttgaagtgaatgaactctgggtggaagtttgggccagagacatccaggaactgggggcttagttgggctggagctgttggactgaggttcttccttatggctccatgcttctccctccctcccttcaggggccggtgagcccaacttcgatggcctggagagtaatccatacagaagccggaagcagcgccaggagtgggaggtgaaggccctgctagagaaggtacctgcagagcttatttgtctggacccacgagccctggccgaggtggatgtcatctccctggagcagggaaagaaggagcagatagagaggctgggctatgacccgcaggctaaggctcccttccagccaaagccaaagcagaagggccgcagctccacggcaagcctggtgaagaggaagaggaaggtcatggatgaggaacacagggacaaggtccggcagagccttcagcagcagcatcataaggaggcgaaggccaagcccacgggggcccggccatctgccctggacagatttgtgcgctgagccagactccagggttgcctgggaacagtctctccccaagatcacctgtagggaaatgagtgttccctggaacaaggaggtgggggcagtgtggccccttccccaactgggggtggacagctgtctcctggggtgggttggtattaaagaggaaagcgattttttgga

SEQ ID NO: 418335 - DNA, 2246 bp, Homo sapiens
gagagcttcatacctggtacgctgctgattggatgaaggacagagggcttccgggagttttcaagccgactgtgtggcagctgagaagagttttgcacgtggatcgccgttcgggtgggcgagatggagacagcccccaagccgggcaaggatgtcccgcccaagaaagacaaacttcagaccaagagaaagaaaccgcggcgatactgggaggaagagaccgttccgaccacagccggagcctctccagggcctcctcgtaacaagaagaatcgggagctccgtcctcagagaccaaaaaatgcttacatcttaaagaagtctcggatctctaagaagcctcaggtcccgaagaaaccccgagaatggaagaacccggagtcccagcgcggcttgtccggggcccaagatccattcccaggccccgcccccgtccctgtggaagtggtccagaagttctgtcgcattgacaaatcccgaaagctaccacattctaaagccaaaactcgaagccgacttgaggtggctgaagctgaggaagaggaaacaagtatcaaagctgctcgttctgagctgctgcttgctgaagaacctgggtgagtgagccctaatctggacccccattccctgccttttgggactgtcttttctcgtttttatgttggtatacttgcttcatattgggaagctttactgccatcctaacccttgctttcaggtttctggaaggggaggatggggaagacacagcaaagatatgccaggctgacattgtggaggctgtggacattgcaagtgcagccaagcactttgacttgaatctgcggcagtttggaccctacagactaaactactctcgaactggaagacacctggcttttggagggcgccgaggtcatgtggctgcccttgattgggtaacaaagaagcttatgtgcgagatcaacgtcatggaggcggtgcgggacatccggtttctccattctgaggcactgcttgctgttgctcagaaccgctggctccacatctatgacaatcagggcattgagctccactgtatccgccgctgtgaccgagtaacacggcttgagttcctgcccttccacttcctcctggctacagcttcagaaacagggtttctaacctacctggatgtgtcagtggggaagattgtggcagctctgaatgctcgagctgggcggctcgatgttatgagtcagaacccttacaatgccgtcatccatctcggacacagcaatggtactgtgtctttatggagtccagctatgaaggagccactggcaaagattctctgtcatcgtggtggggtccgggctgtggcagtagattctacaggcacgtacatggccacctctggcctagaccaccagctgaagatctttgacttgcgagggacgtaccagcctctgagcactcggaccctgccccatggagcagggcacctggccttctcccagaggggactgctggtggcgggaatgggtgacgttgtcaacatctgggcagggcagggcaaggccagcccaccctcccttgaacagccctacctcacccaccggctctcaggccctgtgcatggccttcagttctgcccctttgaagatgtgctgggggtggggcacactgggggcatcaccagcatgctggtccctggggccggtgagcccaacttcgatggcctggagagtaatccatacagaagccggaagcagcgccaggagtgggaggtgaaggccctgctagagaaggtacctgcagagcttatttgtctggacccacgagccctggccgaggtggatgtcatctccctggagcagggaaagaaggagcagatagagaggctgggctatgacccgcaggctaaggctcccttccagccaaagccaaagcagaagggccgcagctccacggcaagcctggtgaagaggaagaggaaggtcatggatgaggaacacagggacaaggtccggcagagccttcagcagcagcatcataaggaggcgaaggccaagcccacgggggcccggccatctgccctggacagatttgtgcgctgagccagactccagggttgcctgggaacagtctctccccaagatcacctgtagggaaatgagtgttccctggaacaaggaggtgggggcagtgtggccccttccccaactgggggtggacagctgtctcctggggtgggttggtattaaagaggaaagcgattttttgga

SEQ ID NO: 418336 - DNA, 1345 bp, Homo sapiens
gagagcttcatacctggtacgctgctgattggatgaaggacagagggcttccgggagttttcaagccgactgtgtggcagctgagaagagttttgcacgtggatcgccgttcgggtgggcgagatggagacagcccccaagccgggcaaggatgtcccgcccaagaaagacaaacttcagaccaagagaaagaaaccgcggcgatactgggaggaagagaccgttccgaccacagccggagcctctccagggcctcctcgtaacaagaagaatcgggagctccgtcctcagagaccaaaaaatgcttacatcttaaagaagtctcggatctctaagaagcctcaggtcccgaagaaaccccgagaatggaagaacccggagtcccagcgcggcttgtccggggcccaagatccattcccaggccccgcccccgtccctgtggaagtggtccagaagttctgtcgcattgacaaatcccgaaagctaccacattctaaagccaaaactcgaagccgacttgaggtggctgaagctgaggaagaggaaacaagtatcaaagctgctcgttctgagctgctgcttgctgaagaacctgggtttctggaaggggaggatggggaagacacagcaaagatatgccaggctgacattgtggaggctgtggacattgcaagtgcagccaagcactttgacttgaatctgcggcagtttggaccctacagactaaactactctcgaactggaagacacctggcttttggagggcgccgaggtcatgtggctgcccttgattgggtaacaaagaagcttatgtgcgagatcaacgtcatggaggcggtgcgggacatccggtttctccattctgaggcactgcttgctgttgctcagaaccgctggctccacatctatgacaatcagggcattgagctccactgtatccgccgctgtgaccgagtaacacggcttgagttcctgcccttccacttcctcctggctacagcttcagaaacagggtttctaacctacctggatgtgtcagtggggaagattgtggcagctctgaatgctcgagctgggcggctcgatgttatgagtcagaacccttacaatgccgtcatccatctcggacacagcaatggtactgtgtctttatggagtccagctatgaaggagccactggcaaagattctctgtcatcgtggtggggtccgggctgtggcagtagattctacaggcacgtacatggccacctctggcctagaccaccagctgaagatctttgacttgcgagggacagctgtctcctggggtgggttggtattaaagaggaaagcgattttttgga

SEQ ID NO: 418337 - DNA, 1333 bp, Homo sapiens
gcctcgtgccgaatcggcacgaggcgagatcaacgtcatggaggcggtgcgggacatccggtttctccattctgaggcactgcttgctgttgctcagaaccgctggctccacatctatgacaatcagggcattgagctccactgtatccgccgctgtgaccgagtaacacggcttgagttcctgcccttccacttcctcctggctacagcttcagaaacagggtttctaacctacctggatgtgtcagtggggaagattgtggcagctctgaatgctcgagctgggcggctcgatgttatgagtcagaacccttacaatgccgtcatccatctcggacacagcaatggtactgtgtctttatggagtccagctatgaaggagccactggcaaagattctctgtcatcgtggtggggtccgggctgtggcagtagattctacaggcacgtacatggccacctctggcctagaccaccagctgaagatctttgacttgcgagggacgtaccagcctctgagcactcggaccctgccccatggagcagggcacctggccttctcccagaggggactgctggtggcgggaatgggtgacgttgtcaacatctgggcagggcagggcaaggccagcccaccctcccttgaacagccctacctcacccaccggctctcaggccctgtgcatggccttcagttctgcccctttgaagatgtgctgggggtggggcacactgggggcatcaccagcatgctggtccctggggccggtgagcccaacttcgatggcctggagagtaatccatacagaagccggaagcagcgccaggagtgggaggtgaaggccctgctagagaaggtacctgcagagcttatttgtctggacccacgagccctggccgaggtggatgtcatctccctggagcagggaaagaaggagcagatagagaggctgggctatgacccgcaggctaaggctcccttccagccaaagccaaagcagaagggccgcagctccacggcaagcctggtgaagaggaagaggaaggtcatggatgaggaacacagggacaaggtccggcagagccttcagcagcagcatcataaggaggcgaaggccaagcccacgggggcccggccatctgccctggacagatttgtgcgctgagccagactccagggttgcctgggaacagtctctccccaagatcacctgtagggaaatgagtgttccctggaacaaggaggtgggggcagtgtggccccttccccaactgggggtggacagctgtctcctggggtgggttggtattaaagaggaaagcgattttttgga

SEQ ID NO: 418338 - DNA, 1259 bp, Homo sapiens
agtgcctcagaatggagaaaccggatgtcccgcaccgcatctatgacaatcagggcattgagctccactgtatccgccgctgtgaccgagtaacacggcttgagttcctgcccttccacttcctcctggctacagcttcagaaacagggtttctaacctacctggatgtgtcagtggggaagattgtggcagctctgaatgctcgagctgggcggctcgatgttatgagtcagaacccttacaatgccgtcatccatctcggacacagcaatggtactgtgtctttatggagtccagctatgaaggagccactggcaaagattctctgtcatcgtggtggggtccgggctgtggcagtagattctacaggcacgtacatggccacctctggcctagaccaccagctgaagatctttgacttgcgagggacgtaccagcctctgagcactcggaccctgccccatggagcagggcacctggccttctcccagaggggactgctggtggcgggaatgggtgacgttgtcaacatctgggcagggcagggcaaggccagcccaccctcccttgaacagccctacctcacccaccggctctcaggccctgtgcatggccttcagttctgcccctttgaagatgtgctgggggtggggcacactgggggcatcaccagcatgctggtccctggggccggtgagcccaacttcgatggcctggagagtaatccatacagaagccggaagcagcgccaggagtgggaggtgaaggccctgctagagaaggtacctgcagagcttatttgtctggacccacgagccctggccgaggtggatgtcatctccctggagcagggaaagaaggagcagatagagaggctgggctatgacccgcaggctaaggctcccttccagccaaagccaaagcagaagggccgcagctccacggcaagcctggtgaagaggaagaggaaggtcatggatgaggaacacagggacaaggtccggcagagccttcagcagcagcatcataaggaggcgaaggccaagcccacgggggcccggccatctgccctggacagatttgtgcgctgagccagactccagggttgcctgggaacagtctctccccaagatcacctgtagggaaatgagtgttccctggaacaaggaggtgggggcagtgtggccccttccccaactgggggtggacagctgtctcctggggtgggttggtattaaagaggaaagcgattttttgga

SEQ ID NO: 418339 - DNA, 647 bp, Homo sapiens
gagagcttcatacctggtacgctgctgattggatgaaggacagagggcttccgggagttttcaagccgactgtgtggcagctgagaagagttttgcacgtggatcgccgttcgggtgggcgagatggagacagcccccaagccgggcaaggatgtcccgcccaagaaagacaaacttcagaccaagagaaagaaaccgcggcgatactgggaggaagagaccgttccgaccacagccggagcctctccagggcctcctcgtaacaagaagaatcgggagctccgtcctcagagaccaaaaaatgcttacatcttaaagaagtctcggatctctaagaagcctcaggtcccgaagaaaccccgagaatggaagaacccggagacaaggtccggcagagccttcagcagcagcatcataaggaggcgaaggccaagcccacgggggcccggccatctgccctggacagatttgtgcgctgagccagactccagggttgcctgggaacagtctctccccaagatcacctgtagggaaatgagtgttccctggaacaaggaggtgggggcagtgtggccccttccccaactgggggtggacagctgtctcctggggtgggttggtattaaagaggaaagcgattttttgga

SEQ ID NO: 418340 - DNA, 5628 bp, Homo sapiens
gttttccaagatggtagccaatgatatagcaaagatgtcaaggaagttaagcttacctactgacctaaagcctgatttagatgtaaaggataactcctttagccgatcacggagttcaagtgtaacaagcattgacaaagaatcccgagaagcgatctccgctcttcatttctgtgaaacgtttactcgaaagacggactcgtccccttccccttgtctatgggttggaacaacgctaggaacagtgcttgtcattgcactgaaccttcccccagggggagagcaaagacttcttcagccagtaattgtgtctccaagtggtactatattgaggttaaaaggtgcaatcttgagaatggcatttctggataccacaggctgcttaataccacctgcgtatgaaccctggagagagcacaatgttcctgaagaaaaagacgaaaaggagaaattgaaaaaacggcggcctgtctcagtatccccctcctcttctcaggaaattagtgaaaaccagtatgcagtgatatgttctgaaaagcaagcaaaagtaatctcactgccaacccagaactgtgcttataagcaaaatattacagagacctcgtttgtgcttcgtggagatattgtagcattgagtaacagtatctgccttgcctgtttctgtgccaatggacatataatgacttttagtttgccaagtttaagacctctgttggatgtgtattacttgccccttaccaatatgcggatagccagaacgttctgctttaccaacaatggacaagcattataccttgtttcacctacagaaatccagagacttacttatagtcaagagacctgtgaaaatcttcaggaaatgttgggtgaactcttcactcctgtagaaacacctgaagcaccaaacaggggattctttaaaggcttatttggaggtggtgcacaatctcttgacagagaagaactatttggagaatcgtcctcaggaaaggcttcaaggagccttgcacagcatattcctggccctggtggcattgaaggcgtaaaaggggcagcatctggagttgttggtgaattagcacgagccaggctggcactagatgaaagagggcagaaacttggcgatctggaagaaagaactgcggccatgttatcaagtgcagagtcattttctaaacatgctcatgagattatgttgaaatacaaagataagaagtggtaccagttctgacaaccagaatccaataagtccaacttcagccagaaggaaaaaagttttccatttttattacattctttaggaaagttaacgttaaagggatgttcgtcactgaatactgttctttcctagcacagtcatgcactgttttacctcagtcatgtggctttaactgaggagtgttcacacgcactcgaaatggagtatatggtgtgtgccagttatgagttgaccatttgggaattaaacaggtcacacgtgacagatgaagaaaccaagggggctgctgaggagacctggtgcagggactaatcctggatcattcctgtattaaactttcatatgccaaaagggtttgtgccgttttatctgccatcagtgtttgacctgtttagggcagaggcaataagtcagaagtcttgaagttgaaatagttatatgtgtgtcattggactggattataaacagctgtcttggactttccctctcttaacactgactggtcatcagtatcattagtgaaaaagaaacaaattgtttgttatcatctctttagacagataagctgaatggtgggctttaaataataaaaacatacacatagttgacttgtgtatgagctactcttggattcttgttattatagacttgtatttagttcatattttgtcaaaagcaaaacaagaagatacatcacttttcattgaaaagaaaagtgtagagcatgactgaattgctcatcattctgggagtttccatgtagtggctatgcagtgtggaaagtgagaaaaacctccattgtggtgaggagaatacttcaatgtcccttgtccttgttctcattaattcagctaaaggtggatttgaccaaaataatgctggttaaatttgtagaaatgttgaaattggctgtgttttaaattttgcttgaatttttataaaatgtttaaccaaatgtacctttgcattctttaattaaaattgcttaaaaaaaaactttcattatttcagtaaaatgctcagctcccttttcaaaatgccctttatttgctaactgttccaatacactcaggtgatgagccaattaaatgttagtgcacatgctatcgcatggaaaattacaagcatctgttgtcaataattatataagagtttagtctgatgacctacaaaatattttgtgtagaaatatactataaatctgtacatatcctttcaaggttttaaaaaaccaaaaagaaaggaaaatatgtacactgtgataactaaattatttctgtattggaatataatacaatttgagaccagcaatggacaatgaatgattgtttcatagaatagcattacgggcaggaaagaaaccacctagtagatctagaagtaagcaatctcagaatacagactaatctgagattattattgattgttgttaaagcaacccagcaaaagcaaaatggaagcattaaaattaatgttaatgaaatttaaatattgtcttctataaaaaattcctttaaatgattttgttttttcattaagagataatcagagcacaaattgatagtaaacaggatggttgtttttctattctatatgatcattaaaggaatatgtaggacatcttaactttttcatacagtctgttatgcatattttcctctacttttcattaataaagcttttatgtttacattttataacatgcactactagatgcaaaagtttacatcaaagtttactttaaatatcatttggtagggactaaatgtgtgtgatagagataattgatcaagccaaaagaaatattttttaaataagcccttttcaaaagtttttgaatttatagaaagcaccaatgaataacatatttctgtttcgttaatgtcagctgcctgaacattcagcagtttataaattgcttaatttgtgttatctattatccagtaaacccatagttccatgatatgtcacaggaattgttaggtcctattttaaaggtacagttttgtgaatgtcatcaataaaatcaacagttatggatttgaagaagttgggaaagcattatgtagattaatatactggttggttccctatctatgtggaaggtcatattagctgcaattatttaatttgctgtgttattttgtgttatataacacaaatatatttgtatattaacttcatttttactgtcatttttcctgttgtatacaaaatgaactaatcttgtaattattttcaaatatagaagtatatacattagatggatttccaagattttgtaagaaaatcttaaatcagtgttttgagttatttaatttttaaattaatctacaaattatgcacaacaaactagagactcagttaggattagaaagcttaaagtatgtttgagtgtaggaaataagcttctcagagttatacttgattctgtctgtagataagagacagtctacagtaataactaacccagggaatttactgtaatttgagaggtaacatctctatttttttctttttaaatacagaaagtaatagtcaccagcaagccacgatttcaggaaaactgactaaaaaaaaaagtcaaaatagaaaatatcagaaaaatgaaagatttttgtgtgccctctccatatcctcattgtttttgttgcatttgtccttgactctaaaatcactgaagtattcatgattagtagtttgtaagtaggaagtggtttttctgtatgtaccatatatccagttcatttcagttttcaaactaaaatccatatgtatttgctgagaaagttatttgaaatcttatattctgacaaattctgtacattacatccatttgaagttttgcatcatcttaacacttttgctttgcatttcaattgtacaaagtgtttccaaaaaaatggttatagattcgactgagctattactaacttctccatttgattttttatggatgtgaaaaatgctgctacttgtctatgttattatgtggtatttgttctcttggattgaaatttatgcccacagatttttcttttcatttgaaaatgaatgtgaagatactgtttacagcttttgttaattgcacttttcatcactctgatcaatttcttgtaaagtgctatgggaattatttttcctgtgaatattaatgattttactactgcctccgaagttttaaaaaaggttctgtagacagaaaacagttgttgcaaccaaaaacaaccaaaaaaagaaaaaaagggaaaactggcttacctttctcagatgaattaaatgattttaataacttcccaattaccagggttataacattgctttcttcagttattaatacagtcaaattaattttaacaatataggcacaattcatttacaaattcagtacagtagtccagggctacatgtaagtggtctctttattttattctttacatcagaaaaatcatgaatgtcagttttgccagtattttacaatgaggcttatcgtttaaaattttatagtgtatgacatgtaaataaaccagtatttattgtaggttgtttgattcaggcatttcaaatggatataggttaatggcaatggaatcctatttatttggtagttggttttgtttgtttttgtttatttacttttgctatttgttttgtattgtctaaactttgcttcaactgaagacagtgtaaggagttgaaaatacaatcaacatagcaatggaaagcaatgcaaagagggtaaatcttgttttaatttttttaactttttttttttgtaaataaatagtactgtgatactttaggtgtgacctctattccacatgatagttagaaccagaaaaacacttttgctttctagttatactattggttcattgtaaatgcattaccaaaagacaatatgaaaaagagcaagattaagtttttctaacattgtccacttcaggggcaagcatgcttggtatagagctctagcttgtgtataccttaaactgtaacttgcaggtgtttttcagttgctgcactttttatttaatcttgctcagtcccagtaactatctcaaaggtaattgctggaatatgcattttgaaatacggtttaaaaaaaaatctgtgtattgtttcatctaaaaagaaaagcactattggaaacactaaaaacgtgttaaactttgtagttattttgcattcctgtactttacaaactgtcatcacagcaaaaagtttaaaattaggtaatgaaatatttttgtaaataaataccgttaagctggtattttaaaaaatgtattataaattaattaatgtttctggaaaatgttcatatatatgtatatgaatgtctctttatgctgaagggctctgattgggcaaaataaaatactctaatctctcctgaaactaaacaa

SEQ ID NO: 418341 - DNA, 4596 bp, Homo sapiens
gttttccaagatggtagccaatgatatagcaaagatgtcaaggaagttaagcttacctactgacctaaagcctgatttagatgtaaaggataactcctttagccgatcacggagttcaagtgtaacaagcattgacaaagaatcccgagaagcgatctccgctcttcatttctgtgaaacgtttactcgaaagacggactcgtccccttccccttgtctatgggttggaacaacgctaggaacagtgcttgtcattgcactgaaccttcccccagggggagagcaaagacttcttcagccagtaattgtgtctccaagtggtactatattgaggttaaaaggtgcaatcttgagaatggcatttctggataccacaggctgcttaataccacctgcgtatgaaccctggagagagcacaatgttcctgaagaaaaagacgaaaaggagaaattgaaaaaacggcggcctgtctcagtatccccctcctcttctcaggaaattagtgaaaaccagtatgcagtgatatgttctgaaaagcaagcaaaagtaatctcactgccaacccagaactgtgcttataagcaaaatattacagagacctcgtttgtgcttcgtggagatattgtagcattgagtaacagtatctgccttgcctgtttctgtgccaatggacatataatgacttttagtttgccaagtttaagacctctgttggatgtgtattacttgccccttaccaatatgcggatagccagaacgttctgctttaccaacaatggacaagcattataccttgtttcacctacagaaatccagagacttacttatagtcaagagacctgtgaaaatcttcaggaaatgttgggtgaactcttcactcctgtagaaacacctgaagcaccaaacaggggattctttaaaggcttatttggaggtggtgcacaatctcttgacagagaagaactatttggagaatcgtcctcaggaaaggcttcaaggagccttgcacagcatattcctggccctggtggcattgaaggcgtaaaaggggcagcatctggagttgttggtgaattagcacgagccaggctggcactagatgaaagagggcagaaacttggcgatctggaagaaagaactgcggccatgttatcaagtgcagagtcattttctaaacatgctcatgagattatgttgaaatacaaagataagaagtggtaccagttctgacaaccagaatccaataagtccaacttcagccagaaggaaaaaagttttccatttttattacattctttaggaaagttaacgttaaagggatgttcgtcactgaatactgttctttcctagcacagtcatgcactgttttacctcagtcatgtggctttaactgaggagtgttcacacgcactcgaaatggagtatatggtgtgtgccagttatgagttgaccatttgggaattaaacaggtcacacgtgacagatgaagaaaccaagggggctgctgaggagacctggtgcagggactaatcctggatcattcctgtattaaactttcatatgccaaaagggtttgtgccgttttatctgccatcagtgtttgacctgtttagggcagaggcaataagtcagaagtcttgaagttgaaatagttatatgtgtgtcattggactggattataaacagctgtcttggactttccctctcttaacactgactggtcatcagtatcattagtgaaaaagaaacaaattgtttgttatcatctctttagacagataagctgaatggtgggctttaaataataaaaacatacacatagttgacttgtgtatgagctactcttggattcttgttattatagacttgtatttagttcatattttgtcaaaagcaaaacaagaagatacatcacttttcattgaaaagaaaagtgtagagcatgactgaattgctcatcattctgggagtttccatgtagtggctatgcagtgtggaaagtgagaaaaacctccattgtggtgaggagaatacttcaatgtcccttgtccttgttctcattaattcagctaaaggtggatttgaccaaaataatgctggttaaatttgtagaaatgttgaaattggctgtgttttaaattttgcttgaatttttataaaatgtttaaccaaatgtacctttgcattctttaattaaaattgcttaaaaaaaaactttcattatttcagtaaaatgctcagctcccttttcaaaatgccctttatttgctaactgttccaatacactcaggtgatgagccaattaaatgttagtgcacatgctatcgcatggaaaattacaagcatctgttgtcaataattatataagagtttagtctgatgacctacaaaatattttgtgtagaaatatactataaatctgtacatatcctttcaaggttttaaaaaaccaaaaagaaaggaaaatatgtacactgtgataactaaattatttctgtattggaatataatacaatttgagaccagcaatggacaatgaatgattgtttcatagaatagcattacgggcaggaaagaaaccacctagtagatctagaagtaagcaatctcagaatacagactaatctgagattattattgattgttgttaaagcaacccagcaaaagcaaaatggaagcattaaaattaatgttaatgaaatttaaatattgtcttctataaaaaattcctttaaatgattttgttttttcattaagagataatcagagcacaaattgatagtaaacaggatggttgtttttctattctatatgatcattaaaggaatatgtaggacatcttaactttttcatacagtctgttatgcatattttcctctacttttcattaataaagcttttatgtttacattttataacatgcactactagatgcaaaagtttacatcaaagtttactttaaatatcatttggtagggactaaatgtgtgtgatagagataattgatcaagccaaaagaaatattttttaaataagcccttttcaaaagtttttgaatttatagaaagcaccaatgaataacatatttctgtttcgttaatgtcagctgcctgaacattcagcagtttataaattgcttaatttgtgttatctattatccagtaaacccatagttccatgatatgtcacaggaattgttaggtcctattttaaaggtacagttttgtgaatgtcatcaataaaatcaacagttatggatttgaagaagttgggaaagcattatgtagattaatatactggttggttccctatctatgtggaaggtcatattagctgcaattatttaatttgctgtgttattttgtgttatataacacaaatatatttgtatattaacttcatttttactgtcatttttcctgttgtatacaaaatgaactaatcttgtaattattttcaaatatagaagtatatacattagatggatttccaagattttgtaagaaaatcttaaatcagtgttttgagttatttaatttttaaattaatctacaaattatgcacaacaaactagagactcagttaggattagaaagcttaaagtatgtttgagtgtaggaaataagcttctcagagttatacttgattctgtctgtagataagagacagtctacagtaataactaacccagggaatttactgtaatttgagaggtaacatctctatttttttctttttaaatacagaaagtaatagtcaccagcaagccacgatttcaggaaaactgactaaaaaaaaaagtcaaaatagaaaatatcagaaaaatgaaagatttttgtgtgccctctccatatcctcattgtttttgttgcatttgtccttgactctaaaatcactgaagtattcatgattagtagtttgtaagtaggaagtggtttttctgtatgtaccatatatccagttcatttcagttttcaaactaaaatccatatgtatttgctgagaaagttatttgaaatcttatattctgacaaattctgtacattacatccatttgaagttttgcatcatcttaacacttttgctttgcatttcaattgtacaaagtgtttccaaaaaaatggttatagattcgactgagctattactaacttctccatttgattttttatggatgtgaaaaatgctgctacttgtctatgttattatgtgtaagtatattacaatttaattaagtacaatagtttaaagaacgaagcaattttttttttttgggcttagaacttcttaattgtaggttcctctgaagcgatttcatgtagatatgtgagtgttttaaacaagtctgaaagtgttacatacttttaggttacaggggtgctggggagacagctgaggaaaggaagaatatgtggaagacaccacggagttcaaagttttaccctgagttctatcttccatgtatgttttgcttaaggcatttctcatgtgacattagaaaagctatatccaaaggtaaattttttgtggcaaagatttattttacactttaacttttgggattttatttgtttcagcaaaataaagagcactga

SEQ ID NO: 418342 - DNA, 2015 bp, Homo sapiens
tttagttttaaaatggaatttttataaatgtactttaattttaaaatggtgaacttgttaagtttaagtcaaagtacttaaaaagtatgtatattatccatacaaaaagttatgttttacgcttataataagaaatactggtatctcatatcgagatacaattaattttaaaaaatcatacatcatttaaaaatcttcacacatgaacaggaaagatatcatttctatgctttaaaaaaccctctattgagcattttcaaatattaattttattttgggggaaaatgcccacaacaataattgcaagatctttctcaatagcttcagtttgctgttggatgcctaccttaactattgttttaaaatatagatatatatatatatatttaaaatagttttccaggtattttcttctaccttttttaaaaataaatttccaaaaatgaaaacagagtttatgtatttttgtcaatgaaggtttttattttgtagtttatagaatttgttccttatcagtttgatacttgatcaacattcttagactttttaatctgtatttactttggggggaaaaaagcactcctatatcttaaatgtccttcttttttcttttcccttttagggtatttgttctcttggattgaaatttatgcccacagatttttcttttcatttgaaaatgaatgtgaagatactgtttacagcttttgttaattgcacttttcatcactctgatcaatttcttgtaaagtgctatgggaattatttttcctgtgaatattaatgattttactactgcctccgaagttttaaaaaaggttctgtagacagaaaacagttgttgcaaccaaaaacaaccaaaaaaagaaaaaaagggaaaactggcttacctttctcagatgaattaaatgattttaataacttcccaattaccagggttataacattgctttcttcagttattaatacagtcaaattaattttaacaatataggcacaattcatttacaaattcagtacagtagtccagggctacatgtaagtggtctctttattttattctttacatcagaaaaatcatgaatgtcagttttgccagtattttacaatgaggcttatcgtttaaaattttatagtgtatgacatgtaaataaaccagtatttattgtaggttgtttgattcaggcatttcaaatggatataggttaatggcaatggaatcctatttatttggtagttggttttgtttgtttttgtttatttacttttgctatttgttttgtattgtctaaactttgcttcaactgaagacagtgtaaggagttgaaaatacaatcaacatagcaatggaaagcaatgcaaagagggtaaatcttgttttaatttttttaactttttttttttgtaaataaatagtactgtgatactttaggtgtgacctctattccacatgatagttagaaccagaaaaacacttttgctttctagttatactattggttcattgtaaatgcattaccaaaagacaatatgaaaaagagcaagattaagtttttctaacattgtccacttcaggggcaagcatgcttggtatagagctctagcttgtgtataccttaaactgtaacttgcaggtgtttttcagttgctgcactttttatttaatcttgctcagtcccagtaactatctcaaaggtaattgctggaatatgcattttgaaatacggtttaaaaaaaaatctgtgtattgtttcatctaaaaagaaaagcactattggaaacactaaaaacgtgttaaactttgtagttattttgcattcctgtactttacaaactgtcatcacagcaaaaagtttaaaattaggtaatgaaatatttttgtaaataaataccgttaagctggtattttaaaaaatgtattataaattaattaatgtttctggaaaatgttcatatatatgtatatgaatgtctctttatgctgaagtgtcaacgtggggatactctagagcgag

SEQ ID NO: 418343 - DNA, 299 bp, Homo sapiens
aagcatatttcactttataattttatttcagttgtattaccactcaatccaaaaattgtattttaatgtagtaggattttatattagtaaaatgttcatgttttgagttactctttgatttatcaaatgtgttcagttggagaatcgtcctcaggaaaggcttcaaggagccttgcacagcatattcctggccctggtggcattgaaggcgtaaaaggggcagcatctggagttgttggtgaattagcacgagccaggctggcactagatgaaagagggcagaaacttggcgatctgga

SEQ ID NO: 418344 - DNA, 5605 bp, Homo sapiens
gttttccaagatggtagccaatgatatagcaaagatgtcaaggaagttaagcttacctactgacctaaagcctgatttagatgtaaaggataactcctttagccgatcacggagttcaagtgtaacaagcattgacaaagaatcccgagaagcgatctccgctcttcatttctgtgaaacgtttactcgaaagacggactcgtccccttccccttgtctatgggttggaacaacgctaggaacagtgcttgtcattgcactgaaccttcccccagggggagagcaaagacttcttcagccagtaattgtgtctccaagtggtactatattgaggttaaaaggtgcaatcttgagaatggcatttctggataccacaggctgcttaataccacctgcgtatgaaccctggagagagcacaatgttcctgaagaaaaagacgaaaaggagaaattgaaaaaacggcggcctgtctcagtatccccctcctcttctcaggaaattagtgaaaaccagtatgcagtgatatgttctgaaaagcaagcaaaagtaatctcactgccaacccagaactgtgcttataagcaaaatattacagagacctcgtttgtgcttcgtggagatattgtagcattgagtaacagtatctgccttgcctgtttctgtgccaatggacatataatgacttttagtttgccaagtttaagacctctgttggatgtgtattacttgccccttaccaatatgcggatagccagaacgttctgctttaccaacaatggacaagcattataccttgtttcacctacagaaatccagagacttacttatagtcaagagacctgtgaaaatcttcaggaaatgttgggtgaactcttcactcctgtagaaacacctgaagcaccaaacaggggattctttaaaggcttatttggaggtggtgcacaatctcttgacagagaagaactatttggagaatcgtcctcaggaaaggcttcaaggagccttgcacagcatattcctggccctggtggcattgaaggcgtaaaaggggcagcatctggagttgttggtgaattagcacgagccaggctggcactagatgaaagagggcagaaacttggcgatctggaagaaagaactgcggccatgttatcaagtgcagagtcattttctaaacatgctcatgagattatgttgaaatacaaagataagaagtggtaccagttctgacaaccagaatccaataagtccaacttcagccagaaggaaaaaagttttccatttttattacattctttaggaaagttaacgttaaagggatgttcgtcactgaatactgttctttcctagcacagtcatgcactgttttacctcagtcatgtggctttaactgaggagtgttcacacgcactcgaaatggagtatatggtgtgtgccagttatgagttgaccatttgggaattaaacaggtcacacgtgacagatgaagaaaccaagggggctgctgaggagacctggtgcagggactaatcctggatcattcctgtattaaactttcatatgccaaaagggtttgtgccgttttatctgccatcagtgtttgacctgtttagggcagaggcaataagtcagaagtcttgaagttgaaatagttatatgtgtgtcattggactggattataaacagctgtcttggactttccctctcttaacactgactggtcatcagtatcattagtgaaaaagaaacaaattgtttgttatcatctctttagacagataagctgaatggtgggctttaaataataaaaacatacacatagttgacttgtgtatgagctactcttggattcttgttattatagacttgtatttagttcatattttgtcaaaagcaaaacaagaagatacatcacttttcattgaaaagaaaagtgtagagcatgactgaattgctcatcattctgggagtttccatgtagtggctatgcagtgtggaaagtgagaaaaacctccattgtggtgaggagaatacttcaatgtcccttgtccttgttctcattaattcagctaaaggtggatttgaccaaaataatgctggttaaatttgtagaaatgttgaaattggctgtgttttaaattttgcttgaatttttataaaatgtttaaccaaatgtacctttgcattctttaattaaaattgcttaaaaaaaaactttcattatttcagtaaaatgctcagctcccttttcaaaatgccctttatttgctaactgttccaatacactcaggtgatgagccaattaaatgttagtgcacatgctatcgcatggaaaattacaagcatctgttgtcaataattatataagagtttagtctgatgacctacaaaatattttgtgtagaaatatactataaatctgtacatatcctttcaaggttttaaaaaaccaaaaagaaaggaaaatatgtacactgtgataactaaattatttctgtattggaatataatacaatttgagaccagcaatggacaatgaatgattgtttcatagaatagcattacgggcaggaaagaaaccacctagtagatctagaagtaagcaatctcagaatacagactaatctgagattattattgattgttgttaaagcaacccagcaaaagcaaaatggaagcattaaaattaatgttaatgaaatttaaatattgtcttctataaaaaattcctttaaatgattttgttttttcattaagagataatcagagcacaaattgatagtaaacaggatggttgtttttctattctatatgatcattaaaggaatatgtaggacatcttaactttttcatacagtctgttatgcatattttcctctacttttcattaataaagcttttatgtttacattttataacatgcactactagatgcaaaagtttacatcaaagtttactttaaatatcatttggtagggactaaatgtgtgtgatagagataattgatcaagccaaaagaaatattttttaaataagcccttttcaaaagtttttgaatttatagaaagcaccaatgaataacatatttctgtttcgttaatgtcagctgcctgaacattcagcagtttataaattgcttaatttgtgttatctattatccagtaaacccatagttccatgatatgtcacaggaattgttaggtcctattttaaaggtacagttttgtgaatgtcatcaataaaatcaacagttatggatttgaagaagttgggaaagcattatgtagattaatatactggttggttccctatctatgtggaaggtcatattagctgcaattatttaatttgctgtgttattttgtgttatataacacaaatatatttgtatattaacttcatttttactgtcatttttcctgttgtatacaaaatgaactaatcttgtaattattttcaaatatagaagtatatacattagatggatttccaagattttgtaagaaaatcttaaatcagtgttttgagttatttaatttttaaattaatctacaaattatgcacaacaaactagagactcagttaggattagaaagcttaaagtatgtttgagtgtaggaaataagcttctcagagttatacttgattctgtctgtagataagagacagtctacagtaataactaacccagggaatttactgtaatttgagaggtaacatctctatttttttctttttaaatacagaaagtaatagtcaccagcaagccacgatttcaggaaaactgactaaaaaaaaaagtcaaaatagaaaatatcagaaaaatgaaagatttttgtgtgccctctccatatcctcattgtttttgttgcatttgtccttgactctaaaatcactgaagtattcatgattagtagtttgtaagtaggaagtggtttttctgtatgtaccatatatccagttcatttcagttttcaaactaaaatccatatgtatttgctgagaaagttatttgaaatcttatattctgacaaattctgtacattacatccatttgaagttttgcatcatcttaacacttttgctttgcatttcaattgtacaaagtgtttccaaaaaaatggttatagattcgactgagctattactaacttctccatttgattttttatggatgtgaaaaatgctgctacttgtctatgttattatgtggtatttgttctcttggattgaaatttatgcccacagatttttcttttcatttgaaaatgaatgtgaagatactgtttacagcttttgttaattgcacttttcatcactctgatcaatttcttgtaaagtgctatgggaattatttttcctgtgaatattaatgattttactactgcctccgaagttttaaaaaaggttctgtagacagaaaacagttgttgcaaccaaaaacaaccaaaaaaagaaaaaaagggaaaactggcttacctttctcagatgaattaaatgattttaataacttcccaattaccagggttataacattgctttcttcagttattaatacagtcaaattaattttaacaatataggcacaattcatttacaaattcagtacagtagtccagggctacatgtaagtggtctctttattttattctttacatcagaaaaatcatgaatgtcagttttgccagtattttacaatgaggcttatcgtttaaaattttatagtgtatgacatgtaaataaaccagtatttattgtaggttgtttgattcaggcatttcaaatggatataggttaatggcaatggaatcctatttatttggtagttggttttgtttgtttttgtttatttacttttgctatttgttttgtattgtctaaactttgcttcaactgaagacagtgtaaggagttgaaaatacaatcaacatagcaatggaaagcaatgcaaagagggtaaatcttgttttaatttttttaactttttttttttgtaaataaatagtactgtgatactttaggtgtgacctctattccacatgatagttagaaccagaaaaacacttttgctttctagttatactattggttcattgtaaatgcattaccaaaagacaatatgaaaaagagcaagattaagtttttctaacattgtccacttcaggggcaagcatgcttggtatagagctctagcttgtgtataccttaaactgtaacttgcaggtgtttttcagttgctgcactttttatttaatcttgctcagtcccagtaactatctcaaaggtaattgctggaatatgcattttgaaatacggtttaaaaaaaaatctgtgtattgtttcatctaaaaagaaaagcactattggaaacactaaaaacgtgttaaactttgtagttattttgcattcctgtactttacaaactgtcatcacagcaaaaagtttaaaattaggtaatgaaatatttttgtaaataaataccgttaagctggtattttaaaaaatgtattataaattaattaatgtttctggaaaatgttcatatatatgtatatgaatgtctctttatgctgaagtgtcaacgtggggatactctagagcgag

SEQ ID NO: 418345 - DNA, 3117 bp, Homo sapiens
tgctgtactgagagagaatgttacataacattgagaactagtacaagtaaatattaaagtgaagtgaccatttcctacacaagctcattcagaggaggatgaagaccattttggaggaagaaaagcacccttattaagaattgcagcaagtaagccaacaaggtcttttcaggatgattttcttatatcaagtggtacatttcattttatttacttcagtttctggtgaatgtgtgactcagttgttgaaggacacctgctttgaaggaggggacattactacggtcttcacaccaagcgccaagtactgccaggtagtctgcacttaccacccaagatgtttactcttcactttcacggcggaatcaccatctgaggatcccacccgatggtttacttgtgtcctgaaagacagtgttacagaaacactgccaagagtgaataggacagcagcgatttctgggtattctttcaagcaatgctcacaccaaataagcgcttgcaacaaagacatttatgtggacctagacatgaagggcataaactataacagctcagttgccaagagtgctcaagaatgccaagaaagatgcacggatgacgtccactgccactttttcacgtacgccacaaggcagtttcccagcctggagcatcgtaacatttgtctactgaagcacacccaaacagggacaccaaccagaataacgaagctcgataaagtggtgtctggattttcactgaaatcctgtgcactttctaatctggcttgtattagggacattttccctaatacggtgtttgcagacagcaacatcgacagtgtcatggctcccgatgcttttgtctgtggccgaatctgcactcatcatcccggttgcttgttttttaccttcttttcccaggaatggcccaaagaatctcaaagaaatctttgtctccttaaaacatctgagagtggattgcccagtacacgcattaaaaagagcaaagctctttctggtttcagtctacaaagctgcaggcacagcatcccagtgttctgccattcttcattttaccatgacactgatttcttgggagaagaactggatattgttgctgcaaaaagtcacgaggcctgccagaaactgtgcaccaatgccgtccgctgccagttttttacctataccccagcccaagcatcctgcaacgaagggaagggcaagtgttacttaaagctttcttcaaacggatctccaactaaaatacttcacgggagaggaggcatctctggatacacattaaggttgtgtaaaatggataatgagtgtaccaccaaaatcaagcccaggatcgttggaggaactgcgtctgttcgtggtgagtggccgtggcaggtgaccctgcacacaacctcacccactcagagacacctgtgtggaggctccatcattggaaaccagtggatattaacagccgctcactgtttctatggggtagagtcacctaagattttgcgtgtctacagtggcattttaaatcaatctgaaataaaagaggacacatctttctttggggttcaagaaataataatccatgatcagtataaaatggcagaaagcgggtatgatattgccttgttgaaactggaaaccacagtgaattacacagattctcaacgacccatatgcctgccttccaaaggagatagaaatgtaatatacactgattgctgggtgactggatgggggtacagaaaactaagagacaaaatacaaaatactctccagaaagccaagatacccttagtgaccaacgaagagtgccagaagagatacagaggacataaaataacccataagatgatctgtgccggctacagggaaggagggaaggacgcttgcaagggagattcgggaggccctctgtcctgcaaacacaatgaggtctggcatctggtaggcatcacgagctggggcgaaggctgtgctcaaagggagcggccaggtgtttacaccaacgtggtcgagtacgtggactggattctggagaaaactcaagcagtgtgaatgggttcccaggggccattggagtccctgaaggacccaggatttgctgggagagggtgttgagttcactgtgccagcatgcttcctccacagtaacacgctgaaggggcttggtgtttgtaagaaaatgctagaagaaaacaaactgtcacaagttgttatgtccaaaactcccgttctatgatcgttgtagtttgtttgagcattcagtctctttgtttttgatcacgcttctatggagtccaagaattaccataaggcaatatttctgaagattactatataggcagatatagcagaaaataaccaagtagtggcagtggggatcaggcagaagaactggtaaaagaagccaccataaatagatttgttcgatgaaagatgaaaactggaagaaaggagaacaaagacagtcttcaccattttgcaggaatctacactctgcctatgtgaacacatttcttttgtaaagaaagaaattgattgcatttaatggcagattttcagaatagtcaggaattcttgtcatttccattttaaaatatatattaaaaaaaatcagttcgagtagacacgagctaagagtgaatgtgaagataacagaatttctgtgtggaagaggattacaagcagcaatttacctggaagtgataccttaggggcaatcttgaagatacactttcctgaaaaatgatttgtgatggattgtatatttatttaaaatatcttgggaggggaggctgatggagatagggagcatgctcaaacctccctaagacaagctgctgctgtgactatgggctcccaaagagctagatcgtatatttatttgacaaaaatcaccatagactgcatccatactacagagaaaaaacaattagggcgcaaatggatagttacagtaaagtcttcagcaagcagctgcctgtattctaagcactgggattttctgtttcgtgcaaatatttatctcattatgttgtgatctagttcaataacctagaatttgaattgtcaccacatagctttcaatctgtgccaacaactatacaattcatcaagtgtg

SEQ ID NO: 418346 - DNA, 2957 bp, Homo sapiens
tgctgtactgagagagaatgttacataacattgagaactagtacaagtaaatattaaagtgaagtgaccatttcctacacaagctcattcagaggaggatgaagaccattttggaggaagaaaagcacccttattaagaattgcagcaagtaagccaacaaggtcttttcaggatgattttcttatatcaagtggtacatttcattttatttacttcagtttctggtgaatgtgtgactcagttgttgaaggacacctgctttgaaggaggggacattactacggtcttcacaccaagcgccaagtactgccaggtagtctgcacttaccacccaagatgtttactcttcactttcacggcggaatcaccatctgaggatcccacccgatggtttacttgtgtcctgaaagacagtgttacagaaacactgccaagagtgaataggacagcagcgatttctgggtattctttcaagcaatgctcacaccaaataagcgtaacatttgtctactgaagcacacccaaacagggacaccaaccagaataacgaagctcgataaagtggtgtctggattttcactgaaatcctgtgcactttctaatctggcttgtattagggacattttccctaatacggtgtttgcagacagcaacatcgacagtgtcatggctcccgatgcttttgtctgtggccgaatctgcactcatcatcccggttgcttgttttttaccttcttttcccaggaatggcccaaagaatctcaaagaaatctttgtctccttaaaacatctgagagtggattgcccagtacacgcattaaaaagagcaaagctctttctggtttcagtctacaaagctgcaggcacagcatcccagtgttctgccattcttcattttaccatgacactgatttcttgggagaagaactggatattgttgctgcaaaaagtcacgaggcctgccagaaactgtgcaccaatgccgtccgctgccagttttttacctataccccagcccaagcatcctgcaacgaagggaagggcaagtgttacttaaagctttcttcaaacggatctccaactaaaatacttcacgggagaggaggcatctctggatacacattaaggttgtgtaaaatggataatgagtgtaccaccaaaatcaagcccaggatcgttggaggaactgcgtctgttcgtggtgagtggccgtggcaggtgaccctgcacacaacctcacccactcagagacacctgtgtggaggctccatcattggaaaccagtggatattaacagccgctcactgtttctatggggtagagtcacctaagattttgcgtgtctacagtggcattttaaatcaatctgaaataaaagaggacacatctttctttggggttcaagaaataataatccatgatcagtataaaatggcagaaagcgggtatgatattgccttgttgaaactggaaaccacagtgaattacacagattctcaacgacccatatgcctgccttccaaaggagatagaaatgtaatatacactgattgctgggtgactggatgggggtacagaaaactaagagacaaaatacaaaatactctccagaaagccaagatacccttagtgaccaacgaagagtgccagaagagatacagaggacataaaataacccataagatgatctgtgccggctacagggaaggagggaaggacgcttgcaagggagattcgggaggccctctgtcctgcaaacacaatgaggtctggcatctggtaggcatcacgagctggggcgaaggctgtgctcaaagggagcggccaggtgtttacaccaacgtggtcgagtacgtggactggattctggagaaaactcaagcagtgtgaatgggttcccaggggccattggagtccctgaaggacccaggatttgctgggagagggtgttgagttcactgtgccagcatgcttcctccacagtaacacgctgaaggggcttggtgtttgtaagaaaatgctagaagaaaacaaactgtcacaagttgttatgtccaaaactcccgttctatgatcgttgtagtttgtttgagcattcagtctctttgtttttgatcacgcttctatggagtccaagaattaccataaggcaatatttctgaagattactatataggcagatatagcagaaaataaccaagtagtggcagtggggatcaggcagaagaactggtaaaagaagccaccataaatagatttgttcgatgaaagatgaaaactggaagaaaggagaacaaagacagtcttcaccattttgcaggaatctacactctgcctatgtgaacacatttcttttgtaaagaaagaaattgattgcatttaatggcagattttcagaatagtcaggaattcttgtcatttccattttaaaatatatattaaaaaaaatcagttcgagtagacacgagctaagagtgaatgtgaagataacagaatttctgtgtggaagaggattacaagcagcaatttacctggaagtgataccttaggggcaatcttgaagatacactttcctgaaaaatgatttgtgatggattgtatatttatttaaaatatcttgggaggggaggctgatggagatagggagcatgctcaaacctccctaagacaagctgctgctgtgactatgggctcccaaagagctagatcgtatatttatttgacaaaaatcaccatagactgcatccatactacagagaaaaaacaattagggcgcaaatggatagttacagtaaagtcttcagcaagcagctgcctgtattctaagcactgggattttctgtttcgtgcaaatatttatctcattatgttgtgatctagttcaataacctagaatttgaattgtcaccacatagctttcaatctgtgccaacaactatacaattcatcaagtgtg

SEQ ID NO: 418347 - DNA, 1312 bp, Homo sapiens
caaaatcagcctgagcaagatgtgctgaagatgggaagcgtctgagttgatctgtgcaccttttcttgtctcccctcgttctagggagattcgggaggccctctgtcctgcaaacacaatgaggtctggcatctggtaggcatcacgagctggggcgaaggctgtgctcaaagggagcggccaggtgtttacaccaacgtggtcgagtacgtggactggattctggagaaaactcaagcagtgtgaatgggttcccaggggccattggagtccctgaaggacccaggatttgctgggagagggtgttgagttcactgtgccagcatgcttcctccacagtaacacgctgaaggggcttggtgtttgtaagaaaatgctagaagaaaacaaactgtcacaagttgttatgtccaaaactcccgttctatgatcgttgtagtttgtttgagcattcagtctctttgtttttgatcacgcttctatggagtccaagaattaccataaggcaatatttctgaagattactatataggcagatatagcagaaaataaccaagtagtggcagtggggatcaggcagaagaactggtaaaagaagccaccataaatagatttgttcgatgaaagatgaaaactggaagaaaggagaacaaagacagtcttcaccattttgcaggaatctacactctgcctatgtgaacacatttcttttgtaaagaaagaaattgattgcatttaatggcagattttcagaatagtcaggaattcttgtcatttccattttaaaatatatattaaaaaaaatcagttcgagtagacacgagctaagagtgaatgtgaagataacagaatttctgtgtggaagaggattacaagcagcaatttacctggaagtgataccttaggggcaatcttgaagatacactttcctgaaaaatgatttgtgatggattgtatatttatttaaaatatcttgggaggggaggctgatggagatagggagcatgctcaaacctccctaagacaagctgctgctgtgactatgggctcccaaagagctagatcgtatatttatttgacaaaaatcaccatagactgcatccatactacagagaaaaaacaattagggcgcaaatggatagttacagtaaagtcttcagcaagcagctgcctgtattctaagcactgggattttctgtttcgtgcaaatatttatctcattatgttgtgatctagttcaataacctagaatttgaattgtcaccacatagctttcaatctgtgccaacaactatacaattcatcaagtgtg

SEQ ID NO: 418348 - DNA, 992 bp, Homo sapiens
tgctgtactgagagagaatgttacataacattgagaactagtacaagtaaatattaaagtgaagtgaccatttcctacacaagctcattcagaggaggatgaagaccattttggaggaagaaaagcacccttattaagaattgcagcaagtaagccaacaaggtcttttcaggatgattttcttatatcaagtggtacatttcattttatttacttcagtttctggtgaatgtgtgactcagttgttgaaggacacctgctttgaaggaggggacattactacggtcttcacaccaagcgccaagtactgccaggtagtctgcacttaccacccaagatgtttactcttcactttcacggcggaatcaccatctgaggatcccacccgatggtttacttgtgtcctgaaagacagtgttacagaaacactgccaagagtgaataggacagcagcgatttctgggtattctttcaagcaatgctcacaccaaataagcgcttgcaacaaagacatttatgtggacctagacatgaagggcataaactataacagctcagttgccaagagtgctcaagaatgccaagaaagatgcacggatgacgtccactgccactttttcacgtacgccacaaggcagtttcccagcctggagcatcggtgagtgagtcccaggacattcgagtggtcgatgaaaaacagaatcgtgatttactaaaaagcttttgccatcaactttatgccagaatttattttgaacccctaaaagacatttctataaaagtactcctagttttcttcatgaaaaatacacttaaagcctaatttggatgcatttcatttatggtaaggagtctatcttttaataacactgtcagaaaaatatatatacttggctaatttcaaaagcgctacacttttaaattggcacttttgaaacagctgcaattggtatgattgtcagtgcccttcccagtctaaaaaatgttacagt

SEQ ID NO: 418349 - DNA, 691 bp, Homo sapiens
ctttttggctttctgtgtgctgacttttaagatccattattttaaaaacataaattcctattcattaatatgtattttttaaaaaaacaggtttacttgtgtcctgaaagacagtgttacagaaacactgccaagagtgaataggacagcagcgatttctgggtattctttcaagcaatgctcacaccaaataagcgcttgcaacaaagacatttatgtggacctagacatgaagggcataaactataacagctcagttgccaagagtgctcaagaatgccaagaaagatgcacggatgacgtccactgccactttttcacgtacgccacaaggcagtttcccagcctggagcatcggtgagtgagtcccaggacattcgagtggtcgatgaaaaacagaatcgtgatttactaaaaagcttttgccatcaactttatgccagaatttattttgaacccctaaaagacatttctataaaagtactcctagttttcttcatgaaaaatacacttaaagcctaatttggatgcatttcatttatggtaaggagtctatcttttaataacactgtcagaaaaatatatatacttggctaatttcaaaagcgctacacttttaaattggcacttttgaaacagctgcaattggtatgattgtcagtgcccttcccagtctaaaaaatgttacagt

SEQ ID NO: 418350 - DNA, 3205 bp, Homo sapiens
tgctgtactgagagagaatgttacataacattgagaactagtacaagtaaatattaaagtgaagtgaccatttcctacacaagctcattcagaggaggatgaagaccattttggaggaagatgattttcttatatcaagtggtacatttcattttatttacttcagtttctggtgaatgtgtgactcagttgttgaaggacacctgctttgaaggaggggacattactacggtcttcacaccaagcgccaagtactgccaggtagtctgcacttaccacccaagatgtttactcttcactttcacggcggaatcaccatctgaggatcccacccgatggtttacttgtgtcctgaaagacagtgttacagaaacactgccaagagtgaataggacagcagcgatttctgggtattctttcaagcaatgctcacaccaaataagcgcttgcaacaaagacatttatgtggacctagacatgaagggcataaactataacagctcagttgccaagagtgctcaagaatgccaagaaagatgcacggatgacgtccactgccactttttcacgtacgccacaaggcagtttcccagcctggagcatcgtaacatttgtctactgaagcacacccaaacagggacaccaaccagaataacgaagctcgataaagtggtgtctggattttcactgaaatcctgtgcactttctaatctggcttgtattagggacattttccctaatacggtgtttgcagacagcaacatcgacagtgtcatggctcccgatgcttttgtctgtggccgaatctgcactcatcatcccggttgcttgttttttaccttcttttcccaggaatggcccaaagaatctcaaagaaatctttgtctccttaaaacatctgagagtggattgcccagtacacgcattaaaaagagcaaagctctttctggtttcagtctacaaagctgcaggcacagcatcccagtgttctgccattcttcattttaccatgacactgatttcttgggagaagaactggatattgttgctgcaaaaagtcacgaggcctgccagaaactgtgcaccaatgccgtccgctgccagttttttacctataccccagcccaagcatcctgcaacgaagggaagtaagccatatgaagggttatgcagacacccttgtcccgtctgcctgtgaggtgcattatgtttataccgttttgtttccaactgcaggggcaagtgttacttaaagctttcttcaaacggatctccaactaaaatacttcacgggagaggaggcatctctggatacacattaaggttgtgtaaaatggataatgagcttagaggcgctccgatgaaaatctctggatggctcaagacttcttaaaaaagtgtaccaccaaaatcaagcccaggatcgttggaggaactgcgtctgttcgtggtgagtggccgtggcaggtgaccctgcacacaacctcacccactcagagacacctgtgtggaggctccatcattggaaaccagtggatattaacagccgctcactgtttctatggggtagagtcacctaagattttgcgtgtctacagtggcattttaaatcaatctgaaataaaagaggacacatctttctttggggttcaagaaataataatccatgatcagtataaaatggcagaaagcgggtatgatattgccttgttgaaactggaaaccacagtgaattacacagattctcaacgacccatatgcctgccttccaaaggagatagaaatgtaatatacactgattgctgggtgactggatgggggtacagaaaactaagagacaaaatacaaaatactctccagaaagccaagatacccttagtgaccaacgaagagtgccagaagagatacagaggacataaaataacccataagatgatctgtgccggctacagggaaggagggaaggacgcttgcaagggagattcgggaggccctctgtcctgcaaacacaatgaggtctggcatctggtaggcatcacgagctggggcgaaggctgtgctcaaagggagcggccaggtgtttacaccaacgtggtcgagtacgtggactggattctggagaaaactcaagcagtgtgaatgggttcccaggggccattggagtccctgaaggacccaggatttgctgggagagggtgttgagttcactgtgccagcatgcttcctccacagtaacacgctgaaggggcttggtgtttgtaagaaaatgctagaagaaaacaaactgtcacaagttgttatgtccaaaactcccgttctatgatcgttgtagtttgtttgagcattcagtctctttgtttttgatcacgcttctatggagtccaagaattaccataaggcaatatttctgaagattactatataggcagatatagcagaaaataaccaagtagtggcagtggggatcaggcagaagaactggtaaaagaagccaccataaatagatttgttcgatgaaagatgaaaactggaagaaaggagaacaaagacagtcttcaccattttgcaggaatctacactctgcctatgtgaacacatttcttttgtaaagaaagaaattgattgcatttaatggcagattttcagaatagtcaggaattcttgtcatttccattttaaaatatatattaaaaaaaatcagttcgagtagacacgagctaagagtgaatgtgaagataacagaatttctgtgtggaagaggattacaagcagcaatttacctggaagtgataccttaggggcaatcttgaagatacactttcctgaaaaatgatttgtgatggattgtatatttatttaaaatatcttgggaggggaggctgatggagatagggagcatgctcaaacctccctaagacaagctgctgctgtgactatgggctcccaaagagctagatcgtatatttatttgacaaaaatcaccatagactgcatccatactacagagaaaaaacaattagggcgcaaatggatagttacagtaaagtcttcagcaagcagctgcctgtattctaagcactgggattttctgtttcgtgcaaatatttatctcattatgttgtgatctagttcaataacctagaatttgaattgtcaccacatagctttcaatctgtgccaacaactatacaattcatcaagtgtg

SEQ ID NO: 418351 - DNA, 690 bp, Homo sapiens
ggttctggagacttagggattggcaaaggttaaggtaaaactttactagtaacaatgagtgtggtaggatggaaataagtgtttagattacacgagacctgtaataacataaaagttacaataaaaatccaaccagcagtgtttccatcccagtggccaatttctgagcatagtcacgagagatgctttgtaggcaaacagaattgttctaagggacaaaatccccaacaggaaagaacacaccacaaacactcctgcttaaattaccatagtaacttaggatggctttactatatattgatttacataaagctgcatgttcttatactgtttattgccaaatgtccaatattacaatacactataaggtgcaactgagatttaatgaataaaatggaagtaacaatcctgcctcgtgatagttttagaagcacaaaaacattctgtgtcagattatctgctataccgagaaggcgaatcaatccttaatttctgagaacttgttttgtagaacataaagacgttatattgcctccaacactggtatcctaactaacagactatgccttcctagagcttagaggcgctccgatgaaaatctctggatggctcaagacttcttaaaaagcaagtcaattacgtcgtatctcatacattctgttttcctcacaataaatttccctaagacaa

SEQ ID NO: 418352 - DNA, 770 bp, Homo sapiens
aggcaaaatcaagttctacatctgtccctgtgtatgtcacttgtttgaatacgaaataaaattaaaaaaataaattcagtgtattgagaaagcaagcaattctctcaaggtatatttctgacatactaagattttaacgactttcacaaatatgctgtactgagagagaatgttacataacattgagaactagtacaagtaaatattaaagtgaagtgaccatttcctacacaagctcattcagaggaggatgaagaccattttggaggaagaaaagcacccttattaagaattgcagcaagtaagccaacaaggtcttttcaggtacagtttcagaacttactatttaacattcctctcaagcaaatacgccttgaaatgctttttttaaatcataggaatttaaaaacactttacaatagagaatgattgatttttaaaatgtgtctgatttagctttgtagagatgttccgctaatatccataactaatctgagaggaaatgtggaacaacagaagagtaacagtgtctactcagtaacaagcgttttacgagttaaaaagacatccaaatgcagtactgaaaaatcagaagtcttgatttgtctcactgatgactccgtttttcctagagcagtctgtttaatgcttactggagataaatagatttataggtgaccaagacaatcgattaatgtatcagccacagacttttttaaatagaaaattttctaagtaggaaatcattcatagctctttgaaagatatag

SEQ ID NO: 418353 - DNA, 2043 bp, Homo sapiens
tcttttgattaaagcccaaattgtcattgggcagaagcaatcatgtgacagccaattcggtccaatttcaaccttgtctccatgaattcaatagtttaatagtagcgcggtccccatacggctgtaatcagtgaattagaaaaaaaacaccctagcagcgatattctatgatagattttttttcctctgcgctcgcctttttcctaggccttgcccccccaaagcccctccaaaagagggaactttttctctgagggggctccaaggagaaggccatgaattacgaatttgagcgagagattggttttatcaatagccagccgtcgctcgctgagtgcctgacatcttttccccctgtcgctgatacatttcaaagttcatcaatcaagacctcgacgctttcacactcgacactgattcctcctccttttgagcagaccattcccagcctgaaccccggcagtcaccctcgccacggcgctggcggccgccccaagccgagccccgcgggcagccgcggcagcccggtgcccgccggcgccctgcagccgcccgagtacccctggatgaaggagaagaaggcggccaagaaaaccgcacttctgccggccgccgccgccgccgccaccgccgcagccaccggccctgcttgcctcagccacaaagaatccctggaaatcgccgatggcagcggcgggggatcgcggcgcctgagaactgcttacaccaacacacagcttctagagctggaaaaagaatttcatttcaacaagtacctttgcagaccccgaagggtggagattgcagcgctgctggatttgactgagagacaagtgaaagtgtggtttcagaaccggaggatgaagcacaagaggcagacccagtgcaaggaaaaccaaaacagcgaagggaaatgtaaaagccttgaggactccgagaaagtagaggaggacgaggaagagaagacgctctttgagcaagcccttagcgtctctggggcccttctggagagggaaggctacacttttcagcaaaatgccctctctcagcagcaggctcccaatggacacaatggcgactcccaaagtttcccagtctcgcctttaaccagcaatgagaaaaatctgaaacattttcagcaccagtcacccactgttcccaactgcttgtcaacaatgggccagaactgtggagctggcctaaacaatgacagtcctgaggcccttgaggtcccctctttgcaggactttagcgttttctccacagattcctgcctgcagctttcagatgcagtttcacccagtttgccaggttccctcgacagtcccgtagatatttcagctgacagcttagacttttttacagacacactcaccacaatcgacttgcagcatctgaattactaaaaacattaaagcaaaacaaagcatcaccaaacaaaaactcctttgaccaggtggttttgccttcttttatttgggagtttattttttattttcttcttgacctaccccttccctcctttaagtgttgaggattttctgtttagtgattccctgacccagtttcaaacagagccatcttttacagattattttggagttttagttgttttaaacctaactcaacaaccctttatgtgattcctgagagcagtatgaggcctgcaagaaagtgatcatataattgtatcttcactttctttttatttttgtattacattgggatgcattgtcatgcatattttttgtagaataaattctcctttgctataagtagcttatttttctccccctcttttttcaaggctcataacgggttctttttcttcttttagtctaacttcgtaaataaaattcgtcacaatttatcctcttttttcaattttaatacatttattaaggcggcatgttcaaagtcttcaatggacagcaacaaaacagaaagccaaaaaatgactagggcttctaataagtgttttttctttcttttttgcttcttcttctcctctttctttttaaaggatttgattttcagtgcaca

SEQ ID NO: 418354 - DNA, 535 bp, Homo sapiens
cccaagccgagccccgcgggcagccgcggcagcccggtgcccgccggcgccctgcagccgcccgagtacccctggatgaaggagaagaaggcggccaagaaaaccgcacttctgccggccgccgccgccgccgccaccgccgcagccaccggccctgcttgcctcagccacaaaggtcagtccaaagacttggccccaggtctctgggaccctcttccttctccgggctgccccgagagtggctgtggggggaggggagagtgggctgggagagaaggaggagagggagagatgcttggttgccttgtccctgcccctgtgggttcaggagtgggtttgatggagaggaaaggggatcctgcgctctacaatgagacatatatatttttaggaagtggggggaaactttcccgaacttgtgtaatgtgggatgatttatttgagttggaactgacctcctcctgtctagttgtcctagagtttggctttttgacagtaatgaagagtgatagatcgctcttgctcagctaagcag

SEQ ID NO: 418355 - DNA, 1434 bp, Homo sapiens
tcttttgattaaagcccaaattgtcattgggcagaagcaatcatgtgacagccaattcggtccaatttcaaccttgtctccatgaattcaatagtttaatagtagcgcggtccccatacggctgtaatcagtgaattagaaaaaaaacaccctagcagcgatattctatgatagattttttttcctctgcgctcgcctttttcctaggccttgcccccccaaagcccctccaaaagagggaactttttctctgagggggctccaaggagaaggccatgaattacgaatttgagcgagagattggttttatcaatagccagccgtcgctcgctgagtgcctgacatcttttccccctgtcgctgatacatttcaaagttcatcaatcaagacctcgacgctttcacactcgacactgattcctcctccttttgagcagaccattcccagcctgaaccccggcagtcaccctcgccacggcgctggcggccgccccaagccgagccccgcgggcagccgcggcagcccggtgcccgccggcgccctgcagccgcccgagtacccctggatgaaggagaagaaggcggccaagaaaaccgcacttctgccggccgccgccgccgccgccaccgccgcagccaccggccctgcttgcctcagccacaaagaatccctggaaatcgccgatggcagcggcgggggatcgcggcgcctgagaactgcttacaccaacacacagcttctagagctggaaaaagaatttcatttcaacaagtacctttgcagaccccgaagggtggagattgcagcgctgctggatttgactgagagacaagtgaaagtgtggtttcagaaccggaggatgaagcacaagaggcagacccagtgcaaggaaaaccaaaacagcgaagggaaatgtaaaagccttgaggactccgagaaagtagaggaggacgaggaagagaagacgctctttgagcaagcccttagcgtctctggggcccttctggagagggaaggctacacttttcagcaaaatgccctctctcagcagcaggctcccaatggacacaatggcgactcccaaagtttcccagtctcgcctttaaccagcaatgagaaaaatctgaaacattttcagcaccagtcacccactgttcccaactgcttgtcaacaatgggccagaactgtggagctggcctaaacaatgacagtcctgaggcccttgaggtcccctctttgcaggactttagcgttttctccacagattcctgcctgcagctttcagatgcagtttcacccagtttgccaggttccctcgacagtcccgtagatatttcagctgacagcttagacttttttacagacacactcaccacaatcgacttgcagcatctgaattactaaaaacattaaagcaaaacaaagcatcacc

SEQ ID NO: 418356 - DNA, 403 bp, Homo sapiens
tttggggctgtatcctgactctccttggaatctgttacagataggctccccactcaccaccaagaaataattagattctgtagacaaaatatatagtaatttctctgtaccagagcagttcttaaatatctgtttgaatgttgtttctggtgggggtttttctctttctgatttgtcattttaaaggtgtagacttagccactgaggaggtggccagccaggaggatatgaggcacccattaggatcacagttgaggctgggcacagtggctcatgcctgtaatcccagcactttgggaggcctagacaggagcatcccttgaaatctggagttcgagaccaacctgggctgcagtgagccaagatcacaccactgcactctagcctgggtgacagagatgct

SEQ ID NO: 418357 - DNA, 413 bp, Homo sapiens
ataggggctagaatttcttcagtaaggtatagtttaggttgcagaattcaatgaatgatgatttattgccatttagcattgggtttaatagatgaaagaaatgcctttattctcacaagagaccgtggctaggctgatcctgccatgaagacaaaaggaaaaatgaaattattaccaagtacttatgctgagcatctttagaaagtaatttgtaatacattttattagttaattgtgaaaattgacttctgacgttacatagtgcgatatagcaagttctaagacaagctgtgagtagacaaaattccccttcctgaatctttccttttctacactttttcctctttttcaggtacccttcacaggtttaacagcctccacccctcgggcaccaagcagtgttatccaggaaa

SEQ ID NO: 418358 - DNA, 441 bp, Homo sapiens
acctctcccgagaccggccaggcccctacagtacaggggctgaagggtgtagcacgagccctaaaagagatgcagctggaggccgccccgcacaaggcgctggggtggaccggggaggcgccttacccagtggaaagactcccggatcaagggagaaagttacgcaggcttccgatcctgatccgccatcagccgccgaacctcttccgccactaccgcctacccccaaagaccggctacacctcccctcccagccgacagtaggccttgcgtcacttccgcccacggggcggtctcttccgcctcctgcctggttcgccgctcccctccgcgacgacacgcccccagcccactccgccgcgggacgcctcatcccgcgggtacccttcacaggtttaacagcctccacccctcgggcaccaagcagtgttatccaggaaa

SEQ ID NO: 418359 - DNA, 754 bp, Homo sapiens
tcaccgttttagtggcatttaaatccccggcgctccgccgtctaggtgacgcgcagtcgcccccccaggcagcctaggcggcggcagctgctgcggcgactgcaaaggccgatttggagtgctggagcgaagaagagcaaaagctgcgttctgcgcgcgcccgactccgctgcccgccccgccaggcctccgggaggtgggggctgggaggcgtcccccgctcccgccccctccccaccgttcaatgaaagatgaactggcgagaggtctgttttgcctgaacccatcaacagctgggagattaatcaaccacactgaaaatgtggagggatttatgggggagggggttgaaatgtgggtgtttgaaacaaaagtgtataaacaaatgaattgttgataacttagttattgacctggagactggtagcttattaaagaaactccgtgttactcattcctggagttgggggtttctgtaggcactttatttctccactttcaagagcttgggcttggcccaaatcttagactgtccaattctgcctctattaccaatttaaatctatggcttgaacctgtgcactgaaaatcaaatcctttaaaaagaaagaggagaagaagaagcaaaaaagaaagaaaaaacacttattagaagccctagtcattttttggctttctgttttgttgctgtccattgaagactttgaacatgccgccttaataaatgtattaaaattgaaaaaagaaaaaaaat

SEQ ID NO: 418360 - DNA, 820 bp, Homo sapiens
tcaccgttttagtggcatttaaatccccggcgctccgccgtctaggtgacgcgcagtcgcccccccaggcagcctaggcggcggcagctgctgcggcgactgcaaaggccgatttggagtgctggagcgaagaagagcaaaagctgcgttctgcgcgcgcccgactccgctgcccgccccgccaggcctccgggaggtgggggctgggaggcgtcccccgctcccgccccctccccaccgttcaatgaaagatgaactggcgagagaaagcgtttgatttatgagcgtaggacgaatcgcatccaggagctgcgcagccctggccgcggccgggacgccctgctccgcgctgagcttggggccagaaaccagccatagtccccacactccgccgccgcagctaagatttagcggaggaaggggcgagggaaggtagggagcaaacctatgaagaaacatcgcgttgtcattggaacttccaagcctttgctgttaagagccaggttcttaaatcaacccgccccacacacatgttgcttacatgctgcgttttctcacggtctgttttgcctgaacccatcaacagctgggagattaatcaaccacactgaaaatgtggagggatttatgggggagggggttgaaatgtgggtgtttgaaacaaaagtgtataaacaaatgaattgttgataacttagttattgacctggagactggtagcttattaaagaaactccgtgttactcaaaaaagatactgatagaccaagaaaaccggcgcctttaattcgggggcaacaaaggggtcttcaagggccttg

SEQ ID NO: 418361 - DNA, 3839 bp, Homo sapiens
atcagtgggccagagctcgccgggtggccgcaagtacgccggcccagcccgcagcgcgcccagccggaaggcggggaatccggctgacaccgcgccccgggttcccaggccacctcctctgttctgaggctgggctgggagaccgtggggctgtgaggagcgcatagaaccgtggtggagggcgaggctgggccaccggttcttcaagctcggaatggagggggaagagcgcagagggctggctgggaggaactcgggtgggcgtgaaggagacgagggcaagaaaagaaacttcccttcttccaggagggtcttcgaaaccctctccccacagcccctctcgtcattagcatggcaatgaggagtttctgtaattcgacttggaggggcggatgagccctggaaactcagagctcgccggaaaaggccgggggcggccgggctcttcttccccaccttccctctctcgtcgctctccgcccctttctctttcccactcagttttgcaccgggagccctccgggatgcggagctactcgaccgccggatttttaggggtaggaggcgggggagagagatgacgctggcggacgtggccagcgcgggggccgggcggtgcgctgcaggccatctgccggcgccctgagacccaggagcctccgcgctcccgcgtgggcctcagagggccggtccacagctccaacatagtagctgaactcccttcgttgcgttcctctttttctggaggggaatgttagaagagagagagagcttccttttataaccttcctcattctgctgcacgtctagagtgggtgtgggggctggcaggtgggaggggcggtggacaaatggctgatggtggacgggacactttaccccaacgacacctcctcccctttccaactggctgtgtagttgcttatgagaaccttcaagtccttccctagagagacacatgcaaatctgagcctcatcccaggccaggggtcctgttcctcatcaccctacttccctgaggctgctgaggtcgttaaattgttgtttactattaggtttcacgtcaaccctgggcttgtagagagaaaaagccaaacggagaccaagaattgatgcagtcttgggtaggagaaatcgagagcttgtccaggaagctttgctgtataaattataagcaatgctgtataaattttactccaaccatgtgtacaatgttggaatcagatgaaatttatagtgaatgaatgtatgtgggtttggggtttccactcctcttcagcctttcctcccgttagaacaaggaaggttttttttttttcaaggaaggtacatttcaaatatgttagtcaccctttcagtcttctgtattctgttctccacgtaccgaagttcccccaaacctgtcctctcaagagaaaaaacccatgctgactctggactccctcagtaacaatgaaacattctccccaaacatttcctttcagaatagtatttgtgactttgatccatcccaagcatggttaagagggagcacgggcaggaaaggcccactttctggggttgggcagccacccctgccccagtttcggctcctgggaatcctccgactggagaaggggaaaggcaaggcagtcctcctggaggcggcttccttgggagcaccagcttccagcggcggggagagaaggagctcctgtgggagagggggcaggatgtgagtaggtcggtgctggctatgcgagcaatcctccctccaagcctgagcaagtcggtacattttcccccgctgcctcattcctgtaccttggttgccctcctcagcctgggtttgcaggaccccctcggctgcagggcgcctgccacaaagccgaccccggcaggagccactctctctgctagttcgctgcctcggccctgctctccctcagcctctcttcttctctcctggcctcttttctggggcatcctgggtggagtgtttttcttgggatcacgagcttgcactcgcacacaggcccgcagacacacaggcccggcggccgcccttctccgcttactgttcccggctccccgcaggccgggtgctcgcagccgggctggctatgcctcgcctggcagcccagagcgccgctccccgggaacagcacacaaaggcagcctcccctggcctctagcccttaggcttctgtagctcagttctttccccacacccctcccccaagaaattctgggggccgttccaccgagtaggagatccttggccctctaggcaagtaggtcagcgccccaagactggagctggtctctttcaacgccttgggagactgggtgaaaggcgagcttggttacgcttaaaatgatcgcctacaagcggttctcttggctcaaaacgcctctttcagggctcttatgctagaaaggaaaggaataaggaggagataaaatgacgccgaggccctgaactgttcatggcatccgcggctcagccaagctgttgttttaaaagagcaataaaaatgaattatgactaaacgccttctaacttaatgctttcggacggggatccccggcaaataacgtaagaggatttttatttgtgcatgtgttcctgcaattgatctctttgatgacattctcattcatagaaagcgtttgatttatgagcgtaggacgaatcgcatccaggagctgcgcagccctggccgcggccgggacgccctgctccgcgctgagcttggggccagaaaccagccatagtccccacactccgccgccgcagctaagatttagcggaggaaggggcgagggaaggtagggagcaaacctatgaagaaacatcgcgttgtcattggaacttccaagcctttgctgttaagagccaggttcttaaatcaacccgccccacacacatgttgcttacatgctgcgttttctcacggtaagtaagtaggcatcagaagagagctcagaaagggaaaaataaacatggggagacctaacaagggaggggggaaaagcaacaacccagtgacacaccctagatcacattttattgatatttcatttaaagtgcttttctctctctctagaacctgcgttaatttataacctagggtgtagaaacacaccattttaaatctcaacttgctaacctgacttcgaagcattaacgatctattattagcaatgtaaacaggtttaagaatgaaatattgatttttctgaccctgaaaaaaaaaaaaaaatccttagagtgactgaaccagaggattggaaagaacattttctagggtgcattttccagatagtaatcactgttttgttttatttttgtttttctctatcttttaggtctgttttgcctgaacccatcaacagctgggagattaatcaaccacactgaaaatgtggagggatttatgggggagggggttgaaatgtgggtgtttgaaacaaaagtgtataaacaaatgaattgttgataacttagttattgacctggagactggtagcttattaaagaaactccgtgttactcattcctggagttgggggtttctgtaggcactttatttctccactttcaagagcttgggcttggcccaaatcttagactgtccaattctgcctctattaccaatttaaatctatggcttgaacctgtgcactgaaaatcaaatcctttaaaaagaaagaggagaagaagaagcaaaaaagaaagaaaaaacacttattagaagccctagtcattttttggctttctgttttgttgctgtccattgaagactttgaacatgccgccttaataaatgtattaaaattgaaaaaagaaaaaaaat

SEQ ID NO: 418362 - DNA, 3426 bp, Homo sapiens
atcagtgggccagagctcgccgggtggccgcaagtacgccggcccagcccgcagcgcgcccagccggaaggcggggaatccggctgacaccgcgccccgggttcccaggccacctcctctgttctgaggctgggctgggagaccgtggggctgtgaggagcgcatagaaccgtggtggagggcgaggctgggccaccggttcttcaagctcggaatggagggggaagagcgcagagggctggctgggaggaactcgggtgggcgtgaaggagacgagggcaagaaaagaaacttcccttcttccaggagggtcttcgaaaccctctccccacagcccctctcgtcattagcatggcaatgaggagtttctgtaattcgacttggaggggcggatgagccctggaaactcagagctcgccggaaaaggccgggggcggccgggctcttcttccccaccttccctctctcgtcgctctccgcccctttctctttcccactcagttttgcaccgggagccctccgggatgcggagctactcgaccgccggatttttaggggtaggaggcgggggagagagatgacgctggcggacgtggccagcgcgggggccgggcggtgcgctgcaggccatctgccggcgccctgagacccaggagcctccgcgctcccgcgtgggcctcagagggccggtccacagctccaacatagtagctgaactcccttcgttgcgttcctctttttctggaggggaatgttagaagagagagagagcttccttttataaccttcctcattctgctgcacgtctagagtgggtgtgggggctggcaggtgggaggggcggtggacaaatggctgatggtggacgggacactttaccccaacgacacctcctcccctttccaactggctgtgtagttgcttatgagaaccttcaagtccttccctagagagacacatgcaaatctgagcctcatcccaggccaggggtcctgttcctcatcaccctacttccctgaggctgctgaggtcgttaaattgttgtttactattaggtttcacgtcaaccctgggcttgtagagagaaaaagccaaacggagaccaagaattgatgcagtcttgggtaggagaaatcgagagcttgtccaggaagctttgctgtataaattataagcaatgctgtataaattttactccaaccatgtgtacaatgttggaatcagatgaaatttatagtgaatgaatgtatgtgggtttggggtttccactcctcttcagcctttcctcccgttagaacaaggaaggttttttttttttcaaggaaggtacatttcaaatatgttagtcaccctttcagtcttctgtattctgttctccacgtaccgaagttcccccaaacctgtcctctcaagagaaaaaacccatgctgactctggactccctcagtaacaatgaaacattctccccaaacatttcctttcagaatagtatttgtgactttgatccatcccaagcatggttaagagggagcacgggcaggaaaggcccactttctggggttgggcagccacccctgccccagtttcggctcctgggaatcctccgactggagaaggggaaaggcaaggcagtcctcctggaggcggcttccttgggagcaccagcttccagcggcggggagagaaggagctcctgtgggagagggggcaggatgtgagtaggtcggtgctggctatgcgagcaatcctccctccaagcctgagcaagtcggtacattttcccccgctgcctcattcctgtaccttggttgccctcctcagcctgggtttgcaggaccccctcggctgcagggcgcctgccacaaagccgaccccggcaggagccactctctctgctagttcgctgcctcggccctgctctccctcagcctctcttcttctctcctggcctcttttctggggcatcctgggtggagtgtttttcttgggatcacgagcttgcactcgcacacaggcccgcagacacacaggcccggcggccgcccttctccgcttactgttcccggctccccgcaggccgggtgctcgcagccgggctggctatgcctcgcctggcagcccagagcgccgctccccgggaacagcacacaaaggcagcctcccctggcctctagcccttaggcttctgtagctcagttctttccccacacccctcccccaagaaattctgggggccgttccaccgagtaggagatccttggccctctaggcaagtaggtcagcgccccaagactggagctggtctctttcaacgccttgggagactgggtgaaaggcgagcttggttacgcttaaaatgatcgcctacaagcggttctcttggctcaaaacgcctctttcagggctcttatgctagaaaggaaaggaataaggaggagataaaatgacgccgaggccctgaactgttcatggcatccgcggctcagccaagctgttgttttaaaagagcaataaaaatgaattatgactaaacgccttctaacttaatgctttcggacggggatccccggcaaataacgtaagaggatttttatttgtgcatgtgttcctgcaattgatctctttgatgacattctcattcatagaaagcgtttgatttatgagcgtaggacgaatcgcatccaggagctgcgcagccctggccgcggccgggacgccctgctccgcgctgagcttggggccagaaaccagccatagtccccacactccgccgccgcagctaagatttagcggaggaaggggcgagggaaggtagggagcaaacctatgaagaaacatcgcgttgtcattggaacttccaagcctttgctgttaagagccaggttcttaaatcaacccgccccacacacatgttgcttacatgctgcgttttctcacggtctgttttgcctgaacccatcaacagctgggagattaatcaaccacactgaaaatgtggagggatttatgggggagggggttgaaatgtgggtgtttgaaacaaaagtgtataaacaaatgaattgttgataacttagttattgacctggagactggtagcttattaaagaaactccgtgttactcattcctggagttgggggtttctgtaggcactttatttctccactttcaagagcttgggcttggcccaaatcttagactgtccaattctgcctctattaccaatttaaatctatggcttgaacctgtgcactgaaaatcaaatcctttaaaaagaaagaggagaagaagaagcaaaaaagaaagaaaaaacacttattagaagccctagtcattttttggctttctgttttgttgctgtccattgaagactttgaacatgccgccttaataaatgtattaaaattgaaaaaagaaaaaaaat

SEQ ID NO: 418363 - DNA, 3158 bp, Homo sapiens
atcagtgggccagagctcgccgggtggccgcaagtacgccggcccagcccgcagcgcgcccagccggaaggcggggaatccggctgacaccgcgccccgggttcccaggccacctcctctgttctgaggctgggctgggagaccgtggggctgtgaggagcgcatagaaccgtggtggagggcgaggctgggccaccggttcttcaagctcggaatggagggggaagagcgcagagggctggctgggaggaactcgggtgggcgtgaaggagacgagggcaagaaaagaaacttcccttcttccaggagggtcttcgaaaccctctccccacagcccctctcgtcattagcatggcaatgaggagtttctgtaattcgacttggaggggcggatgagccctggaaactcagagctcgccggaaaaggccgggggcggccgggctcttcttccccaccttccctctctcgtcgctctccgcccctttctctttcccactcagttttgcaccgggagccctccgggatgcggagctactcgaccgccggatttttaggggtaggaggcgggggagagagatgacgctggcggacgtggccagcgcgggggccgggcggtgcgctgcaggccatctgccggcgccctgagacccaggagcctccgcgctcccgcgtgggcctcagagggccggtccacagctccaacatagtagctgaactcccttcgttgcgttcctctttttctggaggggaatgttagaagagagagagagcttccttttataaccttcctcattctgctgcacgtctagagtgggtgtgggggctggcaggtgggaggggcggtggacaaatggctgatggtggacgggacactttaccccaacgacacctcctcccctttccaactggctgtgtagttgcttatgagaaccttcaagtccttccctagagagacacatgcaaatctgagcctcatcccaggccaggggtcctgttcctcatcaccctacttccctgaggctgctgaggtcgttaaattgttgtttactattaggtttcacgtcaaccctgggcttgtagagagaaaaagccaaacggagaccaagaattgatgcagtcttgggtaggagaaatcgagagcttgtccaggaagctttgctgtataaattataagcaatgctgtataaattttactccaaccatgtgtacaatgttggaatcagatgaaatttatagtgaatgaatgtatgtgggtttggggtttccactcctcttcagcctttcctcccgttagaacaaggaaggttttttttttttcaaggaaggtacatttcaaatatgttagtcaccctttcagtcttctgtattctgttctccacgtaccgaagttcccccaaacctgtcctctcaagagaaaaaacccatgctgactctggactccctcagtaacaatgaaacattctccccaaacatttcctttcagaatagtatttgtgactttgatccatcccaagcatggttaagagggagcacgggcaggaaattctgggggccgttccaccgagtaggagatccttggccctctaggcaagtaggtcagcgccccaagactggagctggtctctttcaacgccttgggagactgggtgaaaggcgagcttggttacgcttaaaatgatcgcctacaagcggttctcttggctcaaaacgcctctttcagggctcttatgctagaaaggaaaggaataaggaggagataaaatgacgccgaggccctgaactgttcatggcatccgcggctcagccaagctgttgttttaaaagagcaataaaaatgaattatgactaaacgccttctaacttaatgctttcggacggggatccccggcaaataacgtaagaggatttttatttgtgcatgtgttcctgcaattgatctctttgatgacattctcattcatagaaagcgtttgatttatgagcgtaggacgaatcgcatccaggagctgcgcagccctggccgcggccgggacgccctgctccgcgctgagcttggggccagaaaccagccatagtccccacactccgccgccgcagctaagatttagcggaggaaggggcgagggaaggtagggagcaaacctatgaagaaacatcgcgttgtcattggaacttccaagcctttgctgttaagagccaggttcttaaatcaacccgccccacacacatgttgcttacatgctgcgttttctcacggtaagtaagtaggcatcagaagagagctcagaaagggaaaaataaacatggggagacctaacaagggaggggggaaaagcaacaacccagtgacacaccctagatcacattttattgatatttcatttaaagtgcttttctctctctctagaacctgcgttaatttataacctagggtgtagaaacacaccattttaaatctcaacttgctaacctgacttcgaagcattaacgatctattattagcaatgtaaacaggtttaagaatgaaatattgatttttctgaccctgaaaaaaaaaaaaaaatccttagagtgactgaaccagaggattggaaagaacattttctagggtgcattttccagatagtaatcactgttttgttttatttttgtttttctctatcttttaggtctgttttgcctgaacccatcaacagctgggagattaatcaaccacactgaaaatgtggagggatttatgggggagggggttgaaatgtgggtgtttgaaacaaaagtgtataaacaaatgaattgttgataacttagttattgacctggagactggtagcttattaaagaaactccgtgttactcattcctggagttgggggtttctgtaggcactttatttctccactttcaagagcttgggcttggcccaaatcttagactgtccaattctgcctctattaccaatttaaatctatggcttgaacctgtgcactgaaaatcaaatcctttaaaaagaaagaggagaagaagaagcaaaaaagaaagaaaaaacacttattagaagccctagtcattttttggctttctgttttgttgctgtccattgaagactttgaacatgccgccttaataaatgtattaaaattgaaaaaagaaaaaaaat

SEQ ID NO: 418364 - DNA, 1436 bp, Homo sapiens
tcaccgttttagtggcatttaaatccccggcgctccgccgtctaggtgacgcgcagtcgcccccccaggcagcctaggcggcggcagctgctgcggcgactgcaaaggccgatttggagtgctggagcgaagaagagcaaaagctgcgttctgcgcgcgcccgactccgctgcccgccccgccaggcctccgggaggtgggggctgggaggcgtcccccgctcccgccccctccccaccgttcaatgaaagatgaactggcgagaggacgaatcgcatccaggagctgcgcagccctggccgcggccgggacgccctgctccgcgctgagcttggggccagaaaccagccatagtccccacactccgccgccgcagctaagatttagcggaggaaggggcgagggaaggtagggagcaaacctatgaagaaacatcgcgttgtcattggaacttccaagcctttgctgttaagagccaggttcttaaatcaacccgccccacacacatgttgcttacatgctgcgttttctcacggtaagtaagtaggcatcagaagagagctcagaaagggaaaaataaacatggggagacctaacaagggaggggggaaaagcaacaacccagtgacacaccctagatcacattttattgatatttcatttaaagtgcttttctctctctctagaacctgcgttaatttataacctagggtgtagaaacacaccattttaaatctcaacttgctaacctgacttcgaagcattaacgatctattattagcaatgtaaacaggtttaagaatgaaatattgatttttctgaccctgaaaaaaaaaaaaaaatccttagagtgactgaaccagaggattggaaagaacattttctagggtgcattttccagatagtaatcactgttttgttttatttttgtttttctctatcttttaggtctgttttgcctgaacccatcaacagctgggagattaatcaaccacactgaaaatgtggagggatttatgggggagggggttgaaatgtgggtgtttgaaacaaaagtgtataaacaaatgaattgttgataacttagttattgacctggagactggtagcttattaaagaaactccgtgttactcattcctggagttgggggtttctgtaggcactttatttctccactttcaagagcttgggcttggcccaaatcttagactgtccaattctgcctctattaccaatttaaatctatggcttgaacctgtgcactgaaaatcaaatcctttaaaaagaaagaggagaagaagaagcaaaaaagaaagaaaaaacacttattagaagccctagtcattttttggctttctgttttgttgctgtccattgaagactttgaacatgccgccttaataaatgtattaaaattgaaaaaagaaaaaaaat

SEQ ID NO: 418365 - DNA, 3785 bp, Homo sapiens
atcagtgggccagagctcgccgggtggccgcaagtacgccggcccagcccgcagcgcgcccagccggaaggcggggaatccggctgacaccgcgccccgggttcccaggccacctcctctgttctgaggctgggctgggagaccgtggggctgtgaggagcgcatagaaccgtggtggagggcgaggctgggccaccggttcttcaagctcggaatggagggggaagagcgcagagggctggctgggaggaactcgggtgggcgtgaaggagacgagggcaagaaaagaaacttcccttcttccaggagggtcttcgaaaccctctccccacagcccctctcgtcattagcatggcaatgaggagtttctgtaattcgacttggaggggcggatgagccctggaaactcagagctcgccggaaaaggccgggggcggccgggctcttcttccccaccttccctctctcgtcgctctccgcccctttctctttcccactcagttttgcaccgggagccctccgggatgcggagctactcgaccgccggatttttaggggtaggaggcgggggagagagatgacgctggcggacgtggccagcgcgggggccgggcggtgcgctgcaggccatctgccggcgccctgagacccaggagcctccgcgctcccgcgtgggcctcagagggccggtccacagctccaacatagtagctgaactcccttcgttgcgttcctctttttctggaggggaatgttagaagagagagagagcttccttttataaccttcctcattctgctgcacgtctagagtgggtgtgggggctggcaggtgggaggggcggtggacaaatggctgatggtggacgggacactttaccccaacgacacctcctcccctttccaactggctgtgtagttgcttatgagaaccttcaagtccttccctagagagacacatgcaaatctgagcctcatcccaggccaggggtcctgttcctcatcaccctacttccctgaggctgctgaggtcgttaaattgttgtttactattaggtttcacgtcaaccctgggcttgtagagagaaaaagccaaacggagaccaagaattgatgcagtcttgggtaggagaaatcgagagcttgtccaggaagctttgctgtataaattataagcaatgctgtataaattttactccaaccatgtgtacaatgttggaatcagatgaaatttatagtgaatgaatgtatgtgggtttggggtttccactcctcttcagcctttcctcccgttagaacaaggaaggttttttttttttcaaggaaggtacatttcaaatatgttagtcaccctttcagtcttctgtattctgttctccacgtaccgaagttcccccaaacctgtcctctcaagagaaaaaacccatgctgactctggactccctcagtaacaatgaaacattctccccaaacatttcctttcagaatagtatttgtgactttgatccatcccaagcatggttaagagggagcacgggcaggaaaggcccactttctggggttgggcagccacccctgccccagtttcggctcctgggaatcctccgactggagaaggggaaaggcaaggcagtcctcctggaggcggcttccttgggagcaccagcttccagcggcggggagagaaggagctcctgtgggagagggggcaggatgtgagtaggtcggtgctggctatgcgagcaatcctccctccaagcctgagcaagtcggtacattttcccccgctgcctcattcctgtaccttggttgccctcctcagcctgggtttgcaggaccccctcggctgcagggcgcctgccacaaagccgaccccggcaggagccactctctctgctagttcgctgcctcggccctgctctccctcagcctctcttcttctctcctggcctcttttctggggcatcctgggtggagtgtttttcttgggatcacgagcttgcactcgcacacaggcccgcagacacacaggcccggcggccgcccttctccgcttactgttcccggctccccgcaggccgggtgctcgcagccgggctggctatgcctcgcctggcagcccagagcgccgctccccgggaacagcacacaaaggcagcctcccctggcctctagcccttaggcttctgtagctcagttctttccccacacccctcccccaagaaattctgggggccgttccaccgagtaggagatccttggccctctaggcaagtaggtcagcgccccaagactggagctggtctctttcaacgccttgggagactgggtgaaaggcgagcttggttacgcttaaaatgatcgcctacaagcggttctcttggctcaaaacgcctctttcagggctcttatgctagaaaggaaaggaataaggaggagataaaatgacgccgaggccctgaactgttcatggcatccgcggctcagccaagctgttgttttaaaagagcaataaaaatgaattatgactaaacgccttctaacttaatgctttcggacggggatccccggcaaataacgtaagaggatttttatttgtgcatgtgttcctgcaattgatctctttgatgacattctcattcatagaaagcgtttgatttatgagcgtaggacgaatcgcatccaggagctgcgcagccctggccgcggccgggacgccctgctccgcgctgagcttggggccagaaaccagccatagtccccacactccgccgccgcagctaagatttagcggaggaaggggcgagggaaggtagggagcaaacctatgaagaaacatcgcgttgtcattggaacttccaagcctttgctgttaagagccaggttcttaaatcaacccgccccacacacatgttgcttacatgctgcgttttctcacggtaagtaagtaggcatcagaagagagctcagaaagggaaaaataaacatggggagacctaacaagggaggggggaaaatgcttttctctctctctagaacctgcgttaatttataacctagggtgtagaaacacaccattttaaatctcaacttgctaacctgacttcgaagcattaacgatctattattagcaatgtaaacaggtttaagaatgaaatattgatttttctgaccctgaaaaaaaaaaaaaaatccttagagtgactgaaccagaggattggaaagaacattttctagggtgcattttccagatagtaatcactgttttgttttatttttgtttttctctatcttttaggtctgttttgcctgaacccatcaacagctgggagattaatcaaccacactgaaaatgtggagggatttatgggggagggggttgaaatgtgggtgtttgaaacaaaagtgtataaacaaatgaattgttgataacttagttattgacctggagactggtagcttattaaagaaactccgtgttactcattcctggagttgggggtttctgtaggcactttatttctccactttcaagagcttgggcttggcccaaatcttagactgtccaattctgcctctattaccaatttaaatctatggcttgaacctgtgcactgaaaatcaaatcctttaaaaagaaagaggagaagaagaagcaaaaaagaaagaaaaaacacttattagaagccctagtcattttttggctttctgttttgttgctgtccattgaagactttgaacatgccgccttaataaatgtattaaaattgaaaaaagaaaaaaaat

SEQ ID NO: 418366 - DNA, 1183 bp, Homo sapiens
ctctttttcttaggttatttccatctcggttattccttgctccagcagaatcctgaaatgtccatgtatctctgagcagctatgaagaagcttcctggaaaacaataagcaaaggaaaacaaatgtgtcccatctcacatggttctaccctactaaagacaggaagatcataaactgacagatactgaaattgtaaagttggaaactacattttgcaaagtcattgaactctgagctcagttgcagtactcgggaagccatgcaggatgaagatggatacatcaccttaaatattaaaactcggaaaccagctctcgtctccgctgtcatgcagcgcaattacctacaagatgagaatgaaaatcgcacaggaactctgcaacaattagcaaagcgcttctgtcaatatgtggtaaaacaatcagaactaaagggcactttcaaaggtcataaatgcagcccctgtgacacaaactggagatattatggagatagctgctatgggttcttcaggcacaacttaacatgggaagagagtaagcagtactgcactgacatgaatgctactctcctgaagattgacaaccggaacattgtggagtacatcaaagccaggactcatttaattcgttgggtcggattatctcgccagaagtcgaatgaggtctggaagtgggaggatggctcggttatctcagaaaatatgtttgagtttttggaagatggaaaaggaaatatgaattgtgcttattttcataatgggaaaatgcaccctaccttctgtgagaacaaacattatttaatgtgtgagaggaaggctggcatgaccaaggtggaccaactaccttaatgcaaagaggtggacaggataacacagataagggctttattgtacaataaaagatatgtatgaatgcatcagtagctgaaaattgcttatttctccctttcttctcactggagttatttttaatattatctttcctatcagaattacctagtcccttctttgaatatacagaagccatcacgtgagtttatcatttgcttcccaattgttctattttcctttaattttctttcttcttgtccttcatttctaattacctgaacatggtatgatttactgcatcttcagatatacacatataacatcaaaatcaggccaatataggttagggct

SEQ ID NO: 418367 - DNA, 1282 bp, Homo sapiens
ctctttttcttaggttatttccatctcggttattccttgctccagcagaatcctgaaatgtccatgtatctctgagcagctatgaagaagcttcctggaaaacaataagcaaaggaaaacaaatgtgtcccatctcacatggttctaccctactaaagacaggaagatcataaactgacagatactgaaattgtaaagttggaaactacattttgcaaagtcattgaactctgagctcagttgcagtactcgggaagccatgcaggatgaagatggatacatcaccttaaatattaaaactcggaaaccagctctcgtctccgttggctctgcatcctcctcctggtggcgtgtgatggctttgattctgctgatcctgtgcgtggggatggttgtcgggctggtggctctggggatttggtctgtcatgcagcgcaattacctacaagatgagaatgaaaatcgcacaggaactctgcaacaattagcaaagcgcttctgtcaatatgtggtaaaacaatcagaactaaagggcactttcaaaggtcataaatgcagcccctgtgacacaaactggagatattatggagatagctgctatgggttcttcaggcacaacttaacatgggaagagagtaagcagtactgcactgacatgaatgctactctcctgaagattgacaaccggaacattgtggagtacatcaaagccaggactcatttaattcgttgggtcggattatctcgccagaagtcgaatgaggtctggaagtgggaggatggctcggttatctcagaaaatatgtttgagtttttggaagatggaaaaggaaatatgaattgtgcttattttcataatgggaaaatgcaccctaccttctgtgagaacaaacattatttaatgtgtgagaggaaggctggcatgaccaaggtggaccaactaccttaatgcaaagaggtggacaggataacacagataagggctttattgtacaataaaagatatgtatgaatgcatcagtagctgaaaattgcttatttctccctttcttctcactggagttatttttaatattatctttcctatcagaattacctagtcccttctttgaatatacagaagccatcacgtgagtttatcatttgcttcccaattgttctattttcctttaattttctttcttcttgtccttcatttctaattacctgaacatggtatgatttactgcatcttcagatatacacatataacatcaaaatcaggccaatataggttagggct

SEQ ID NO: 418368 - DNA, 325 bp, Homo sapiens
cctattttcctcagtctctatttggtgcatcaaactactatacgcagagtctgattactgattgtttgctcagttttcaaaggaatttattctaactttcccttcacaggtttgagtttttggaagatggaaaaggaaatatgaattgtgcttattttcataatgggaaaatgcaccctaccttctgtgagaacaaacattatttaatgtgtgagaggaaggctggcatgaccaaggtggaccaactaccttaatgcaaagaggtggacaggataacacagataagggctttattgtacaataaaagatatgtatgaatgcatca

SEQ ID NO: 418369 - DNA, 5295 bp, Homo sapiens
  misc_feature (1458)..(1458): n is a, c, g, or t
cactgggaggagtgcggaacgcctggtacagataggggtggggatttgggtgacgcatttaaaagacagcgtgagactcgcgccctccggcacggaaaaggccaggcgacaggtgtcgcttgaaaagactgggcttgtccttgctggtgcatgcgtcgtcggcctctgggcagcaggtttacaaaggaggaaaacgacttcttctagatttttttttcagtttcttctataaatcaaaacatctcaaaatggagacctaaaatccttaaagggacttagtctaatctcgggaggtagttttgtgcatgggtaaacaaattaagtattaactggtgttttactatccaaagaatgctaattttataaacatgatcgagttatataaggtataccataatgagtttgattttgaatttgatttgtggaaataaaggaaaagtgattctagctggggcatattgttaaagcatttttttcagagttggccaggcagtctcctactggcacattctcccattatgtagaatagaaatagtacctgtgtttgggaaagattttaaaatgagtgacagttatttggaacaaagagctaataatcaatccactgcaaattaaagaaacatgcagatgaaagttttgacacattaaaatacttctacagtgacaaagaaaaatcaagaacaaagctttttgatatgtgcaacaaatttagaggaagtaaaaagataaatgtgatgattggtcaagaaattatccagttatttacaaggccactgatattttaaacgtccaaaagtttgtttaaatgggctgttaccgctgagaatgatgaggatgagaatgatggttgaaggttacattttaggaaatgaagaaacttagaaaattaatataaagacagtgatgaatacaaagaagatttttataacaatgtgtaaaatttttggccagggaaaggaatattgaagttagatacaattacttacctttgagggaaataattgttggtaatgagatgtgatgtttctcctgccacctggaaacaaagcattgaagtctgcagttgaaaagcccaacgtctgtgagatccaggaaaccatgcttgcaaaccactggtaaaaaaaaaaaaaaaaaaaaaaaaaagccacagtgacttgcttattggtcattgctagtattatcgactcagaacctctttactaatggctagtaaatcataattgagaaattctgaattttgacaaggtctctgctgttgaaatggtaaatttattattttttttgtcatgataaattctggttcaaggtatgctatccatgaaataatttctgaccaaaactaaattgatgcaatttgattatccatcttagcctacagatggcatctggtaacttttgactgttttaaaaataaatccactatcagagtagatttgatgttggcttcagaaacatttngaaaaacaaaagttcaaaaatgttttcaggaggtgataagttgaataactctacaatgttagttctttgagggggacaaaaaatttaaaatctttgaaaggtcttattttacagccatatctaaattatcttaagaaaatttttaacaaagggaatgaaatatatatcatgattctgtttttccaaaagtaacctgaatatagcaatgaagttcagttttgttattggtagtttgggcagagtctctttttgcagcacctgttgtctaccataattacagaggacatttccatgttctagccaagtatactattagaataaaaaaacttaacattgagttgcttcaacagcatgaaactgagtccaaaagaccaaatgaacaaacacattaatctctgattatttattttaaatagaatatttaattgtgtaagatctaatagtatcattatacttaagcaatcatattcctgatgatctatgggaaataactattatttaattaatattgaaaccaggttttaagatgtgttagccagtcctgttactagtaaatctctttatttggagagaaattttagattgttttgttctccttattagaaggattgtagaaagaaaaaaatgactaattggagaaaaattggggatatatcatatttcactgaattcaaaatgtcttcagttgtaaatcttaccattattttacgtacctctaagaaataaaagtgcttctaattaaaatatgatgtcattaattatgaaatacttcttgataacagaagttttaaaatagccatcttagaatcagtgaaatatggtaatgtattattttcctcctttgagttaggtcttgtgcttttttttcctggccactaaatttcacaatttccaaaaagcaaaataaacatattctgaatatttttgctgtgaaacacttgacagcagagctttccaccatgaaaagaagcttcatgagtcacacattacatctttgggttgattgaatgccactgaaacattctagtagcctggagaagttgacctacctgtggagatgcctgccattaaatggcatcctgatggcttaatacacatcactcttctgtgaagggttttaattttcaacacagcttactctgtagcatcatgtttacattgtatgtataaagattatacaaaggtgcaattgtgtatttcttccttaaaatgtatcagtataggatttagaatctccatgttgaaactctaaatgcatagaaataaaaataataaaaaatttttcattttggcttttcagcctagtattaaaactgataaaagcaaagccatgcacaaaactacctccctagagaaaggctagtcccttttcttccccattcatttcattatgaacatagtagaaaacagcatattcttatcaaatttgatgaaaagcgccaacacgtttgaactgaaatacgacttgtcatgtgaactgtaccgaatgtctacgtattccacttttcctgctggggttcctgtctcagaaaggagtcttgctcgtgctggtttctattacactggtgtgaatgacaaggtcaaatgcttctgttgtggcctgatgctggataactggaaaagaggagacagtcctactgaaaagcataaaaagttgtatcctagctgcagattcgttcagagtctaaattccgttaacaacttggaagctacctctcagcctacttttccttcttcagtaacaaattccacacactcattacttccgggtacagaaaacagtggatatttccgtggctcttattcaaactctccatcaaatcctgtaaactccagagcaaatcaagatttttctgccttgatgagaagttcctaccactgtgcaatgaataacgaaaatgccagattacttacttttcagacatggccattgacttttctgtcgccaacagatctggcaaaagcaggcttttactacataggacctggagacagagtggcttgctttgcctgtggtggaaaattgagcaattgggaaccgaaggataatgctatgtcagaacacctgagacattttcccaaatgcccatttatagaaaatcagcttcaagacacttcaagatacacagtttctaatctgagcatgcagacacatgcagcccgctttaaaacattctttaactggccctctagtgttctagttaatcctgagcagcttgcaagtgcgggtttttattatgtgggtaacagtgatgatgtcaaatgcttttgctgtgatggtggactcaggtgttgggaatctggagatgatccatgggttcaacatgccaagtggtttccaaggtgtgagtacttgataagaattaaaggacaggagttcatccgtcaagttcaagccagttaccctcatctacttgaacagctgctatccacatcagacagcccaggagatgaaaatgcagagtcatcaattatccattttgaacctggagaagaccattcagaagatgcaatcatgatgaatactcctgtgattaatgctgccgtggaaatgggctttagtagaagcctggtaaaacagacagttcagagaaaaatcctagcaactggagagaattatagactagtcaatgatcttgtgttagacttactcaatgcagaagatgaaataagggaagaggagagagaaagagcaactgaggaaaaagaatcaaatgatttattattaatccggaagaatagaatggcactttttcaacatttgacttgtgtaattccaatcctggatagtctactaactgccggaattattaatgaacaagaacatgatgttattaaacagaagacacagacgtctttacaagcaagagaactgattgatacgattttagtaaaaggaaatattgcagccactgtattcagaaactctctgcaagaagctgaagctgtgttatatgagcatttatttgtgcaacaggacataaaatatattcccacagaagatgtttcagatctaccagtggaagaacaattgcggagactacaagaagaaagaacatgtaaagtgtgtatggacaaagaagtgtccatagtgtttattccttgtggtcatctagtagtatgcaaagattgtgctccttctttaagaaagtgtcctatttgtaggagtacaatcaagggtacagttcgtacatttctttcatgaagaagaaccaaaacatcgtctaaactttagaattaatttattaaatgtattataactttaacttttatcctaatttggtttccttaaaatttttatttatttacaactcaaaaaacattgttttgtgtaacatatttatatatgtatctaaaccatatgaacatatattttttagaaactaagagaatgataggcttttgttcttatgaacgaaaaagaggtagcactacaaacacaatattcaatcaaaatttcagcattattgaaattgtaagtgaagtaaaacttaagatatttgagttaacctttaagaattttaaatattttggcattgtactaataccgggaacatgaagccaggtgtggtggtatgtgcctgtagtcccaggctgaggcaagagaattacttgagcccaggagtttgaatccatcctgggcagcatactgagaccctgcctttaaaaacaaacagaacaaaaacaaaacaccagggacacatttctctgtcttttttgatcagtgtcctatacatcgaaggtgtgcatatatgttgaatgacattttagggacatggtgtttttataaagaattctgtgagaaaaaatttaataaagcaacaaaaattactctta

SEQ ID NO: 418370 - DNA, 5425 bp, Homo sapiens
  misc_feature (1588)..(1588): n is a, c, g, or t
cactgggaggagtgcggaacgcctggtacagataggggtggggatttgggtgacgcatttaaaagacagcgtgagactcgcgccctccggcacggaaaaggccaggcgacaggtgtcgcttgaaaagactgggcttgtccttgctggtgcatgcgtcgtcggcctctgggcagcagttgttgcctaaatttccacaaatatatgccttgctggagtgcagtggtgtgatcttggcttactgcaaccttcacctcccgggttcaagtgattctcctgcttcagtctcctgagtagctggaaatacaggtttacaaaggaggaaaacgacttcttctagatttttttttcagtttcttctataaatcaaaacatctcaaaatggagacctaaaatccttaaagggacttagtctaatctcgggaggtagttttgtgcatgggtaaacaaattaagtattaactggtgttttactatccaaagaatgctaattttataaacatgatcgagttatataaggtataccataatgagtttgattttgaatttgatttgtggaaataaaggaaaagtgattctagctggggcatattgttaaagcatttttttcagagttggccaggcagtctcctactggcacattctcccattatgtagaatagaaatagtacctgtgtttgggaaagattttaaaatgagtgacagttatttggaacaaagagctaataatcaatccactgcaaattaaagaaacatgcagatgaaagttttgacacattaaaatacttctacagtgacaaagaaaaatcaagaacaaagctttttgatatgtgcaacaaatttagaggaagtaaaaagataaatgtgatgattggtcaagaaattatccagttatttacaaggccactgatattttaaacgtccaaaagtttgtttaaatgggctgttaccgctgagaatgatgaggatgagaatgatggttgaaggttacattttaggaaatgaagaaacttagaaaattaatataaagacagtgatgaatacaaagaagatttttataacaatgtgtaaaatttttggccagggaaaggaatattgaagttagatacaattacttacctttgagggaaataattgttggtaatgagatgtgatgtttctcctgccacctggaaacaaagcattgaagtctgcagttgaaaagcccaacgtctgtgagatccaggaaaccatgcttgcaaaccactggtaaaaaaaaaaaaaaaaaaaaaaaaaagccacagtgacttgcttattggtcattgctagtattatcgactcagaacctctttactaatggctagtaaatcataattgagaaattctgaattttgacaaggtctctgctgttgaaatggtaaatttattattttttttgtcatgataaattctggttcaaggtatgctatccatgaaataatttctgaccaaaactaaattgatgcaatttgattatccatcttagcctacagatggcatctggtaacttttgactgttttaaaaataaatccactatcagagtagatttgatgttggcttcagaaacatttngaaaaacaaaagttcaaaaatgttttcaggaggtgataagttgaataactctacaatgttagttctttgagggggacaaaaaatttaaaatctttgaaaggtcttattttacagccatatctaaattatcttaagaaaatttttaacaaagggaatgaaatatatatcatgattctgtttttccaaaagtaacctgaatatagcaatgaagttcagttttgttattggtagtttgggcagagtctctttttgcagcacctgttgtctaccataattacagaggacatttccatgttctagccaagtatactattagaataaaaaaacttaacattgagttgcttcaacagcatgaaactgagtccaaaagaccaaatgaacaaacacattaatctctgattatttattttaaatagaatatttaattgtgtaagatctaatagtatcattatacttaagcaatcatattcctgatgatctatgggaaataactattatttaattaatattgaaaccaggttttaagatgtgttagccagtcctgttactagtaaatctctttatttggagagaaattttagattgttttgttctccttattagaaggattgtagaaagaaaaaaatgactaattggagaaaaattggggatatatcatatttcactgaattcaaaatgtcttcagttgtaaatcttaccattattttacgtacctctaagaaataaaagtgcttctaattaaaatatgatgtcattaattatgaaatacttcttgataacagaagttttaaaatagccatcttagaatcagtgaaatatggtaatgtattattttcctcctttgagttaggtcttgtgcttttttttcctggccactaaatttcacaatttccaaaaagcaaaataaacatattctgaatatttttgctgtgaaacacttgacagcagagctttccaccatgaaaagaagcttcatgagtcacacattacatctttgggttgattgaatgccactgaaacattctagtagcctggagaagttgacctacctgtggagatgcctgccattaaatggcatcctgatggcttaatacacatcactcttctgtgaagggttttaattttcaacacagcttactctgtagcatcatgtttacattgtatgtataaagattatacaaaggtgcaattgtgtatttcttccttaaaatgtatcagtataggatttagaatctccatgttgaaactctaaatgcatagaaataaaaataataaaaaatttttcattttggcttttcagcctagtattaaaactgataaaagcaaagccatgcacaaaactacctccctagagaaaggctagtcccttttcttccccattcatttcattatgaacatagtagaaaacagcatattcttatcaaatttgatgaaaagcgccaacacgtttgaactgaaatacgacttgtcatgtgaactgtaccgaatgtctacgtattccacttttcctgctggggttcctgtctcagaaaggagtcttgctcgtgctggtttctattacactggtgtgaatgacaaggtcaaatgcttctgttgtggcctgatgctggataactggaaaagaggagacagtcctactgaaaagcataaaaagttgtatcctagctgcagattcgttcagagtctaaattccgttaacaacttggaagctacctctcagcctacttttccttcttcagtaacaaattccacacactcattacttccgggtacagaaaacagtggatatttccgtggctcttattcaaactctccatcaaatcctgtaaactccagagcaaatcaagatttttctgccttgatgagaagttcctaccactgtgcaatgaataacgaaaatgccagattacttacttttcagacatggccattgacttttctgtcgccaacagatctggcaaaagcaggcttttactacataggacctggagacagagtggcttgctttgcctgtggtggaaaattgagcaattgggaaccgaaggataatgctatgtcagaacacctgagacattttcccaaatgcccatttatagaaaatcagcttcaagacacttcaagatacacagtttctaatctgagcatgcagacacatgcagcccgctttaaaacattctttaactggccctctagtgttctagttaatcctgagcagcttgcaagtgcgggtttttattatgtgggtaacagtgatgatgtcaaatgcttttgctgtgatggtggactcaggtgttgggaatctggagatgatccatgggttcaacatgccaagtggtttccaaggtgtgagtacttgataagaattaaaggacaggagttcatccgtcaagttcaagccagttaccctcatctacttgaacagctgctatccacatcagacagcccaggagatgaaaatgcagagtcatcaattatccattttgaacctggagaagaccattcagaagatgcaatcatgatgaatactcctgtgattaatgctgccgtggaaatgggctttagtagaagcctggtaaaacagacagttcagagaaaaatcctagcaactggagagaattatagactagtcaatgatcttgtgttagacttactcaatgcagaagatgaaataagggaagaggagagagaaagagcaactgaggaaaaagaatcaaatgatttattattaatccggaagaatagaatggcactttttcaacatttgacttgtgtaattccaatcctggatagtctactaactgccggaattattaatgaacaagaacatgatgttattaaacagaagacacagacgtctttacaagcaagagaactgattgatacgattttagtaaaaggaaatattgcagccactgtattcagaaactctctgcaagaagctgaagctgtgttatatgagcatttatttgtgcaacaggacataaaatatattcccacagaagatgtttcagatctaccagtggaagaacaattgcggagactacaagaagaaagaacatgtaaagtgtgtatggacaaagaagtgtccatagtgtttattccttgtggtcatctagtagtatgcaaagattgtgctccttctttaagaaagtgtcctatttgtaggagtacaatcaagggtacagttcgtacatttctttcatgaagaagaaccaaaacatcgtctaaactttagaattaatttattaaatgtattataactttaacttttatcctaatttggtttccttaaaatttttatttatttacaactcaaaaaacattgttttgtgtaacatatttatatatgtatctaaaccatatgaacatatattttttagaaactaagagaatgataggcttttgttcttatgaacgaaaaagaggtagcactacaaacacaatattcaatcaaaatttcagcattattgaaattgtaagtgaagtaaaacttaagatatttgagttaacctttaagaattttaaatattttggcattgtactaataccgggaacatgaagccaggtgtggtggtatgtgcctgtagtcccaggctgaggcaagagaattacttgagcccaggagtttgaatccatcctgggcagcatactgagaccctgcctttaaaaacaaacagaacaaaaacaaaacaccagggacacatttctctgtcttttttgatcagtgtcctatacatcgaaggtgtgcatatatgttgaatgacattttagggacatggtgtttttataaagaattctgtgagaaaaaatttaataaagcaacaaaaattactctta

SEQ ID NO: 418371 - DNA, 6033 bp, Homo sapiens
  misc_feature (1458)..(1458): n is a, c, g, or t
cactgggaggagtgcggaacgcctggtacagataggggtggggatttgggtgacgcatttaaaagacagcgtgagactcgcgccctccggcacggaaaaggccaggcgacaggtgtcgcttgaaaagactgggcttgtccttgctggtgcatgcgtcgtcggcctctgggcagcaggtttacaaaggaggaaaacgacttcttctagatttttttttcagtttcttctataaatcaaaacatctcaaaatggagacctaaaatccttaaagggacttagtctaatctcgggaggtagttttgtgcatgggtaaacaaattaagtattaactggtgttttactatccaaagaatgctaattttataaacatgatcgagttatataaggtataccataatgagtttgattttgaatttgatttgtggaaataaaggaaaagtgattctagctggggcatattgttaaagcatttttttcagagttggccaggcagtctcctactggcacattctcccattatgtagaatagaaatagtacctgtgtttgggaaagattttaaaatgagtgacagttatttggaacaaagagctaataatcaatccactgcaaattaaagaaacatgcagatgaaagttttgacacattaaaatacttctacagtgacaaagaaaaatcaagaacaaagctttttgatatgtgcaacaaatttagaggaagtaaaaagataaatgtgatgattggtcaagaaattatccagttatttacaaggccactgatattttaaacgtccaaaagtttgtttaaatgggctgttaccgctgagaatgatgaggatgagaatgatggttgaaggttacattttaggaaatgaagaaacttagaaaattaatataaagacagtgatgaatacaaagaagatttttataacaatgtgtaaaatttttggccagggaaaggaatattgaagttagatacaattacttacctttgagggaaataattgttggtaatgagatgtgatgtttctcctgccacctggaaacaaagcattgaagtctgcagttgaaaagcccaacgtctgtgagatccaggaaaccatgcttgcaaaccactggtaaaaaaaaaaaaaaaaaaaaaaaaaagccacagtgacttgcttattggtcattgctagtattatcgactcagaacctctttactaatggctagtaaatcataattgagaaattctgaattttgacaaggtctctgctgttgaaatggtaaatttattattttttttgtcatgataaattctggttcaaggtatgctatccatgaaataatttctgaccaaaactaaattgatgcaatttgattatccatcttagcctacagatggcatctggtaacttttgactgttttaaaaataaatccactatcagagtagatttgatgttggcttcagaaacatttngaaaaacaaaagttcaaaaatgttttcaggaggtgataagttgaataactctacaatgttagttctttgagggggacaaaaaatttaaaatctttgaaaggtcttattttacagccatatctaaattatcttaagaaaatttttaacaaagggaatgaaatatatatcatgattctgtttttccaaaagtaacctgaatatagcaatgaagttcagttttgttattggtagtttgggcagagtctctttttgcagcacctgttgtctaccataattacagaggacatttccatgttctagccaagtatactattagaataaaaaaacttaacattgagttgcttcaacagcatgaaactgagtccaaaagaccaaatgaacaaacacattaatctctgattatttattttaaatagaatatttaattgtgtaagatctaatagtatcattatacttaagcaatcatattcctgatgatctatgggaaataactattatttaattaatattgaaaccaggttttaagatgtgttagccagtcctgttactagtaaatctctttatttggagagaaattttagattgttttgttctccttattagaaggattgtagaaagaaaaaaatgactaattggagaaaaattggggatatatcatatttcactgaattcaaaatgtcttcagttgtaaatcttaccattattttacgtacctctaagaaataaaagtgcttctaattaaaatatgatgtcattaattatgaaatacttcttgataacagaagttttaaaatagccatcttagaatcagtgaaatatggtaatgtattattttcctcctttgagttaggtcttgtgcttttttttcctggccactaaatttcacaatttccaaaaagcaaaataaacatattctgaatatttttgctgtgaaacacttgacagcagagctttccaccatgaaaagaagcttcatgagtcacacattacatctttgggttgattgaatgccactgaaacattctagtagcctggagaagttgacctacctgtggagatgcctgccattaaatggcatcctgatggcttaatacacatcactcttctgtgaagggttttaattttcaacacagcttactctgtagcatcatgtttacattgtatgtataaagattatacaaaggtgcaattgtgtatttcttccttaaaatgtatcagtataggatttagaatctccatgttgaaactctaaatgcatagaaataaaaataataaaaaatttttcattttggcttttcagcctagtattaaaactgataaaagcaaagccatgcacaaaactacctccctagagaaaggctagtcccttttcttccccattcatttcattatgaacatagtagaaaacagcatattcttatcaaatttgatgaaaagcgccaacacgtttgaactgaaatacgacttgtcatgtgaactgtaccgaatgtctacgtattccacttttcctgctggggttcctgtctcagaaaggagtcttgctcgtgctggtttctattacactggtgtgaatgacaaggtcaaatgcttctgttgtggcctgatgctggataactggaaaagaggagacagtcctactgaaaagcataaaaagttgtatcctagctgcagattcgttcagagtctaaattccgttaacaacttggaagctacctctcagcctacttttccttcttcagtaacaaattccacacactcattacttccgggtacagaaaacagtggatatttccgtggctcttattcaaactctccatcaaatcctgtaaactccagagcaaatcaagatttttctgccttgatgagaagttcctaccactgtgcaatgaataacgaaaatgccagattacttacttttcagacatggccattgacttttctgtcgccaacagatctggcaaaagcaggcttttactacataggacctggagacagagtggcttgctttgcctgtggtggaaaattgagcaattgggaaccgaaggataatgctatgtcagaacacctgagacattttcccaaatgcccatttatagaaaatcagcttcaagacacttcaagatacacagtttctaatctgagcatgcagacacatgcagcccgctttaaaacattctttaactggccctctagtgttctagttaatcctgagcagcttgcaagtgcgggtttttattatgtgggtaacagtgatgatgtcaaatgcttttgctgtgatggtggactcaggtgttgggaatctggagatgatccatgggttcaacatgccaagtggtttccaaggtgtgagtacttgataagaattaaaggacaggagttcatccgtcaagttcaagccagttaccctcatctacttgaacagctgctatccacatcagacagcccaggagatgaaaatgcagagtcatcaattatccattttgaacctggagaagaccattcagaagatgcaatcatgatgaatactcctgtgattaatgctgccgtggaaatgggctttagtagaagcctggtaaaacagacagttcagagaaaaatcctagcaactggagagaattatagactagtcaatgatcttgtgttagacttactcaatgcagaagatgaaataagggaagaggagagagaaagagcaactgaggaaaaagaatcaaatgatttattattaatccggaagaatagaatggcactttttcaacatttgacttgtgtaattccaatcctggatagtctactaactgccggaattattaatgaacaagaacatgatgttattaaacagaagacacagacgtctttacaagcaagagaactgattgatacgattttagtaaaaggaaatattgcagccactgtattcagaaactctctgcaagaagctgaagctgtgttatatgagcatttatttgtgcaacaggacataaaatatattcccacagaagatgtttcagatctaccagtggaagaacaattgcggagactacaagaagaaagaacatgtaaagtgtgtatggacaaagaagtgtccatagtgtttattccttgtggtcatctagtagtatgcaaagattgtgctccttctttaagaaagtgtcctatttgtaggagtacaatcaagggtacagttcgtacatttctttcatgaagaagaaccaaaacatcgtctaaactttagaattaatttattaaatgtattataactttaacttttatcctaatttggtttccttaaaatttttatttatttacaactcaaaaaacattgttttgtgtaacatatttatatatgtatctaaaccatatgaacatatattttttagaaactaagagaatgataggcttttgttcttatgaacgaaaaagaggtagcactacaaacacaatattcaatcaaaatttcagcattattgaaattgtaagtgaagtaaaacttaagatatttgagttaacctttaagaattttaaatattttggcattgtactaatacctggttttttttttgttttgtttttttgtacagacagggcagcatactgagaccctgcctttaaaaacaaacagaacaaaaacaaaacaccagggacacatttctctgtcttttttgatcagtgtcctatacatcgaaggtgtgcatatatgttgaatgacattttagggacatggtgtttttataaagaattctgtgagaaaaaatttaataaagcaacaaaaattactcttattcttcattgctttatttcaatgacattggatagtttagtcactcccagactctttccataccttcttaaagcctctcaaatattgaactacagtttatactccttcccataagatgcttcttcattgacacttgtagaacacggggtcaacacatcataaaatctattatggaatgcctgagacaagaatcaaacagtccctttagtaagtttgtttattcacttctctattgattcattcaagaagtctcatgccagccccacctattggaagaaggtctgagttttattcttatctctttggtattaattctgaaacttagaaagtacactggttagcaatgcttgggaccaacaggttgttctggtaaataaatctgtttcatattgtcagtgcaacaaaatgtccccctctgcattatgttattggtactcaacacgtccgagtcataactctgtcctttgcttcttatagaggtattaggtcttcaagagcagaagtaagactgtaatagggaatactcaggggaaggcaggcaaaggctagtcatctaaaccagttctagatgtctgtataggggcagatggctctgtaagggcagaagggaaagaccccttcataagggtcacagctgacaatcctataacaaaagacaggttaacaagagaaaaacttaacaaatttatttaatcacagatttacatcaccggggagccttcgtaatgaagatccaaaattacaggggaaactgtgcatttttatgcttaggtttgataatgaatggacagccc

SEQ ID NO: 418372 - DNA, 2736 bp, Homo sapiens
cactgggaggagtgcggaacgcctggtacagataggggtggggatttgggtgacgcatttaaaagacagcgtgagactcgcgccctccggcacggaaaaggccaggcgacaggtgtcgcttgaaaagactgggcttgtccttgctggtgcatgcgtcgtcggcctctgggcagcaggtttacaaaggaggaaaacgacttcttctagatttttttttcagtttcttctataaatcaaaactacctccctagagaaaggctagtcccttttcttccccattcatttcattatgaacatagtagaaaacagcatattcttatcaaatttgatgaaaagcgccaacacgtttgaactgaaatacgacttgtcatgtgaactgtaccgaatgtctacgtattccacttttcctgctggggttcctgtctcagaaaggagtcttgctcgtgctggtttctattacactggtgtgaatgacaaggtcaaatgcttctgttgtggcctgatgctggataactggaaaagaggagacagtcctactgaaaagcataaaaagttgtatcctagctgcagattcgttcagagtctaaattccgttaacaacttggaagctacctctcagcctacttttccttcttcagtaacaaattccacacactcattacttccgggtacagaaaacagtggatatttccgtggctcttattcaaactctccatcaaatcctgtaaactccagagcaaatcaagatttttctgccttgatgagaagttcctaccactgtgcaatgaataacgaaaatgccagattacttacttttcagacatggccattgacttttctgtcgccaacagatctggcaaaagcaggcttttactacataggacctggagacagagtggcttgctttgcctgtggtggaaaattgagcaattgggaaccgaaggataatgctatgtcagaacacctgagacattttcccaaatgcccatttatagaaaatcagcttcaagacacttcaagatacacagtttctaatctgagcatgcagacacatgcagcccgctttaaaacattctttaactggccctctagtgttctagttaatcctgagcagcttgcaagtgcgggtttttattatgtgggtaacagtgatgatgtcaaatgcttttgctgtgatggtggactcaggtgttgggaatctggagatgatccatgggttcaacatgccaagtggtttccaaggtgtgagtacttgataagaattaaaggacaggagttcatccgtcaagttcaagccagttaccctcatctacttgaacagctgctatccacatcagacagcccaggagatgaaaatgcagagtcatcaattatccattttgaacctggagaagaccattcagaagatgcaatcatgatgaatactcctgtgattaatgctgccgtggaaatgggctttagtagaagcctggtaaaacagacagttcagagaaaaatcctagcaactggagagaattatagactagtcaatgatcttgtgttagacttactcaatgcagaagatgaaataagggaagaggagagagaaagagcaactgaggaaaaagaatcaaatgatttattattaatccggaagaatagaatggcactttttcaacatttgacttgtgtaattccaatcctggatagtctactaactgccggaattattaatgaacaagaacatgatgttattaaacagaagacacagacgtctttacaagcaagagaactgattgatacgattttagtaaaaggaaatattgcagccactgtattcagaaactctctgcaagaagctgaagctgtgttatatgagcatttatttgtgcaacaggacataaaatatattcccacagaagatgtttcagatctaccagtggaagaacaattgcggagactacaagaagaaagaacatgtaaagtgtgtatggacaaagaagtgtccatagtgtttattccttgtggtcatctagtagtatgcaaagattgtgctccttctttaagaaagtgtcctatttgtaggagtacaatcaagggtacagttcgtacatttctttcatgaagaagaaccaaaacatcgtctaaactttagaattaatttattaaatgtattataactttaacttttatcctaatttggtttccttaaaatttttatttatttacaactcaaaaaacattgttttgtgtaacatatttatatatgtatctaaaccatatgaacatatattttttagaaactaagagaatgataggcttttgttcttatgaacgaaaaagaggtagcactacaaacacaatattcaatcaaaatttcagcattattgaaattgtaagtgaagtaaaacttaagatatttgagttaacctttaagaattttaaatattttggcattgtactaataccgggaacatgaagccaggtgtggtggtatgtgcctgtagtcccaggctgaggcaagagaattacttgagcccaggagtttgaatccatcctgggcagcatactgagaccctgcctttaaaaacaaacagaacaaaaacaaaacaccagggacacatttctctgtcttttttgatcagtgtcctatacatcgaaggtgtgcatatatgttgaatgacattttagggacatggtgtttttataaagaattctgtgagaaaaaatttaataaagcaacaaaaattactctta

SEQ ID NO: 418373 - DNA, 3748 bp, Homo sapiens
  misc_feature (1458)..(1458): n is a, c, g, or t
cactgggaggagtgcggaacgcctggtacagataggggtggggatttgggtgacgcatttaaaagacagcgtgagactcgcgccctccggcacggaaaaggccaggcgacaggtgtcgcttgaaaagactgggcttgtccttgctggtgcatgcgtcgtcggcctctgggcagcaggtttacaaaggaggaaaacgacttcttctagatttttttttcagtttcttctataaatcaaaacatctcaaaatggagacctaaaatccttaaagggacttagtctaatctcgggaggtagttttgtgcatgggtaaacaaattaagtattaactggtgttttactatccaaagaatgctaattttataaacatgatcgagttatataaggtataccataatgagtttgattttgaatttgatttgtggaaataaaggaaaagtgattctagctggggcatattgttaaagcatttttttcagagttggccaggcagtctcctactggcacattctcccattatgtagaatagaaatagtacctgtgtttgggaaagattttaaaatgagtgacagttatttggaacaaagagctaataatcaatccactgcaaattaaagaaacatgcagatgaaagttttgacacattaaaatacttctacagtgacaaagaaaaatcaagaacaaagctttttgatatgtgcaacaaatttagaggaagtaaaaagataaatgtgatgattggtcaagaaattatccagttatttacaaggccactgatattttaaacgtccaaaagtttgtttaaatgggctgttaccgctgagaatgatgaggatgagaatgatggttgaaggttacattttaggaaatgaagaaacttagaaaattaatataaagacagtgatgaatacaaagaagatttttataacaatgtgtaaaatttttggccagggaaaggaatattgaagttagatacaattacttacctttgagggaaataattgttggtaatgagatgtgatgtttctcctgccacctggaaacaaagcattgaagtctgcagttgaaaagcccaacgtctgtgagatccaggaaaccatgcttgcaaaccactggtaaaaaaaaaaaaaaaaaaaaaaaaaagccacagtgacttgcttattggtcattgctagtattatcgactcagaacctctttactaatggctagtaaatcataattgagaaattctgaattttgacaaggtctctgctgttgaaatggtaaatttattattttttttgtcatgataaattctggttcaaggtatgctatccatgaaataatttctgaccaaaactaaattgatgcaatttgattatccatcttagcctacagatggcatctggtaacttttgactgttttaaaaataaatccactatcagagtagatttgatgttggcttcagaaacatttngaaaaacaaaagttcaaaaatgttttcaggaggtgataagttgaataactctacaatgttagttctttgagggggacaaaaaatttaaaatctttgaaaggtcttattttacagccatatctaaattatcttaagaaaatttttaacaaagggaatgaaatatatatcatgattctgtttttccaaaagtaacctgaatatagcaatgaagttcagttttgttattggtagtttgggcagagtctctttttgcagcacctgttgtctaccataattacagaggacatttccatgttctagccaagtatactattagaataaaaaaacttaacattgagttgcttcaacagcatgaaactgagtccaaaagaccaaatgaacaaacacattaatctctgattatttattttaaatagaatatttaattgtgtaagatctaatagtatcattatacttaagcaatcatattcctgatgatctatgggaaataactattatttaattaatattgaaaccaggttttaagatgtgttagccagtcctgttactagtaaatctctttatttggagagaaattttagattgttttgttctccttattagaaggattgtagaaagaaaaaaatgactaattggagaaaaattggggatatatcatatttcactgaattcaaaatgtcttcagttgtaaatcttaccattattttacgtacctctaagaaataaaagtgcttctaattaaaatatgatgtcattaattatgaaatacttcttgataacagaagttttaaaatagccatcttagaatcagtgaaatatggtaatgtattattttcctcctttgagttaggtcttgtgcttttttttcctggccactaaatttcacaatttccaaaaagcaaaataaacatattctgaatatttttgctgtgaaacacttgacagcagagctttccaccatgaaaagaagcttcatgagtcacacattacatctttgggttgattgaatgccactgaaacattctagtagcctggagaagttgacctacctgtggagatgcctgccattaaatggcatcctgatggcttaatacacatcactcttctgtgaagggttttaattttcaacacagcttactctgtagcatcatgtttacattgtatgtataaagattatacaaaggtgcaattgtgtatttcttccttaaaatgtatcagtataggatttagaatctccatgttgaaactctaaatgcatagaaataaaaataataaaaaatttttcattttggcttttcagcctagtattaaaactgataaaagcaaagccatgcacaaaactacctccctagagaaaggctagtcccttttcttccccattcatttcattatgaacatagtagaaaacagcatattcttatcaaatttgatgaaaagcgccaacacgtttgaactgaaatacgacttgtcatgtgaactgtaccgaatgtctacgtattccacttttcctgctggggttcctgtctcagaaaggagtcttgctcgtgctggtttctattacactggtgtgaatgacaaggtcaaatgcttctgttgtggcctgatgctggataactggaaaagaggagacagtcctactgaaaagcataaaaagttgtatcctagctgcagattcgttcagagtctaaattccgttaacaacttggaagctacctctcagcctacttttccttcttcagtaacaaattccacacactcattacttccgggtacagaaaacagtggatatttccgtggctcttattcaaactctccatcaaatcctgtaaactccagagcaaatcaagatttttctgccttgatgagaagttcctaccactgtgcaatgaataacgaaaatgccagattacttacttttcagacatggccattgacttttctgtcgccaacagatctggcaaaagcaggcttttactacataggacctggagacagagtggcttgctttgcctgtggtggaaaattgagcaattgggaaccgaaggataatgctatgtcagaacacctgagacattttcccaaatgcccatttatagaaaatcagcttcaagacacttcaagatacacagtttctaatctgagcatgcagacacatgcagcccgctttaaaacattctttaactggccctctagtgttctagttaatcctgagcagcttgcaagtgcgggtttttattatgtgggtaagaaactgaatctgctaattaaaaaaaatatatttcattttaaa

SEQ ID NO: 418374 - DNA, 1729 bp, Homo sapiens
cagatagaatcgagctggtactttctaatctgagcatgcagacacatgcagcccgctttaaaacattctttaactggccctctagtgttctagttaatcctgagcagcttgcaagtgcgggtttttattatgtgggtaacagtgatgatgtcaaatgcttttgctgtgatggtggactcaggtgttgggaatctggagatgatccatgggttcaacatgccaagtggtttccaaggtgtgagtacttgataagaattaaaggacaggagttcatccgtcaagttcaagccagttaccctcatctacttgaacagctgctatccacatcagacagcccaggagatgaaaatgcagagtcatcaattatccattttgaacctggagaagaccattcagaagatgcaatcatgatgaatactcctgtgattaatgctgccgtggaaatgggctttagtagaagcctggtaaaacagacagttcagagaaaaatcctagcaactggagagaattatagactagtcaatgatcttgtgttagacttactcaatgcagaagatgaaataagggaagaggagagagaaagagcaactgaggaaaaagaatcaaatgatttattattaatccggaagaatagaatggcactttttcaacatttgacttgtgtaattccaatcctggatagtctactaactgccggaattattaatgaacaagaacatgatgttattaaacagaagacacagacgtctttacaagcaagagaactgattgatacgattttagtaaaaggaaatattgcagccactgtattcagaaactctctgcaagaagctgaagctgtgttatatgagcatttatttgtgcaacaggacataaaatatattcccacagaagatgtttcagatctaccagtggaagaacaattgcggagactacaagaagaaagaacatgtaaagtgtgtatggacaaagaagtgtccatagtgtttattccttgtggtcatctagtagtatgcaaagattgtgctccttctttaagaaagtgtcctatttgtaggagtacaatcaagggtacagttcgtacatttctttcatgaagaagaaccaaaacatcgtctaaactttagaattaatttattaaatgtattataactttaacttttatcctaatttggtttccttaaaatttttatttatttacaactcaaaaaacattgttttgtgtaacatatttatatatgtatctaaaccatatgaacatatattttttagaaactaagagaatgataggcttttgttcttatgaacgaaaaagaggtagcactacaaacacaatattcaatcaaaatttcagcattattgaaattgtaagtgaagtaaaacttaagatatttgagttaacctttaagaattttaaatattttggcattgtactaataccgggaacatgaagccaggtgtggtggtatgtgcctgtagtcccaggctgaggcaagagaattacttgagcccaggagtttgaatccatcctgggcagcatactgagaccctgcctttaaaaacaaacagaacaaaaacaaaacaccagggacacatttctctgtcttttttgatcagtgtcctatacatcgaaggtgtgcatatatgttgaatgacattttagggacatggtgtttttataaagaattctgtgagaaaaaatttaataaagcaacaaaaattactctta

SEQ ID NO: 418375 - DNA, 1107 bp, Homo sapiens
gagatagaggctcccatgagctgtgattgtgccactgcactccagcttgggtgacagactctgtctcaaaaaaaaatcaatctaatttatagatattagttacataaaaagattaaagacttctgttgccttgaaatgagtatttggctatagtctaaagtgttcatttttaaaatagattccatagctaaatattaaccttatttgtcatagtaatgctttttctttttctcccttagtgcaacaggacataaaatatattcccacagaagatgtttcagatctaccagtggaagaacaattgcggagactacaagaagaaagaacatgtaaagtgtgtatggacaaagaagtgtccatagtgtttattccttgtggtcatctagtagtatgcaaagattgtgctccttctttaagaaagtgtcctatttgtaggagtacaatcaagggtacagttcgtacatttctttcatgaagaagaaccaaaacatcgtctaaactttagaattaatttattaaatgtattataactttaacttttatcctaatttggtttccttaaaatttttatttatttacaactcaaaaaacattgttttgtgtaacatatttatatatgtatctaaaccatatgaacatatattttttagaaactaagagaatgataggcttttgttcttatgaacgaaaaagaggtagcactacaaacacaatattcaatcaaaatttcagcattattgaaattgtaagtgaagtaaaacttaagatatttgagttaacctttaagaattttaaatattttggcattgtactaataccgggaacatgaagccaggtgtggtggtatgtgcctgtagtcccaggctgaggcaagagaattacttgagcccaggagtttgaatccatcctgggcagcatactgagaccctgcctttaaaaacaaacagaacaaaaacaaaacaccagggacacatttctctgtcttttttgatcagtgtcctatacatcgaaggtgtgcatatatgttgaatgacattttagggacatggtgtttttataaagaattctgtgagaaaaaatttaataaagcaacaaaaattactctta

SEQ ID NO: 418376 - DNA, 5375 bp, Homo sapiens
  misc_feature (1538)..(1538): n is a, c, g, or t
cactgggaggagtgcggaacgcctggtacagataggggtggggatttgggtgacgcatttaaaagacagcgtgagactcgcgccctccggcacggaaaaggccaggcgacaggtgtcgcttgaaaagactgggcttgtccttgctggtgcatgcgtcgtcggcctctgggcagcagttgttgcctaaatttccacaaatatatgccttgctggagtgcagtggtgtgatcttggcttactgcaaccttcacctcccgggttcaagtgattctcctgcttcagtctcctgagtagctggaaatacaggtttacaaaggaggaaaacgacttcttctagatttttttttcagtttcttctataaatcaaaacatctcaaaatggagacctaaaatccttaaagggacttagtctaatctcgggaggtagttttgtgcatgggtaaacaaattaagtattaactggtgttttactatccaaagaatgctaattttataaacatgatcgagttatataaggtataccataatgagtttgattttgaatttgatttgtggaaataaaggaaaagtgattctagctggggcatattgttaaagcatttttttcagagttggccaggcagtctcctactggcacattctcccattatgtagaatagaaatagtacctgtgtttgggaaagattttaaaatgagtgacagttatttggaacaaagagctaataatcaatccactgcaaattaaagaaacatgcagatgaaagttttgacacattaaaatacttctacagtgacaaagaaaaatcaagaacaaagctttttgatatgtgcaacaaatttagaggaagtaaaaatgatattttaaacgtccaaaagtttgtttaaatgggctgttaccgctgagaatgatgaggatgagaatgatggttgaaggttacattttaggaaatgaagaaacttagaaaattaatataaagacagtgatgaatacaaagaagatttttataacaatgtgtaaaatttttggccagggaaaggaatattgaagttagatacaattacttacctttgagggaaataattgttggtaatgagatgtgatgtttctcctgccacctggaaacaaagcattgaagtctgcagttgaaaagcccaacgtctgtgagatccaggaaaccatgcttgcaaaccactggtaaaaaaaaaaaaaaaaaaaaaaaaaagccacagtgacttgcttattggtcattgctagtattatcgactcagaacctctttactaatggctagtaaatcataattgagaaattctgaattttgacaaggtctctgctgttgaaatggtaaatttattattttttttgtcatgataaattctggttcaaggtatgctatccatgaaataatttctgaccaaaactaaattgatgcaatttgattatccatcttagcctacagatggcatctggtaacttttgactgttttaaaaataaatccactatcagagtagatttgatgttggcttcagaaacatttngaaaaacaaaagttcaaaaatgttttcaggaggtgataagttgaataactctacaatgttagttctttgagggggacaaaaaatttaaaatctttgaaaggtcttattttacagccatatctaaattatcttaagaaaatttttaacaaagggaatgaaatatatatcatgattctgtttttccaaaagtaacctgaatatagcaatgaagttcagttttgttattggtagtttgggcagagtctctttttgcagcacctgttgtctaccataattacagaggacatttccatgttctagccaagtatactattagaataaaaaaacttaacattgagttgcttcaacagcatgaaactgagtccaaaagaccaaatgaacaaacacattaatctctgattatttattttaaatagaatatttaattgtgtaagatctaatagtatcattatacttaagcaatcatattcctgatgatctatgggaaataactattatttaattaatattgaaaccaggttttaagatgtgttagccagtcctgttactagtaaatctctttatttggagagaaattttagattgttttgttctccttattagaaggattgtagaaagaaaaaaatgactaattggagaaaaattggggatatatcatatttcactgaattcaaaatgtcttcagttgtaaatcttaccattattttacgtacctctaagaaataaaagtgcttctaattaaaatatgatgtcattaattatgaaatacttcttgataacagaagttttaaaatagccatcttagaatcagtgaaatatggtaatgtattattttcctcctttgagttaggtcttgtgcttttttttcctggccactaaatttcacaatttccaaaaagcaaaataaacatattctgaatatttttgctgtgaaacacttgacagcagagctttccaccatgaaaagaagcttcatgagtcacacattacatctttgggttgattgaatgccactgaaacattctagtagcctggagaagttgacctacctgtggagatgcctgccattaaatggcatcctgatggcttaatacacatcactcttctgtgaagggttttaattttcaacacagcttactctgtagcatcatgtttacattgtatgtataaagattatacaaaggtgcaattgtgtatttcttccttaaaatgtatcagtataggatttagaatctccatgttgaaactctaaatgcatagaaataaaaataataaaaaatttttcattttggcttttcagcctagtattaaaactgataaaagcaaagccatgcacaaaactacctccctagagaaaggctagtcccttttcttccccattcatttcattatgaacatagtagaaaacagcatattcttatcaaatttgatgaaaagcgccaacacgtttgaactgaaatacgacttgtcatgtgaactgtaccgaatgtctacgtattccacttttcctgctggggttcctgtctcagaaaggagtcttgctcgtgctggtttctattacactggtgtgaatgacaaggtcaaatgcttctgttgtggcctgatgctggataactggaaaagaggagacagtcctactgaaaagcataaaaagttgtatcctagctgcagattcgttcagagtctaaattccgttaacaacttggaagctacctctcagcctacttttccttcttcagtaacaaattccacacactcattacttccgggtacagaaaacagtggatatttccgtggctcttattcaaactctccatcaaatcctgtaaactccagagcaaatcaagatttttctgccttgatgagaagttcctaccactgtgcaatgaataacgaaaatgccagattacttacttttcagacatggccattgacttttctgtcgccaacagatctggcaaaagcaggcttttactacataggacctggagacagagtggcttgctttgcctgtggtggaaaattgagcaattgggaaccgaaggataatgctatgtcagaacacctgagacattttcccaaatgcccatttatagaaaatcagcttcaagacacttcaagatacacagtttctaatctgagcatgcagacacatgcagcccgctttaaaacattctttaactggccctctagtgttctagttaatcctgagcagcttgcaagtgcgggtttttattatgtgggtaacagtgatgatgtcaaatgcttttgctgtgatggtggactcaggtgttgggaatctggagatgatccatgggttcaacatgccaagtggtttccaaggtgtgagtacttgataagaattaaaggacaggagttcatccgtcaagttcaagccagttaccctcatctacttgaacagctgctatccacatcagacagcccaggagatgaaaatgcagagtcatcaattatccattttgaacctggagaagaccattcagaagatgcaatcatgatgaatactcctgtgattaatgctgccgtggaaatgggctttagtagaagcctggtaaaacagacagttcagagaaaaatcctagcaactggagagaattatagactagtcaatgatcttgtgttagacttactcaatgcagaagatgaaataagggaagaggagagagaaagagcaactgaggaaaaagaatcaaatgatttattattaatccggaagaatagaatggcactttttcaacatttgacttgtgtaattccaatcctggatagtctactaactgccggaattattaatgaacaagaacatgatgttattaaacagaagacacagacgtctttacaagcaagagaactgattgatacgattttagtaaaaggaaatattgcagccactgtattcagaaactctctgcaagaagctgaagctgtgttatatgagcatttatttgtgcaacaggacataaaatatattcccacagaagatgtttcagatctaccagtggaagaacaattgcggagactacaagaagaaagaacatgtaaagtgtgtatggacaaagaagtgtccatagtgtttattccttgtggtcatctagtagtatgcaaagattgtgctccttctttaagaaagtgtcctatttgtaggagtacaatcaagggtacagttcgtacatttctttcatgaagaagaaccaaaacatcgtctaaactttagaattaatttattaaatgtattataactttaacttttatcctaatttggtttccttaaaatttttatttatttacaactcaaaaaacattgttttgtgtaacatatttatatatgtatctaaaccatatgaacatatattttttagaaactaagagaatgataggcttttgttcttatgaacgaaaaagaggtagcactacaaacacaatattcaatcaaaatttcagcattattgaaattgtaagtgaagtaaaacttaagatatttgagttaacctttaagaattttaaatattttggcattgtactaataccgggaacatgaagccaggtgtggtggtatgtgcctgtagtcccaggctgaggcaagagaattacttgagcccaggagtttgaatccatcctgggcagcatactgagaccctgcctttaaaaacaaacagaacaaaaacaaaacaccagggacacatttctctgtcttttttgatcagtgtcctatacatcgaaggtgtgcatatatgttgaatgacattttagggacatggtgtttttataaagaattctgtgagaaaaaatttaataaagcaacaaaaattactctta

SEQ ID NO: 418377 - DNA, 1961 bp, Homo sapiens
ccggctaggtagcgaggcctgggtggtggattacttacttttcagacatggccattgacttttctgtcgccaacagatctggcaaaagcaggcttttactacataggacctggagacagagtggcttgctttgcctgtggtggaaaattgagcaattgggaaccgaaggataatgctatgtcagaacacctgagacattttcccaaatgcccatttatagaaaatcagcttcaagacacttcaagatacacagtttctaatctgagcatgcagacacatgcagcccgctttaaaacattctttaactggccctctagtgttctagttaatcctgagcagcttgcaagtgcgggtttttattatgtgggtaacagtgatgatgtcaaatgcttttgctgtgatggtggactcaggtgttgggaatctggagatgatccatgggttcaacatgccaagtggtttccaaggtgtgagtacttgataagaattaaaggacaggagttcatccgtcaagttcaagccagttaccctcatctacttgaacagctgctatccacatcagacagcccaggagatgaaaatgcagagtcatcaattatccattttgaacctggagaagaccattcagaagatgcaatcatgatgaatactcctgtgattaatgctgccgtggaaatgggctttagtagaagcctggtaaaacagacagttcagagaaaaatcctagcaactggagagaattatagactagtcaatgatcttgtgttagacttactcaatgcagaagatgaaataagggaagaggagagagaaagagcaactgaggaaaaagaatcaaatgatttattattaatccggaagaatagaatggcactttttcaacatttgacttgtgtaattccaatcctggatagtctactaactgccggaattattaatgaacaagaacatgatgttattaaacagaagacacagacgtctttacaagcaagagaactgattgatacgattttagtaaaaggaaatattgcagccactgtattcagaaactctctgcaagaagctgaagctgtgttatatgagcatttatttgtgcaacaggacataaaatatattcccacagaagatgtttcagatctaccagtggaagaacaattgcggagactacaagaagaaagaacatgtaaagtgtgtatggacaaagaagtgtccatagtgtttattccttgtggtcatctagtagtatgcaaagattgtgctccttctttaagaaagtgtcctatttgtaggagtacaatcaagggtacagttcgtacatttctttcatgaagaagaaccaaaacatcgtctaaactttagaattaatttattaaatgtattataactttaacttttatcctaatttggtttccttaaaatttttatttatttacaactcaaaaaacattgttttgtgtaacatatttatatatgtatctaaaccatatgaacatatattttttagaaactaagagaatgataggcttttgttcttatgaacgaaaaagaggtagcactacaaacacaatattcaatcaaaatttcagcattattgaaattgtaagtgaagtaaaacttaagatatttgagttaacctttaagaattttaaatattttggcattgtactaataccgggaacatgaagccaggtgtggtggtatgtgcctgtagtcccaggctgaggcaagagaattacttgagcccaggagtttgaatccatcctgggcagcatactgagaccctgcctttaaaaacaaacagaacaaaaacaaaacaccagggacacatttctctgtcttttttgatcagtgtcctatacatcgaaggtgtgcatatatgttgaatgacattttagggacatggtgtttttataaagaattctgtgagaaaaaatttaataaagcaacaaaaattactctta

SEQ ID NO: 418378 - DNA, 3901 bp, Homo sapiens
cactgggaggagtgcggaacgcctggtacagataggggtggggatttgggtgacgcatttaaaagacagcgtgagactcgcgccctccggcacggaaaaggccaggcgacaggtgtcgcttgaaaagactgggcttgtccttgctggtgcatgcgtcgtcggcctctgggcagcaggtttacaaaggaggaaaacgacttcttctagatttttttttcagtttcttctataaatcaaaactacctccctagagaaaggctagtcccttttcttccccattcatttcattatgaacatagtagaaaacagcatattcttatcaaatttgatgaaaagcgccaacacgtttgaactgaaatacgacttgtcatgtgaactgtaccgaatgtctacgtattccacttttcctgctggggttcctgtctcagaaaggagtcttgctcgtgctggtttctattacactggtgtgaatgacaaggtcaaatgcttctgttgtggcctgatgctggataactggaaaagaggagacagtcctactgaaaagcataaaaagttgtatcctagctgcagattcgttcagagtctaaattccgttaacaacttggaagctacctctcagcctacttttccttcttcagtaacaaattccacacactcattacttccgggtacagaaaacagtggatatttccgtggctcttattcaaactctccatcaaatcctgtaaactccagagcaaatcaagatttttctgccttgatgagaagttcctaccactgtgcaatgaataacgaaaatgccagattacttacttttcagacatggccattgacttttctgtcgccaacagatctggcaaaagcaggcttttactacataggacctggagacagagtggcttgctttgcctgtggtggaaaattgagcaattgggaaccgaaggataatgctatgtcagaacacctgagacattttcccaaatgcccatttatagaaaatcagcttcaagacacttcaagatacacagtttctaatctgagcatgcagacacatgcagcccgctttaaaacattctttaactggccctctagtgttctagttaatcctgagcagcttgcaagtgcgggtttttattatgtgggtaacagtgatgatgtcaaatgcttttgctgtgatggtggactcaggtgttgggaatctggagatgatccatgggttcaacatgccaagtggtttccaaggtgtgagtacttgataagaattaaaggacaggagttcatccgtcaagttcaagccagttaccctcatctacttgaacagctgctatccacatcagacagcccaggagatgaaaatgcagagtcatcaattatccattttgaacctggagaagaccattcagaagatgcaatcatgatgaatactcctgtgattaatgctgccgtggaaatgggctttagtagaagcctggtaaaacagacagttcagagaaaaatcctagcaactggagagaattatagactagtcaatgatcttgtgttagacttactcaatgcagaagatgaaataagggaagaggagagagaaagagcaactgaggaaaaagaatcaagaataaagattactgtaaacccagagtcaaaggcagtcttggctggacagtttgtgaaactgtgttgccgggcaactggacatccttttgttcaatatcagtggttcaaaatgaataaagagattccaaatggaaatacatcagagcttatttttaatgcagtgcatgtaaaagatgcaggcttttatgtctgtcgagttaataacaatttcacctttgaattcagccagtggtcacagctggatgtttgcgacatcccagagagcttccagagaagtgttgatggcgtctctgaatccaagttgcaaatctgtgttgaaccaacttcccaaaagctgatgccaggcagcacattggttttacagtgtgttgctgttggaagccctattcctcactaccagtggttcaaaaatgaattaccattaacacatgagaccaaaaagctatacatggtgccttatgtggatttggaacaccaaggaacctactggtgtcatgtatataatgatcgagacagtcaagatagcaagaaggtagaaatcatcataggaagaacagatgaggcagtggagtgcactgaagatgaattaaataatcttggtcatcctgataataaagagcaaacaactgaccagcctttggcgaaggacaaggttgcccttttgataggaaatatgaattaccgggagcaccccaagctcaaagctcctttggtggatgtgtacgaattgactaacttactgagacagctggacttcaaagtggtttcactgttggatcttactgaatatgagatgcgtaatgctgtggatgagtttttactccttttagacaagggagtatatgggttattatattatgcaggacatggttatgaaaattttgggaacagcttcatggtccccgttgatgctccaaatccatataggtctgaaaattgtctgtgtgtacaaaatatactgaaattgatgcaagaaaaagaaactggacttaatgtgttcttattggatatgtgtaggaaaagaaatgactacgatgataccattccaatcttggatgcactaaaagtcaccgccaatattgtgtttggatatgccacgtgtcaaggagcagaagcttttgaaatccagcattctggattggcaaatggaatctttatgaaatttttaaaagacagattattagaagataagaaaatcactgtgttactggatgaagttgcagaagatatgggtaagtgtcaccttaccaaaggcaaacaggctctagagattcgaagtagtttatctgagaagagagcacttactgatccaatacagggaacagaatattctgctgaatctcttgtgcggaatctacagtgggccaaggctcatgaacttccagaaagtatgtgtcttaagtttgactgtggtgttcagattcaattaggatttgcagctgagttttccaatgtcatgatcatctatacaagtatagtttacaaaccaccggagataataatgtgtgatgcctacgttactgattttccacttgatctagatattgatccaaaagatgcaaataaaggcacacctgaagaaactggcagctacttggtatcaaaggatcttcccaagcattgcctctataccagactcagttcactgcaaaaattaaaggaacatctagtcttcacagtatgtttatcatatcagtactcaggattggaagatactgtagaggacaagcaggaagtgaatgttgggaaacctctcattgctaaattagacatgcatcgaggtttgggaaggaagacttgctttcaaacttgtcttatgtctaatggtccttaccagagttctgcagccacctcaggaggagcagggcattatcactcattgcaagacccattccatggtgtttaccattcacatcctggtaatccaagtaatgttacaccagcagatagctgtcattgcagccggactccagatgcatttatttcaagtttcgctcaccatgcttcatgtcattttagtagaagtaatgtgccagtagagacaactgatgaaataccatttagtttctctgacaggctcagaatttctgaaaaatgacctccttgtttttgaaagttagcataattttagatgcctgtgaaatagtactgcacttacataaagtgagacattgtgaaaaggcaaatttgtatatgtagagaaagaatagtagtaactgtttcatagcaaacttcaggactttgagatgttgaaattacattatttaattacagacttcctctttct

SEQ ID NO: 418379 - DNA, 612 bp, Homo sapiens
acggagccggcgctggggacggcggcgccgagtctgcgggtcctcccgccagcccggccggaggcagccgaggccgctcgggcggcggcggcggcggcggcgggagccggagcgcatctcgcccaggagccggagcagcggcactgcctgaaccagacagcagccttgggtgcaggcgtggtcatgagggcagatggacactgctgaagacccggcctggctccaccccatcccctctcccactgagtcacaggtttgagattcccagagaggccaaagacagctacaggaagtaccctgggggctcagctgagagagagtcacagaaaggccagagggtctcaggaaggtctggaggtcacagctgggctcacagaagctcttgggccctggcatcctgggtgaccggtgttcttgggtattggggacaggacagagagctcattctataaccacagttgtcttttaaaggccaccctctccagccccttgtcccccctgtgctgtgagcccaagtcccttgtgaccactcagtgtcccgtccccacccctccagccgcagtttttggctacaaactgtcacagtatacattggtaataaaatatttcccc

SEQ ID NO: 418380 - DNA, 4202 bp, Homo sapiens
aggctggtacggcccgggagttatgggcatcccgccagtccctggcctggaggctgtcgaggccgctcgggcggtggctggcggctgtgcggcgtggtagccggagctgctatctcgtcccagtgagcctggagctagcgtgcactgcctgaaccagacagcagccttgggtgcaggcgtggtcatgagggcagatggacactgctgaagacccggcctggctccagctgcttcaaaaggattccagccccccaggaccccgacccacagccttcttctgcccacaggatgggagcctgggggctggcagctcggctatgagggattactgcccctcccagcaaaaggcaagccctgcaccccccaggcacacccctgaccaaagcccaggcatggagtctagacacagaagccccagtggggctggggaaggggcctcctgctctgacggccccagagggagcctggcctgcccctccccaacctgcttctctccccaggagtcaccctccaaggagacattggaggcacatggagcctccatctcagggacaccagaagccaccacgtctgggaagccagagcctgtgtcctccgtgaaaactgagcccaaatcctcagatgacagaaatcccatgttcttagagaagatggatttcaagtcctcaaagcaggccgattccacttccataggaaaggaggatcctgggtcctcacggaaggcagatcccatgtttacaggaaaggcagagcctgaaatcttgggaaagggggatcctgtggctcctggaaggatggatcccatgactgtaagaaaggaagatcttggatccctgggaaaagtagatcctttgtgctccagcaagacgtatacagtgtcaccgaagaaaggtggatcctgtgtcctcagacaaagtggaccctgtattcccaagaaaggaggagcccaggtattcaggaaaagagcatcctgtgtcctcagaaaaggtcgctcctacatctgcagaaaaggtagatcttgtattgtcgggaaagagagatcctgggccctcgggaaaggcagatcccgtgcccttggaaagcatggattctgcgtccacaggaaagacagagccggggctcctgggcaagctgattccaggctcatcaggcaagaatgggcctgtatcctctgggaccggggctcctgggtccttgggaaggctggatcccacatgcttggggatggcagatcccgcatctgtgggaaatgtagaaactgtgcctgccacaaaagaggactcccggttcctgggaaagatggaccctgcctcctcaggagaggggcgtcctgtgtctggccacacggatactacggcttcagcaaagacagatctcacatctttgaaaaatgtggatcccatgtcttcaggcaaggtggatccagtttctctgggaaagatggaccccatgtgctcaggaaagccagagctcttgtctcctggacaggcagagcgtgtgtctgtgggaaaggcaggaactgtatccccaggaaaagaggacccggtgtcctccagaagggaggaccccatatctgctggaagtagaaagacatcatctgaaaaagtgaatcctgagtcttcaggaaagacaaaccctgtgtcttcaggtccaggcgatcccaggtccttggggacagcaggtcccccatctgcagtaaaggctgagccagcgacggggggaaaaggagatcccctgtcctcggagaaggcaggtctggtggcctctggaaaggcggctcccacagcctcagggaaggccgagcccctcgcggtgggcaaggaggaccctgtgagcaagggaaaggcagacgctggcccctctggacaaggggactctgtgtctataggtaaagtggtctcaactccaggaaaaacagtcccggtgccctcggggaaggtggatcccgtgtccctgggaaaagcagaagctatcccagagggaaaagtgggttctctgcctctagagaaggggagtcctgttaccaccacaaaggcggatcccagggcctcggggaaagcacagccgcagtctggtggcaaagcagaaacaaagctccctgggcaagagggcgctgcagcaccaggagaagcaggggctgtgtgtttgaaaaaggagacaccacaggcctcagagaaggtggatcctggatcctgcagaaaagcagagccccttgcctcagggaagggagagcctgtgtccctggggaaagccgactctgcaccttccagaaaaacggagtccccatccttggggaaggtggtccccctgagtctggagaagaccaagccgtcctcctcctccaggcagttagaccgcaaagccctcggctcagcccggtctcccgagggtgccaggggcagtgaaggccgcgtggagccgaaggccgagcccgtgtccagcaccgaggcctccagtctcggccagaaagacctggaagccgctggggccgagagaagcccctgcccagaggccgcagcgcccccgccggggccgcggactcgcgacaacttcaccaaggcgccgtcgtgggaggcgagcgccccgccgccgccgcgcgaggacgcgggcactcaggcgggcgcgcaggcctgcgtctcagtggccgtgagccccatgtctccgcaggacggcgctgggggctcggccttcagcttccaggcggcgccgcgcgcgcccagcccgccctcgcgccgagatgcgggcctgcaggtgtcgctgggcgccgccgagacgcgctccgtggccactgggcccatgacacctcaagccgccgcgccgcccgccttccccgaagtgcgggtgcggcccggctcagcgctggcggccgctgtagcgcccccggagccggctgagcccgtgcgagacgtgagctgggacgagaagggcatgacgtgggaggtatacggcgccgccatggaggtggaggtgctgggcatggccatccagaagcatctggagcgacagatcgaggagcacggccgccaaggggcgcccgcgccgccgcccgccgcccgtgccggccccggccgttcgggctcggtgcgcaccgcgcccccagatggcgccgccaagcgtccgcccggcctgttccgcgcgctgctgcagagtgtgcgccggccgcggtgctgctcgcgggcgggacccacggccgagtgatctgcccccattttgtacgcccgagtttccgaccttctcaggctcccttcttgatcacaggcccctagaaggggtcccctctgcgtgccacaggcctccgaggggttgtgcagcctctagggctgttgcgtccccgtctttccagcccctcccatcacaaatacagaagaaccccttctaccaagctccctcgtggccacgaggccacgaacccggccagccctgacgccccactgtcccctcacagccctcagctctactcccggtcacactgggcgaccacgggggcctgctcagcaccctcacctcccaccccctgagagctggggcaggctcctgagatgtctagactggtgcgttgtggtctccggtggggccagatccccagaacagggagagactgcatacaagtctgagtggcagaagcttcaagtgggtgaggatcggtgtgtgagacccgcgagtgggcacgtctctgaatgtgaggtctcgggcagcacgtgaggtagaacgagtgtgagcgtctccacgcagtggctggccccgtggccggggcgtctcttgcatgctgttggtggtccttccccagttcctatctcccacccgcctggttccagccccatcccctctcccactgagtcacaggtttgagattcccagagaggccaaagacagctacaggaagtaccctgggggctcagctgagagagagtcacagaaaggccagagggtctcaggaaggtctggaggtcacagctgggctcacagaagctcttgggccctggcatcctgggtgaccggtgttcttgggtattggggacaggacagagagctcattctataaccacagttgtcttttaaaggccaccctctccagccccttgtcccccctgtgctgtgagcccaagtcccttgtgaccactcagtgtcccgtccccacccctccagccgcagtttttggctacaaactgtcacagtatacattggtaataaaatatttcccc

SEQ ID NO: 418381 - DNA, 3354 bp, Homo sapiens
acggagccggcgctggggacggcggcgccgagtctgcgggtcctcccgccagcccggccggaggcagccgaggccgctcgggcggcggcggcggcggcggcgggagccggagcgcatctcgcccaggagccggagcagcggcactgcctgaaccagacagcagccttgggtgcaggcgtggtcatgagggcagatggacactgctgaagacccggcctggctccagctgcttcaaaaggattccagccccccaggaccccgacccacagccttcttctgcccacaggatgggagcctgggggctggcagctcggctatgagggattactgcccctcccagcaaaaggcaagccctgcaccccccaggcacacccctgaccaaagcccaggcatggagtctagacacagaagccccagtggggctggggaaggggcctcctgctctgacggccccagagggagcctggcctgcccctccccaacctgcttctctccccaggagtcaccctccaaggagacattggaggcacatggagcctccatctcagggacaccagaagccaccacgtctgggaagccagagcctgtgtcctccgtgaaaactgagcccaaatcctcagatgacagaaatcccatgttcttagagaagatggatttcaagtcctcaaagcaggccgattccacttccataggaaaggaggatcctgggtcctcacggaaggcagatcccatgtttacaggaaaggcagagcctgaaatcttgggaaagggggatcctgtggctcctggaaggatggatcccatgactgtaagaaaggaagatcttggatccctgggaaaagtagatcctttgtgctccagcaagacgtatacagtgtcaccgaagaaaggtggatcctgtgtcctcagacaaagtggaccctgtattcccaagaaaggaggagcccaggtattcaggaaaagagcatcctgtgtcctcagaaaaggtcgctcctacatctgcagaaaaggtagatcttgtattgtcgggaaagagagatcctgggccctcgggaaaggcagatcccgtgcccttggaaagcatggattctgcgtccacaggaaagacagagccggggctcctgggcaagctgattccaggctcatcaggcaagaatgggcctgtatcctctgggaccggggctcctgggtccttgggaaggctggatcccacatgcttggggatggcagatcccgcatctgtgggaaatgtagaaactgtgcctgccacaaaagaggactcccggttcctgggaaagatggaccctgcctcctcaggagaggggcgtcctgtgtctggccacacggatactacggcttcagcaaagacagatctcacatctttgaaaaatgtggatcccatgtcttcaggcaaggtggatccagtttctctgggaaagatggaccccatgtgctcaggaaagccagagctcttgtctcctggacaggcagagcgtgtgtctgtgggaaaggcaggaactgtatccccaggaaaagaggacccggtgtcctccagaagggaggaccccatatctgctggaagtagaaagacatcatctgaaaaagtgaatcctgagtcttcaggaaagacaaaccctgtgtcttcaggtccaggcgatcccaggtccttggggacagcaggtcccccatctgcagtaaaggctgagccagcgacggggggaaaaggagatcccctgtcctcggagaaggcaggtctggtggcctctggaaaggcggctcccacagcctcagggaaggccgagcccctcgcggtgggcaaggaggaccctgtgagcaagggaaaggcagacgctggcccctctggacaaggggactctgtgtctataggtaaagtggtctcaactccaggaaaaacagtcccggtgccctcggggaaggtggatcccgtgtccctgggaaaagcagaagctatcccagagggaaaagtgggttctctgcctctagagaaggggagtcctgttaccaccacaaaggcggatcccagggcctcggggaaagcacagccgcagtctggtggcaaagcagaaacaaagctccctgggcaagagggcgctgcagcaccaggagaagcaggggctgtgtgtttgaaaaaggagacaccacaggcctcagagaaggtggatcctggatcctgcagaaaagcagagccccttgcctcagggaagggagagcctgtgtccctggggaaagccgactctgcaccttccagaaaaacggagtccccatccttggggaaggtggtccccctgagtctggagaagaccaagccgtcctcctcctccaggcagttagaccgcaaagccctcggctcagcccggtctcccgagggtgccaggggcagtgaaggccgcgtggagccgaaggccgagcccgtgtccagcaccgaggcctccagtctcggccagaaagacctggaagccgctggggccgagagaagcccctgcccagaggccgcagcgcccccgccggggccgcggactcgcgacaacttcaccaaggcgccgtcgtgggaggcgagcgccccgccgccgccgcgcgaggacgcgggcactcaggcgggcgcgcaggcctgcgtctcagtggccgtgagccccatgtctccgcaggacggcgctgggggctcggccttcagcttccaggcggcgccgcgcgcgcccagcccgccctcgcgccgagatgcgggcctgcaggtgtcgctgggcgccgccgagacgcgctccgtggccactgggcccatgacacctcaagccgccgcgccgcccgccttccccgaagtgcgcgggtttgcgggcccgggttcaacggcttgggcgggccggttgtaagggcccccgggaagccgggttggaagcccgtgtcgcggaacaagttggaagctggcgacacggagcaggggctatgagttgggggcaccggggcaaataccgggggcgcgccgggccccagctgcagacctgggtggacaacggggcctgcctagggcagcactctgggggccccaattccacgagagagcggcactcttctgtggaacaacgggcggcacccgaagcaattccagagggcagcacacacgacggcggggacacgagagcacacaaagggggggaggtacacccaccagaggaaagactcaaggcgctgcgcccggcggcaccccagccccagatgaggaagccaggagggacccccaaggacagccgagcatcacaggaagacaatagagaagaagcgcggccacggcaggagaggcccccaccacagcaaaagtgacgggcgccgcgggccccaaag

SEQ ID NO: 418382 - DNA, 3526 bp, Homo sapiens
acggagccggcgctggggacggcggcgccgagtctgcgggtcctcccgccagcccggccggaggcagccgaggccgctcgggcggcggcggcggcggcggcgggagccggagcgcatctcgcccaggagccggagcagcggcactgcctgaaccagacagcagccttgggtgcaggcgtggtcatgagggcagatggacactgctgaagacccggcctggctccagctgcttcaaaaggattccagccccccaggaccccgacccacagccttcttctgcccacaggatgggagcctgggggctggcagctcggctatgagggattactgcccctcccagcaaaaggcaagccctgcaccccccaggcacacccctgaccaaagcccaggcatggagtctagacacagaagccccagtggggctggggaaggggcctcctgctctgacggccccagagggagcctggcctgcccctccccaacctgcttctctccccaggagtcaccctccaaggagacattggaggcacatggagcctccatctcagggacaccagaagccaccacgtctgggaagccagagcctgtgtcctccgtgaaaactgagcccaaatcctcagatgacagaaatcccatgttcttagagaagatggatttcaagtcctcaaagcaggccgattccacttccataggaaaggaggatcctgggtcctcacggaaggcagatcccatgtttacaggaaaggcagagcctgaaatcttgggaaagggggatcctgtggctcctggaaggatggatcccatgactgtaagaaaggaagatcttggatccctgggaaaagtagatcctttgtgctccagcaagacgtatacagtgtcaccgaggaaggaggatcctgggtctttgagaaaggtggatcctgtgtcctcagacaaagtggaccctgtattcccaagaaaggaggagcccaggtattcaggaaaagagcatcctgtgtcctcagaaaaggtcgctcctacatctgcagaaaaggtagatcttgtattgtcgggaaagagagatcctgggccctcgggaaaggcagatcccgtgcccttggaaagcatggattctgcgtccacaggaaagacagagccggggctcctgggcaagctgattccaggctcatcaggcaagaatgggcctgtatcctctgggaccggggctcctgggtccttgggaaggctggatcccacatgcttggggatggcagatcccgcatctgtgggaaatgtagaaactgtgcctgccacaaaagaggactcccggttcctgggaaagatggaccctgcctcctcaggagaggggcgtcctgtgtctggccacacggatactacggcttcagcaaagacagatctcacatctttgaaaaatgtggatcccatgtcttcaggcaaggtggatccagtttctctgggaaagatggaccccatgtgctcaggaaagccagagctcttgtctcctggacaggcagagcgtgtgtctgtgggaaaggcaggaactgtatccccaggaaaagaggacccggtgtcctccagaagggaggaccccatatctgctggaagtagaaagacatcatctgaaaaagtgaatcctgagtcttcaggaaagacaaaccctgtgtcttcaggtccaggcgatcccaggtccttggggacagcaggtcccccatctgcagtaaaggctgagccagcgacggggggaaaaggagatcccctgtcctcggagaaggcaggtctggtggcctctggaaaggcggctcccacagcctcagggaaggccgagcccctcgcggtgggcaaggaggaccctgtgagcaagggaaaggcagacgctggcccctctggacaaggggactctgtgtctataggtaaagtggtctcaactccaggaaaaacagtcccggtgccctcggggaaggtggatcccgtgtccctgggaaaagcagaagctatcccagagggaaaagtgggttctctgcctctagagaaggggagtcctgttaccaccacaaaggcggatcccagggcctcggggaaagcacagccgcagtctggtggcaaagcagaaacaaagctccctgggcaagagggcgctgcagcaccaggagaagcaggggctgtgtgtttgaaaaaggagacaccacaggcctcagagaaggtggatcctggatcctgcagaaaagcagagccccttgcctcagggaagggagagcctgtgtccctggggaaagccgactctgcaccttccagaaaaacggagtccccatccttggggaaggtggtccccctgagtctggagaagaccaagccgtcctcctcctccaggcagttagaccgcaaagccctcggctcagcccggtctcccgagggtgccaggggcagtgaaggccgccaagcgtccgcccggcctgttccgcgcgctgctgcagagtgtgcgccggccgcggtgctgctcgcgggcgggacccacggccgagtgatctgcccccattttgtacgcccgagtttccgaccttctcaggctcccttcttgatcacaggcccctagaaggggtcccctctgcgtgccacaggcctccgaggggttgtgcagcctctagggctgttgcgtccccgtctttccagcccctcccatcacaaatacagaagaaccccttctaccaagctccctcgtggccacgaggccacgaacccggccagccctgacgccccactgtcccctcacagccctcagctctactcccggtcacactgggcgaccacgggggcctgctcagcaccctcacctcccaccccctgagagctggggcaggctcctgagatgtctagactggtgcgttgtggtctccggtggggccagatccccagaacagggagagactgcatacaagtctgagtggcagaagcttcaagtgggtgaggatcggtgtgtgagacccgcgagtgggcacgtctctgaatgtgaggtctcgggcagcacgtgaggtagaacgagtgtgagcgtctccacgcagtggctggccccgtggccggggcgtctcttgcatgctgttggtggtccttccccagttcctatctcccacccgcctggttccagccccatcccctctcccactgagtcacaggtttgagattcccagagaggccaaagacagctacaggaagtaccctgggggctcagctgagagagagtcacagaaaggccagagggtctcaggaaggtctggaggtcacagctgggctcacagaagctcttgggccctggcatcctgggtgaccggtgttcttgggtattggggacaggacagagagctcattctataaccacagttgtcttttaaaggccaccctctccagccccttgtcccccctgtgctgtgagcccaagtcccttgtgaccactcagtgtcccgtccccacccctccagccgcagtttttggctacaaactgtcacagtatacattggtaataaaatatttcccc

SEQ ID NO: 418383 - DNA, 4201 bp, Homo sapiens
acggagccggcgctggggacggcggcgccgagtctgcgggtcctcccgccagcccggccggaggcagccgaggccgctcgggcggcggcggcggcggcggcgggagccggagcgcatctcgcccaggagccggagcagcggcactgcctgaaccagacagcagccttgggtgcaggcgtggtcatgagggcagatggacactgctgaagacccggcctggctccagctgcttcaaaaggattccagccccccaggaccccgacccacagccttcttctgcccacaggatgggagcctgggggctggcagctcggctatgagggattactgcccctcccagcaaaaggcaagccctgcaccccccaggcacacccctgaccaaagcccaggcatggagtctagacacagaagccccagtggggctggggaaggggcctcctgctctgacggccccagagggagcctggcctgcccctccccaacctgcttctctccccaggagtcaccctccaaggagacattggaggcacatggagcctccatctcagggacaccagaagccaccacgtctgggaagccagagcctgtgtcctccgtgaaaactgagcccaaatcctcagatgacagaaatcccatgttcttagagaagatggatttcaagtcctcaaagcaggccgattccacttccataggaaaggaggatcctgggtcctcacggaaggcagatcccatgtttacaggaaaggcagagcctgaaatcttgggaaagggggatcctgtggctcctggaaggatggatcccatgactgtaagaaaggaagatcttggatccctgggaaaagtagatcctttgtgctccagcaagacgtatacagtgtcaccgaagaaaggtggatcctgtgtcctcagacaaagtggaccctgtattcccaagaaaggaggagcccaggtattcaggaaaagagcatcctgtgtcctcagaaaaggtcgctcctacatctgcagaaaaggtagatcttgtattgtcgggaaagagagatcctgggccctcgggaaaggcagatcccgtgcccttggaaagcatggattctgcgtccacaggaaagacagagccggggctcctgggcaagctgattccaggctcatcaggcaagaatgggcctgtatcctctgggaccggggctcctgggtccttgggaaggctggatcccacatgcttggggatggcagatcccgcatctgtgggaaatgtagaaactgtgcctgccacaaaagaggactcccggttcctgggaaagatggaccctgcctcctcaggagaggggcgtcctgtgtctggccacacggatactacggcttcagcaaagacagatctcacatctttgaaaaatgtggatcccatgtcttcaggcaaggtggatccagtttctctgggaaagatggaccccatgtgctcaggaaagccagagctcttgtctcctggacaggcagagcgtgtgtctgtgggaaaggcaggaactgtatccccaggaaaagaggacccggtgtcctccagaagggaggaccccatatctgctggaagtagaaagacatcatctgaaaaagtgaatcctgagtcttcaggaaagacaaaccctgtgtcttcaggtccaggcgatcccaggtccttggggacagcaggtcccccatctgcagtaaaggctgagccagcgacggggggaaaaggagatcccctgtcctcggagaaggcaggtctggtggcctctggaaaggcggctcccacagcctcagggaaggccgagcccctcgcggtgggcaaggaggaccctgtgagcaagggaaaggcagacgctggcccctctggacaaggggactctgtgtctataggtaaagtggtctcaactccaggaaaaacagtcccggtgccctcggggaaggtggatcccgtgtccctgggaaaagcagaagctatcccagagggaaaagtgggttctctgcctctagagaaggggagtcctgttaccaccacaaaggcggatcccagggcctcggggaaagcacagccgcagtctggtggcaaagcagaaacaaagctccctgggcaagagggcgctgcagcaccaggagaagcaggggctgtgtgtttgaaaaaggagacaccacaggcctcagagaaggtggatcctggatcctgcagaaaagcagagccccttgcctcagggaagggagagcctgtgtccctggggaaagccgactctgcaccttccagaaaaacggagtccccatccttggggaaggtggtccccctgagtctggagaagaccaagccgtcctcctcctccaggcagttagaccgcaaagccctcggctcagcccggtctcccgagggtgccaggggcagtgaaggccgcgtggagccgaaggccgagcccgtgtccagcaccgaggcctccagtctcggccagaaagacctggaagccgctggggccgagagaagcccctgcccagaggccgcagcgcccccgccggggccgcggactcgcgacaacttcaccaaggcgccgtcgtgggaggcgagcgccccgccgccgccgcgcgaggacgcgggcactcaggcgggcgcgcaggcctgcgtctcagtggccgtgagccccatgtctccgcaggacggcgctgggggctcggccttcagcttccaggcggcgccgcgcgcgcccagcccgccctcgcgccgagatgcgggcctgcaggtgtcgctgggcgccgccgagacgcgctccgtggccactgggcccatgacacctcaagccgccgcgccgcccgccttccccgaagtgcgggtgcggcccggctcagcgctggcggccgctgtagcgcccccggagccggctgagcccgtgcgagacgtgagctgggacgagaagggcatgacgtgggaggtatacggcgccgccatggaggtggaggtgctgggcatggccatccagaagcatctggagcgacagatcgaggagcacggccgccaaggggcgcccgcgccgccgcccgccgcccgtgccggccccggccgttcgggctcggtgcgcaccgcgcccccagatggcgccgccaagcgtccgcccggcctgttccgcgcgctgctgcagagtgtgcgccggccgcggtgctgctcgcgggcgggacccacggccgagtgatctgcccccattttgtacgcccgagtttccgaccttctcaggctcccttcttgatcacaggcccctagaaggggtcccctctgcgtgccacaggcctccgaggggttgtgcagcctctagggctgttgcgtccccgtctttccagcccctcccatcacaaatacagaagaaccccttctaccaagctccctcgtggccacgaggccacgaacccggccagccctgacgccccactgtcccctcacagccctcagctctactcccggtcacactgggcgaccacgggggcctgctcagcaccctcacctcccaccccctgagagctggggcaggctcctgagatgtctagactggtgcgttgtggtctccggtggggccagatccccagaacagggagagactgcatacaagtctgagtggcagaagcttcaagtgggtgaggatcggtgtgtgagacccgcgagtgggcacgtctctgaatgtgaggtctcgggcagcacgtgaggtagaacgagtgtgagcgtctccacgcagtggctggccccgtggccggggcgtctcttgcatgctgttggtggtccttccccagttcctatctcccacccgcctggttccagccccatcccctctcccactgagtcacaggtttgagattcccagagaggccaaagacagctacaggaagtaccctgggggctcagctgagagagagtcacagaaaggccagagggtctcaggaaggtctggaggtcacagctgggctcacagaagctcttgggccctggcatcctgggtgaccggtgttcttgggtattggggacaggacagagagctcattctataaccacagttgtcttttaaaggccaccctctccagccccttgtcccccctgtgctgtgagcccaagtcccttgtgaccactcagtgtcccgtccccacccctccagccgcagtttttggctacaaactgtcacagtatacattggtaataaaatatttcccc

SEQ ID NO: 418384 - DNA, 4373 bp, Homo sapiens
acggagccggcgctggggacggcggcgccgagtctgcgggtcctcccgccagcccggccggaggcagccgaggccgctcgggcggcggcggcggcggcggcgggagccggagcgcatctcgcccaggagccggagcagcggcactgcctgaaccagacagcagccttgggtgcaggcgtggtcatgagggcagatggacactgctgaagacccggcctggctccagctgcttcaaaaggattccagccccccaggaccccgacccacagccttcttctgcccacaggatgggagcctgggggctggcagctcggctatgagggattactgcccctcccagcaaaaggcaagccctgcaccccccaggcacacccctgaccaaagcccaggcatggagtctagacacagaagccccagtggggctggggaaggggcctcctgctctgacggccccagagggagcctggcctgcccctccccaacctgcttctctccccaggagtcaccctccaaggagacattggaggcacatggagcctccatctcagggacaccagaagccaccacgtctgggaagccagagcctgtgtcctccgtgaaaactgagcccaaatcctcagatgacagaaatcccatgttcttagagaagatggatttcaagtcctcaaagcaggccgattccacttccataggaaaggaggatcctgggtcctcacggaaggcagatcccatgtttacaggaaaggcagagcctgaaatcttgggaaagggggatcctgtggctcctggaaggatggatcccatgactgtaagaaaggaagatcttggatccctgggaaaagtagatcctttgtgctccagcaagacgtatacagtgtcaccgaagaaaggtggatcctgtgtcctcagacaaagtggaccctgtattcccaagaaaggaggagcccaggtattcaggaaaagagcatcctgtgtcctcagaaaaggtcgctcctacatctgcagaaaaggtagatcttgtattgtcgggaaagagagatcctgggccctcgggaaaggcagatcccgtgcccttggaaagcatggattctgcgtccacaggaaagacagagccggggctcctgggcaagctgattccaggctcatcaggcaagaatgggcctgtatcctctgggaccggggctcctgggtccttgggaaggctggatcccacatgcttggggatggcagatcccgcatctgtgggaaatgtagaaactgtgcctgccacaaaagaggactcccggttcctgggaaagatggaccctgcctcctcaggagaggggcgtcctgtgtctggccacacggatactacggcttcagcaaagacagatctcacatctttgaaaaatgtggatcccatgtcttcaggcaaggtggatccagtttctctgggaaagatggaccccatgtgctcaggaaagccagagctcttgtctcctggacaggcagagcgtgtgtctgtgggaaaggcaggaactgtatccccaggaaaagaggacccggtgtcctccagaagggaggaccccatatctgctggaagtagaaagacatcatctgaaaaagtgaatcctgagtcttcaggaaagacaaaccctgtgtcttcaggtccaggcgatcccaggtccttggggacagcaggtcccccatctgcagtaaaggctgagccagcgacggggggaaaaggagatcccctgtcctcggagaaggcaggtctggtggcctctggaaaggcggctcccacagcctcagggaaggccgagcccctcgcggtgggcaaggaggaccctgtgagcaagggaaaggcagacgctggcccctctggacaaggggactctgtgtctataggtaaagtggtctcaactccaggaaaaacagtcccggtgccctcggggaaggtggatcccgtgtccctgggaaaagcagaagctatcccagagggaaaagtgggttctctgcctctagagaaggggagtcctgttaccaccacaaaggcggatcccagggcctcggggaaagcacagccgcagtctggtggcaaagcagaaacaaagctccctgggcaagagggcgctgcagcaccaggagaagcaggggctgtgtgtttgaaaaaggagacaccacaggcctcagagaaggtggatcctggatcctgcagaaaagcagagccccttgcctcagggaagggagagcctgtgtccctggggaaagccgactctgcaccttccagaaaaacggagtccccatccttggggaaggtggtccccctgagtctggagaagaccaagccgtcctcctcctccaggcagttagaccgcaaagccctcggctcagcccggtctcccgagggtgccaggggcagtgaaggccgcgtggagccgaaggccgagcccgtgtccagcaccgaggcctccagtctcggccagaaagacctggaagccgctggggccgagagaagcccctgcccagaggccgcagcgcccccgccggggccgcggactcgcgacaacttcaccaaggcgccgtcgtgggaggcgagcgccccgccgccgccgcgcgaggacgcgggcactcaggcgggcgcgcaggcctgcgtctcagtggccgtgagccccatgtctccgcaggacggcgctgggggctcggccttcagcttccaggcggcgccgcgcgcgcccagcccgccctcgcgccgagatgcgggcctgcaggtgtcgctgggcgccgccgagacgcgctccgtggccactgggcccatgacacctcaagccgccgcgccgcccgccttccccgaagtgcgggtgcggcccggctcagcgctggcggccgctgtagcgcccccggagccggctgagcccgtgcgagacgtgagctgggacgagaagggcatgacgtgggaggtatacggcgccgccatggaggtggaggtgctgggcatggccatccagaagcatctggagcgacagatcgaggagcacggccgccaaggggcgcccgcgccgccgcccgccgcccgtgccggccccggccgttcgggctcggtgcgcaccgcgcccccagatggcgccgccaagcgtccgcccggcctgttccgcgcgctgctgcagagtgtgcgccggccgcggtgctgctcgcgggcgggacccacggccgagtgatctgcccccattttgtacgcccgagtttccgaccttctcaggctcccttcttgatcacaggcccctagaaggggtcccctctgcgtgccacaggcctccgaggggttgtgcagcctctagggctgttgcgtccccgtctttccagcccctcccatcacaaatacagaagaaccccttctaccaagctccctcgtggccacgaggccacgaacccggccagccctgacgccccactgtcccctcacagccctcagctctactcccggtcacactgggcgaccacgggggcctgctcagcaccctcacctcccaccccctgagagctggggcaggctcctgagatgtctagactggtgcgttgtggtctccggtggggccagatccccagaacagggagagactgcatacaagtctgagtggcagaagcttcaagtgggtgaggatcggtgtgtgagacccgcgagtgggcacgtctctgaatgtgaggtctcgggcagcacgtgaggtagaacgagtgtgagcgtctccacgcagtggctggccccgtggccggggcgtctcttgcatgctgttggtggtccttccccagttcctatctcccacccgcctggttccagccccatcccctctcccactgagtcacaggtttgagattcccagagaggccaaagacagctacaggaagtaccctgggggctcagctgagagagagtcacagaaaggccagagggtctcaggaaggtctggaggtcacagctgggctcacagaagctcttgggccctggcatcctgggtgaccggtgttcttgggtattggggacaggacagagagctcattctataaccacagttgtcttttaaaggccaccctctccagccccttgtcccccctgtgctgtgagcccaagtcccttgtgaccactcagtgtcccgtccccacccctccagccgcagtttttggctacaaactgtcacagtatacattggtaataaaatatttccccaacccctgtctgccgtgattggccaaaagcaggaggcagggcagcgtcatatattttcatctccagggagacaggtgcagttagggtgtggtagggcctcttcaaggggtccagaagagtggggccccctgtcacaggtccgtggtgtccaggccagcgttggtgtaggatg

SEQ ID NO: 418385 - DNA, 2998 bp, Homo sapiens
  misc_feature (839)..(839): n is a, c, g, or t
  misc_feature (903)..(903): n is a, c, g, or t
  misc_feature (1588)..(1588): n is a, c, g, or t
  misc_feature (1843)..(1843): n is a, c, g, or t
  misc_feature (1936)..(1936): n is a, c, g, or t
  misc_feature (2188)..(2188): n is a, c, g, or t
  misc_feature (2348)..(2348): n is a, c, g, or t
  misc_feature (2719)..(2719): n is a, c, g, or t
  misc_feature (2831)..(2831): n is a, c, g, or t
atcagaaggcctgggcagacttggccagccacctggagcactgtgcccttaaactcagggcattcactggtgacccacactgacactgctttttggaggacaaggcagagttgaccatcccagtcttgcctggaggtcataggaccgttgtcactgcagcctcaggtctgatgcataatcccatgaccctccagatctgagccatgacccactctgggccctgccggcggggaggcggtgggcccatgggggctgcctcactggcctccctcgtcctctattccgggttggggttggctctcagcacactggggaaaagggtggggtcgatgacttgtccctggctccctccccttgccccatgcctgccataaccgcagcttcagagaaaggtgccacactcgcttggctgacaatgtcggggagtcccctgggctccacaccagggcgtgtgcccttggaaaaccacggtgactgaatcatgtccctttcagccaaaactggaagacagcccagctccctgccttcaggtgaccagatctctaagtcacattactggccccagggtcaagtccaggctccccagctggggtacctcccaggctgagtacaggccttgctccctccttcctccctgcacgtgctctgagcctccagcccgacgcctgggatgccggtgccccttgggccccagaccctactactcttgagtgacaggcctcttcctaggggtttctgtgcatccgtcacatcacccacgttagagtcccttcctgtgaggacagaagggccctgaagacagagccggcccctggtgagctctgctttcccgcactganccctcctgggctgcagctccccacctggcagctgccgccccccatggccctggtcgaggtcacntgtcgttcccgtccccaccactcaccaagcgctcccaggttctccgtctggaagaccctctgcagcggggggatgtaaatgaccgccagctgccccaggatggaccccaggacggagtagaggaacatgtggttcctgagaaagccgatctcaaatatcagcttggtctgcagggagaaggtcacacgggggattgtgtgctgtccacaccccaggtacaggcaggggagctctgactgcccacgctgagccagagccgctcaatgctgcgggcagggtcggggcgctgctgtcgagaacacacagcagctctgcagcgaggagggtcagcccgggtctcacctgagagcggcaggtcaaggcgttgaagagatcgaaaaacacaaaacaagtgaacgtcatcgtcgtggtgcggggagtgcttgctctgtcttcaggcatctggaaggtgagcacaaagatgtgagctgtggcaggagggcagggactgcagtccccagcgtctgcaccgcaccagggcttggagaacaggccggggtgaccctcgctcacctccttccagaagataaagagggtcccgctgatgatgatggccgcggacatgaggatcttcaggatgagggctctgctgaggatggtgtcccgcacactccgtggtggctgcctgaaggcgtctttgtcaacnggctctacccccaagctgctccgaacaagacacagacactttgaaatgaaccaggaatgaaataaaggacccttgaaacagctgtgcctgagcctcccaggccaagttggcacagggggcagggccaggcatttgctgaacgcccccaggcatcgcacctgccctcctcggcaccttccagaagccccagagcctgggtccatgggcagctgtgcccctccatctgtcccgcagacagtgaaggaagaccacccngtaaggccaaccacacacagttccatacacccagatgatctccatcaccccgaggggaccccccccaacgttgcgcctggagaaacaggctcnaggctccgccctccgcagagcccctcatcagctgagagagaccagcctccagccaactccacacagcagggttgaggctagacccgcagcaggcggtatggtgggagtggccgggtgaggccctgccgctcagacacagctgaggccagcttcctggtcccacttctgctcccagggagggctggcaggagaggtaaccctcacacttggctttggggacacaaatgaggactctctttcccttggcagctntcactggtgataacagcagcactgagctccagcggaagcactggctctgtgctcatacggttacgcacacgtggccagatgggtcccctgactccaaagcgcattccttcccccacaccacttggccagcttgttgaaggggatattaagtggcggagcnggtggactcctgagcacctactgagtggcaagccctttatctctagacatcagggatgaaacacaaactccgcctccatgaaactgatgttctaaaggggagacagatcacaatcagatccataaggaaaagtgtgtctgtgtgtatcttcctctctagggaaaaatacagcagggtgaggggattgagtgggagtgcaatcagggaagacttcctgaaggcagtgactggtgactggaatgaagcatgagaatgagccatgcaggttgcccagagagagcatccaggcagagggagcagaaagttccatcctcacccagctctgccggcccaggtactttctcctctgccttctactcccagtctcactncagtgcaacacacttcagttttctgggaactcctgatggaaagtggctgtatttgttcatccctatagccttggggcacagccagcagcccctggaggaagccccgcaggtnggtaaagagacacagggctcccagccggccctgcctcacctctgcgccggtggcccatccatgatgatgttgatccataggatctgcatggcgttgagggggctgggcaggttgaacacggtggacagagtgatgagactcagggcggagatgctcctgcggggcac

SEQ ID NO: 418386 - DNA, 2195 bp, Homo sapiens
ggcattctgaagcaagtcttaacagagctaaaaatcacccttacccaattctctgcactgacatatgtacacaaagtaatattttattattctccttcataaatggtttctttaattgaacctttgagccttatactatttttaaatttccctttaaaaattgaattacagccaggcatggtggctcatgcctgtaatcccagaactttgggaggccatggcaggaggattgcttgaacccaggagttgtagaccagcctgggcaagatagcgagatcctgcctctgaaaaaatcataataatactttaatttagaaaataccctgaattagaagtgcttcattcctcatttgtgtacagctgttcctctatatacgaaggggattggtaccagaaccactgcataccaaattccacccatactcaagtctcacagtcttccctgcagaatccaagtatacaaaaagtaggcctatcatttatatgggttttgcatcctgacagtactgtattttcaatcctagtttgtttgggaaaaaaaaattgtttgtatgcctgggtacagtatcatacctgtggtcccagcactttggaaggctgaggcgggaggactgttttgtggccaggagttcaagatcagcctggtcgacgtggtgagaccccatctctacaaaagaaaaattagctgggcatgtggcacctgcctgtggtcccagctactcgggaggctgtgaggcaggagaattgcttgagcctgggaggttgaggctgcagtgagccgcgatcacaccactgcatgccagcctgggcgacagagtgagaccctgtctcagaaaagaaaaaaaaagtaaaaaatggcatgtaagtgacccgcactattcaaatttgtggtgttcaaggttcaactgtaatttcctagcagcatttggtgtgtttgagaatctcttgacactcttcaagtaaatccctaaattacaactttgacatcaaaaaagctagacattcctacatttttgcactacaatacataaaaactcccatgctgatcggttgtgggatcgtgcctgtgaataaccactgcactccagcctgggcaacatagtaagtaagaccttgtctcttaaaaaaaatacattctgaagaaagttctacttatgaatacattttatttataacaaactggtgaaaattttagaccaaaccatgtctttctgggttgtagtgattaaaaaatggttaagagaatgttccctatacaaggcatatgttattaaacatgaaatttaggattagttttctctttgaaaattcttttgatatgctgaggttacagtttggaggttacattagagaaagaatatagggaagatggcagtggtaaaacatttccctgctttacatttttatattggcagtatcttggtttcaacttttctattttcagcaagatatttgcaagtttttactttgaagatgtttggtttatagtagtccatgctatactaatgctgttgctgagataattaagttagatactaatatgaaaaagaatatttgtgtaaaatattttgaagttgtaattagtgtatatacaagttgttaatacttacgaaaaaaggaagcattcccacctgtaataattttgttaacactagactatcagtaaattatcaagaataaaaaccttggtttttctgtaatatttgccactgagcaatttttattaaaaaccaaacagaagtatttacacaagaacaagtgaaattacacaaaatgataatggggagaaatttctcatctggtgataaagggaaaaagataatgtaaaagcagattgctgctatttgcataataagcacttgttgaagaataaatgattaagttcaatatttttgctctattttatacctactcactttggtggaattagttctccatgtaaagtatctttttaatagtaagcaccatttaataatgaaacaactcatatgttttgtaatccttatggagaattacttcatgtgataattatagtctcttcatggaaaacagtaaaaatactcacgtttatgatgatgggcctaggtactaaattcctcattcaatctttttttaccaaatggtacttaataaaatcttttaccttataaaaatctattttcggccaggcgcggtggctcacgcctgtaatccca

SEQ ID NO: 418387 - DNA, 670 bp, Homo sapiens
gtactcgaggttgaagacggcgccgtgggtgcgggtgctgagggtctcactctgttgaccaggatggagtacagtaatacagtcatggctcactgcagcctcaacctcccaagctcaagcagcaggaagatcttttgagggtagaaggccctgaagaggcgtttcaggaggaatgggttttgcttcctggtccagttgtgctcactggcacacttctgcagcacagcagcttctccagcatctgttcctgctttgattggtggccagaaacactcagcagccagcagtgttccttagcaccctattgggcagttttatagcagaggcttccaggagacccctccccatgaatacgtttcctcagcaacgtaaaagtgccagaaaattctagagggtggatttataggaagttccactggaagattcccaatgacttcttgccatttaatgagccatagccacactctcttcaaaagggtctcaatctgccctggctggaggcgagaggctcctctttgggaactctatcacagcattagagtagcagctgttccttatatctgctattgctatactctttaaagctctctagttcttattagccagtgcttcattattctaataccctgttatagctaataattcctcatatattaaactgtctttattc

SEQ ID NO: 418388 - DNA, 457 bp, Homo sapiens
ttgttcttggcagagtccccctagggtcttcctgcagagtcccttgaggtaccagaatgatggctgctcaatttcagtttcagtttcctgtgggatgatcacttgatttcacaatacctgaaccaggacttatgcactgacaaaaagaatcaagggccagacacagtggctcacgcctgtaatctcagtgctttgggaggccaaggtaggaggatctttttttttttttttcagggtctcactctgttgaccaggatggagtacagtaatacagtcatggctcactgcagcctcaacctcccaagctcaagcagcaggaagatcttttgagggtaaggagtttgagaccagcctgggcaacatcatgaaactctgtctctctatgaaaaataacaaaatcattccggtgtggtgatgcatgcttgtagtcctagctgctcggaaggctgagccagga

SEQ ID NO: 418389 - DNA, 804 bp, Homo sapiens
gagctgcaatcagagggtgtctgccatagctgggctcaggcatctgtccttggctttgttgcctggctccagggagattccgggggccctgtgctgtgcctcgagcctgacggacactgggttcaggctggcatcatcagctttgcatcaagctgtgcccaggaggacgctcctgtgctgctgaccaacacagctgctcacagttcctggctgcaggctcgagttcagggggcagctttcctggcccagagcccagagaccccggagatgagtgatgaggacagctgtgtagcctgtggatccttgaggacagcaggtccccaggcaggagcaccctccccatggccctgggaggccaggctgatgcaccagggacagctggcctgtggcggagccctggtgtcagaggaggcggtgctaactgctgcccactgcttcattgggcgccaggccccagaggaatggagcgtagggctggggaccagaccggaggagtggggcctgaagcagctcatcctgcatggagcctacacccaccctgaggggggctacgacatggccctcctgctgctggcccagcctgtgacactgggagccagcctgcggcccctctgcctgccctatcctgaccaccacctgcctgatggggagcgtggctgggttctgggacgggcccgcccaggagcaggcatcagctccctccagacagtgcccgtgaccctcctggggcctagggcctgcagccggctgcatgcagctcctgggggtgatggcagccctattctgccggggatggtgtgtacc

SEQ ID NO: 418390 - DNA, 706 bp, Homo sapiens
gcaccctccccatggccctgggaggccaggctgatgcaccagggacagctggcctgtggcggagccctggtgtcagaggaggcggtgctaactgctgcccactgcttcattgggtgagtcttggatccctctctgctgtgccccctgcccctgccggcagccctgtcacctggtgccgtccacactgcctctgcacaggcgccaggccccagaggaatggagcgtagggctggggaccagaccggaggagtggggcctgaagcagctcatcctgcatggagcctacacccaccctgaggggggctacgacatggccctcctgctgctggcccagcctgtgacactgggagccagcctgcggcccctctgcctgccctatcctgaccaccacctgcctgatggggagcgtggctgggttctgggacgggcccgcccaggagcaggtaggtgggcacagggccagggctgctgtccatccaacctgcaggccggggcagccagctttcccttgctccacaggcatcagctccctccagacagtgcccgtgaccctcctggggcctagggcctgcagccggctgcatgcagctcctgggggtgatggcagccctattctgccggggatggtgtgtaccagtgctgtgggtgagctgcccagctgtgaggtgagccccaggcccccacaccttacctaacaggcccctgg

SEQ ID NO: 418391 - DNA, 1965 bp, Homo sapiens
tttttttttaatgtgagaagcagaatgtgcttctagaaactggttttaaagagatgagctgagaaagaaatgtggaatggagtatatttgaggaggacaaaacataacttcacttttgaacagaaatcactctagcttgccagcatgggatgtaaaccaagagagtagaaatatacccatcttattttaagttgggtttatggcatcgctcatatatgtaaaagcactacaaactctttaaagaaaattgggaaactacagagaagtcaaagaaaaaaaaaagtaacccatatttctattgcccaggtataatccttgttaatattttggtttggtctcctcttttttcccccaatatagttgtaaataaatgatgtctttcagagttgacatttatcctgtagcttgaatggcatgtaaatgccagttgtatattttttcatgaagtgtaggtttggaatacactagagttagctatatgcttgaatgctgatcactggattctgagactgactactgagtctacctttttaatcaagcctaacatgaatgggctccaaaaagtaatgaatgtaattgtactttttgatgtgcctctgcacttggcttggtgagtcatcataaatagctgttaaatatgtgactttacagattttgatatgttcagattgtaaaaaatgaatagtttatttcattaattgatgggcagtcaagaatctccctcccttcagtagggctgacacttaggagttaggtcatggttgtggttacttggcatggctaatcagattttgttctggtcagaatttgcccaagatcaatacccagcagaaactggagttaggctataaaaaaccattcatgtttccgagtgatcatttcagtcagcgattcatgttttacagtgtttagttgttgattattagaaaaagtaatattttcttccctttatgattacatcattataaatcaagtccttccatgaacacatttaaggtgtgtggagatgagatctctgaatccatttggggatgggctgcatttttggggaactctatgcctgtccagtgaagagtgcctaaaacattaattatagatcaaagatgttctgttgagggacaaagcttgatggtcatcaaacacaaggctttgtaaaaatacgaccacctattccacttactggatctgtcaggtgtgtaaaacttctctcgccagttcatcatgcttccatgagccctcaggactgggatttgagccttcctggctctttatcccttggggcagacatggaaccatctctgagggaccaggtggatgctgaagctcacccagtcagggcccctctcctagctccttttacactgaaattaatctgaaagctttcatagccaaggctttgcctaggtgctattattccagctggccaaagagaagtcttgggccagattgggattctcaatggattttatagacataattcccctgcaaacttaaaaaaataaataacccctactttataggactaattgtttgaattgtatctttctctgtatgttaaaccagatttaaaactattttataaccacaatatgtaatcagagcaatatagtgttttcagatatataccttgttttataccttatgtaggtgtcctacataagggtggcatgcccactggctgtggtaaaatttaatcctcattgctttgggagtgacttaaggccttttgaagtggagcttttgcactttatactttttctgtgaactatgataactatatttgatattaaagctgtaagtggcattttcagcaaatgaatatgtacatgtttgtgtctatttccaaaatgatttctgaactatctgcagtgaaaatgtatctgatggattgtagagcaaagcacattgcctaaattcatttgttaatgaattgggtaccattgttattaaaaatgcgtaaagtaa

SEQ ID NO: 418392 - DNA, 2437 bp, Homo sapiens
tttttttttaatgtgagaagcagaatgtgcttctagaaactggttttaaagagatgagctgagaaagaaatgtggaatggagtatatttgaggaggacaaaacataacttcacttttgaacagaaatcactctagcttgccagcatgggatgtaaaccaagagagtagaaatatacccatcttattttaagttgggtttatggcatcgctcatatatgtaaaagcactacaaactctttaaagaaaattgggaaactacagagaagtcaaagaaaaaaaaaagtaacccatatttctattgcccaggtataatccttgttaatattttggtttggtctcctcttttttcccccaatatagttgtaaataaatgatgtctttcagagttgacatttatcctgtagcttgaatggcatgtaaatgccagttgtatattttttcatgaagtgtaggtttggaatacactagagttagctatatgcttgaatgctgatcactggattctgagactgactactgagtctacctttttaatcaagcctaacatgaatgggctccaaaaagtaatgaatgtaattgtactttttgatgtgcctctgcacttggcttggtgagtcatcataaatagctgttaaatatgtgactttacagattttgatatgttcagattgtaaaaaatgaatagtttatttcattaattgatgggcagtcaagaatctccctcccttcagtagggctgacacttaggagttaggtcatggttgtggttacttggcatggctaatcagattttgttctggtcagaatttgcccaagatcaatacccagcagaaactggagttaggctataaaaaaccattcatgtttccgagtgatcatttcagtcagcgattcatgttttacagtgtttagttgttgattattagaaaaagtaatattttcttccctttatgattacatcattataaatcaagtccttccatgaacacatttaaggtgtgtggagatgagatctctgaatccatttggggatgggctgcatttttggggaactctatgcctgtccagtgaagagtgcctaaaacattaattatagatcaaagatgttctgttgagggacaaagcttgatggtcatcaaacacaaggctttgtaaaaatacgaccacctattccacttactggatctgtcaggtgtgtaaaacttctctcgccagttcatcatgcttccatgagccctcaggactgggatttgagccttcctggctctttatcccttggggcagacatggaaccatctctgagggaccaggtggatgctgaagctcacccagtcagggcccctctcctagctccttttacactgaaattaatctgaaagctttcatagccaaggctttgcctaggtgctattattccagctggccaaagagaagtcttgggccagattgggattctcaatggattttatagacataattcccctgcaaacttaaaaaaataaataacccctactttataggactaattgtttgaattgtatctttctctgtatgttaaaccagatttaaaactattttataaccacaatatgtaatcagagcaatatagtgttttcagatatataccttgttttataccttatgtaggtgtcctacataagggtggcatgcccactggctgtggtaaaatttaatcctcattgctttgggagtgacttaaggccttttgaagtggagcttttgcactttatactttttctgtgaactatgataactatatttgatattaaagctgtaagtggcattttcagcaaatgaatatgtacatgtttgtgtctatttccaaaatgatttctgaactatctgcagtgaaaatgtatctgatggattgtagagcaaagcacattgcctaaattcatttgttaatgaattgggtaccattgttattaaaaatgcgtaaagtaaaaaaaaaaaaaaaaaaaaaaaaaaaaaaaaaaaaaacaaaaaacaaaaaaaaaaaaaaaaaaaaaaaaaaaggggggggggggcaaaaatattccccggggggggggcacaatttggcgcccccggttttttgtaagaaaagggggccccccaatagggggggacgcataacacaaacacgagggagcgggtcgcgcgataataaaacgccgacgtggcaagagggggaaaacaaggaccaaggagcaagagacattggagggaagcaggacccacaacacttaagtgaggggggcacaaaatagggagagagaacaccccaccaaaggagatagtacacagcccacgggggacaaataaacaaaacgagacgaaggaatacaattgtaggaatacaacaaccgagaccaatgtctcagggcgagaaagaatagtggaacaagaggaatatagtgagaagagaaattatcgg

SEQ ID NO: 418393 - DNA, 1911 bp, Homo sapiens
tttttttttaatgtgagaagcagaatgtgcttctagaaactggttttaaagagatgagctgagaaagaaatgtggaatggagtatatttgaggaggacaaaacataacttcacttttgaacagaaatcactctagcttgccagcatgggatgtaaaccaagagagtagaaatatacccatcttattttaagttgggtttatggcatcgctcatatatgtaaaagcactacaaactctttaaagaaaattgggaaactacagagaagtcaaagaaaaaaaaaagtaacccatatttctattgcccaggtataatccttgttaatattttggtttggtctcctcttttttcccccaatatagttgtaaataaatgatgtctttcagagttgacatttatcctgtagcttgaatggcatgtaaatgccagttgtatattttttcatgaagtgtaggtttggaatacactagagttagctatatgcttgaatgctgatcactggattctgagactgactactgagtctacctttttaatcaagcctaacatgaatgggctccaaaaagtaatgaatgtaattgtactttttgatgtgcctctgcacttggcttggtgagtcatcataaatagctgttaaatatgtgactttacagattttgatatgttcagattgtaaaaaatgaatagtttatttcattaattgatgggcagtcaagaatctccctcccttcagtagggctgacacttaggagttaggtcatggttgtggttacttggcatggctaatcagattttgttctggtcagaatttgcccaagatcaatacccagcagaaactggagttaggctataaaaaaccattcatgtttccgagtgatcatttcagtcagcgattcatgttttacagtgtttagttgttgattattagaaaaagtaatattttcttccctttatgattacatcattataaatcaagtccttccatgaacacatttaaggtgtgtggagatgagatctctgaatccatttggggatgggctgcatttttggggaactctatgcctgtccagtgaagagtgcctaaaacattaattatagatcaaagatgttctgttgagggacaaagcttgatggtcatcaaacacaaggctttgtaaaaatacgaccacctattccacttactggatctgtcaggtgtgtaaaacttctctcgccagttcatcatgcttccatgagccctcaggactgggatttgagccttcctggctctttatcccttggggcagacatggaaccatctctgagggaccaggtggatgctgaagctcacccagtcagggcccctctcctagctccttttacactgaaattaatctgaaagctttcatagccaaggctttgcctaggtgctattattccagctggccaaagagaagtcttgggccagattgggattctcaatggattttatagacataattcccctgcaaacttaaaaaaataaataacccctactttataggactaattgtttgaattgtatctttctctgtatgttaaaccagattttataccttgttttataccttatgtaggtgtcctacataagggtggcatgcccactggctgtggtaaaatttaatcctcattgctttgggagtgacttaaggccttttgaagtggagcttttgcactttatactttttctgtgaactatgataactatatttgatattaaagctgtaagtggcattttcagcaaatgaatatgtacatgtttgtgtctatttccaaaatgatttctgaactatctgcagtgaaaatgtatctgatggattgtagagcaaagcacattgcctaaattcatttgttaatgaattgggtaccattgttattaaaaatgcgtaaagtaa

SEQ ID NO: 418394 - DNA, 12710 bp, Homo sapiens
cctcccgcctcagttcgcgccgcgcctcggcttggaacgcaggagcgccggctccgggagcccgagcggagccagccgcgcgcacagccagcggccgcgccggcgatgcggggccaccccgcgcccgccccagtcccggccccggcccccgcgggaaggggctgagctgcccgccgccgcccggatggcgagcctcgccgcgctcgccctcagcctgctcctgaggctgcagctgccgccactgcccggcgcccgggctcagagcgccccaggtggctgttcctttgatgagcactacagcaactgtggttatagtgtggctctagggaccaatgggttcacctgggagcagattaacacaacggagaaaccaatgctggaccaggcagtgcccacaggatctttcatgatggtgaacagctctgggagagcctctggccagaaggcccaccttctcctgccaaccctgaaggagaatgacacccactgcatcgacttccattactacttctccagccgtgacaggtccagcccaggggccttgaacgtctacgtgaaggtgaatggtggcccccaagggaaccctgtgtggaatgtgtccggggtcgtcactgagggctgggtgaaggcagagctcgccatcagcactttctggccacatttctatcaggtgatatttgaatccgtctcattgaagggtcatcctggctacatcgccgtggacgaggtccgggtccttgctcatccatgcagaaaagcacctcattttctgcgactccaaaacgtggaggtgaatgtggggcagaatgccacatttcagtgcattgctggtgggaagtggtctcagcatgacaagctttggctccagcaatggaatggcagggacacggccctgatggtcacccgtgtggtcaaccacaggcgcttctcagccacagtcagtgtggcagacactgcccagcggagcgtcagcaagtaccgctgtgtgatccgctctgatggtgggtctggtgtgtccaactacgcggagctgatcgtgaaagagcctcccacgcccattgctcccccagagctgctggctgtgggggccacatacctgtggatcaagccaaatgccaactccatcatcggggatggccccatcatcctgaaggaagtggaatatcgcaccaccacaggcacgtgggcagagacccacatagtcgactctcccaactataagctgtggcatctggaccccgatgttgagtatgagatccgagtgctcctcacacgaccaggtgaggggggtacgggaccgccaggggctcccctcaccaccaggaccaagtgtgcagatccggtacatggcccacagaacgtggaaatcgtagacatcagagcccggcagctgaccctgcagtgggagcccttcggctacgcggtgacccgctgccatagctacaacctcaccgtgcagtaccagtatgtgttcaaccagcagcagtacgaggccgaggaggtcatccagacctcctcccactacaccctgcgaggcctgcgccccttcatgaccatccggctgcgactcttgctgtctaaccccgagggccgaatggagagcgaggagctggtggtgcagactgaggaagacgttccaggagctgttcctctagaatccatccaaggggggccctttgaggagaagatctacatccagtggaaacctcccaatgagaccaatggggtcatcacgctctacgagatcaactacaaggctgtcggctcgctggacccaagtgctgacctctcgagccagagggggaaagtgttcaagctccggaatgaaacccaccacctctttgtgggtctgtacccagggaccacctattccttcaccatcaaggccagcacagcaaagggctttgggccccctgtcaccactcggattgccaccaaaatttcagctccatccatgcctgagtacgacacagacaccccattgaatgagacagacacgaccatcacagtgatgctgaaacccgctcagtcccggggagctcctgtcagtgtttatcagctggttgtcaaggaggagcgacttcagaagtcacggagggcagctgacattattgagtgcttttcggtgcccgtgagctatcggaatgcctccagcctcgattctctacactactttgctgctgagttgaagcctgccaacctgcctgtcacccagccatttacagtgggtgacaataagacatacaatggctactggaaccctcctctctctcccctgaaaagctacagcatctacttccaggcactcagcaaagccaatggagagaccaaaatcaactgtgttcgtctggctacaaaagcaccaatgggcagcgcccaggtgaccccggggactccactctgcctcctcaccacaggtgcctccacccagaattctaacactgtggagccagagaagcaggtggacaacaccgtgaagatggctggcgtgatcgctggcctcctcatgttcatcatcattctcctgggcgtgatgctcaccatcaaaaggagaagaaatgcttattcctactcctattacttgtcccaaaggaagctggccaagaagcagaaggagacccagagtggagcccagagggagatggggcctgtggcctctgccgacaaacccaccaccaagctcagcgccagccgcaatgatgaaggcttctcttctagttctcaggacgtcaacggattcacagatggcagccgcggggagctttcccagcccaccctcacgatccagactcatccctaccgcacctgtgaccctgtggagatgagctacccccgggaccagttccaactcgccatccgggtggctgacttgctgcagcacatcacgcagatgaagagaggccagggctacgggttcaaggaggaatacgaggccttaccagaggggcagacagcttcgtgggacacagccaaggaggatgaaaaccgcaataagaatcgatatgggaacatcatatcctacgaccattcccgggtgaggctgctggtgctggatggagacccgcactctgactacatcaatgccaactacattgacggataccatcgacctcggcactacattgcgactcaaggtccgatgcaggagactgtaaaggacttttggagaatgatctggcaggagaactccgccagcatcgtcatggtcacaaacctggtggaagtgggcagggtgaaatgtgtgcgatactggccagatgacacggaggtctacggagacattaaagtcaccctgattgaaacagagcccctggcagaatacgtcatacgcaccttcacagtccagaagaaaggctaccatgagatccgggagctccgcctcttccacttcaccagctggcctgaccacggcgttccctgctatgccactggccttctgggcttcgtccgccaggtcaagttcctcaaccccccggaagctgggcccatagtggtccactgcagtgctggggctgggcggactggctgcttcattgccattgacaccatgcttgacatggccgagaatgaaggggtggtggacatcttcaactgcgtgcgtgagctccgggcccaaagggtcaacctggtacagacagaggagcaatatgtgtttgtgcacgatgccatcctggaagcgtgcctctgtggcaacactgccatccctgtgtgtgagttccgttctctctactacaatatcagcaggctggacccccagacaaactccagccaaatcaaagatgaatttcagaccctcaacattgtgacaccccgtgtgcggcccgaggactgcagcattgggctcctgccccggaaccatgataagaatcgaagtatggacgtgctgcctctggaccgctgcctgcccttccttatctcagtggacggagaatccagcaattacatcaacgcagcactgatggatagccacaagcagcctgccgccttcgtggtcacccagcaccctctacccaacaccgtggcagacttctggaggctggtgttcgattacaactgctcctctgtggtgatgctgaatgagatggacactgcccagttctgtatgcagtactggcctgagaagacctccgggtgctatgggcccatccaggtggagttcgtctccgcagacatcgacgaggacatcatccacagaatattccgcatctgtaacatggcccggccacaggatggttatcgtatagtccagcacctccagtacattggctggcctgcctaccgggacacgcccccctccaagcgctctctgctcaaagtggtccgacgactggagaagtggcaggagcagtatgacgggagggagggacgtactgtggtccactgcctaaatgggggaggccgtagtggaaccttctgtgccatctgcagtgtgtgtgagatgatccagcagcaaaacatcattgacgtgttccacatcgtgaaaacactgcgtaacaacaaatccaacatggtggagaccctggaacagtataaatttgtatacgaggtggcactggaatatttaagctccttttagctcaatgggatggggaacctgccggagtccagaggctgctgtgaccaagcccccttttgtgtgaatggcagtaactgggctcaggagctctgaggtggcaccctgcctgactccaaggagaagactggtggccctgtgttccacggggggctctgcaccttctgaggggtctcctgttgccgtgggagatgctgctccaaaaggcccaggcttccttttcaacctaaccagccacagccaagggcccaagcagaagtacacccacaagcaaggccttggatttctggctcccagaccacctgcttttgttctgagtttgtggatctcttggcaagccaactgtgcaggtgctggggagtgggaggctcccctgccctccttctccttaggagtggaggagatgtgtgttctgctcctctacgtcatggaaaagattgaggctcttgggggtcactgctctgctgccccctgcaacctccttcaggggcctctggcaccagacatttgcagtctggaccagtgtgaccttacgatgttccctaggccacaagagaggccccccatcctcacacctaacctgcatggggcttcgcccacaaccattctgtaccccttccccagcctgggccttgaccgtccagcattcactggccggccagctgtgtccacagcagtttttgataaaggtgttctttgcttttttgtgtggtcagtgggagggggtggaactgcagggaacttctctgctcctccttgtctttgtaaaaagggaccacctccctggggcagggcttgggctgacctgtaggatgtaacccctgtgtttctttggtggtagctttctttggaagagacaaacaagataagatttgattattttccaaagtgtatgtgaaaagaaactttcttttggagggtgtaaaatcttagtctcttatgtcaaaaagaagggggcgggggagtttgagtatgtacctctaagacaaatctctcgggccttttattttttcctggcaatgtccttaaaagctcccaccctgggacagcatgccactgagcaaggagagatgggtgagcctgaagatggtccctttggtttctggggcaaatagagcaccagctttgtgcataatttggatgtccaaatttgaactccttcctaaagaaacccagcagccaccttgaaaaaggccattgtggagcccattatactttgatttaaaataggccaagagaatcaggcctggagatctagggtcttgtccaaagtgtgagtgagtcaatgagagggaaccaacatttgctaagtctctactgtatgccagggatcatgcttggcactttccataggacatttcacacagtccttagaacccccaggagagagctactgacttgttatcatctccatttgatcatctcctccaatgaggaaacccacgcaccttccttagtaatgaaatcctgggttccaaaggggcaggtaatggcaatgagacttctccgtgctgttttcttcatcttctctaagccaagcaattattttatggagggaaaataaggccagaaacttctgagcagataactccacaaatggaaatttagtactttcttcctgatgccagttcttctgggaagcgcagaatttcagatatattttagtaacacattcccagctccccaggaaagccagtctcatctaatttcttagtcagtaaaaacaattccctgttccttcaggctatgaatggaccagccagggaaactctcgaccttgatctctagccagtgcttaggcccaatatctgacagcctcaggtgggctgggacctaggaagctccatcttgaaggctggtctagccccagacagggcatgaggggcagagaattcaagaaggtacagctttggccctcaagagcccactgtatgctggggaaatggaaccatggtgcagtagtgtggagtggatgagtgttccatgagcctaggagcaagaaagtctcttcggcctcgggcttcctggagaaggggacgtccattcctgctgggtcttaacaagcataaaaaggaaaaaaaggaaactcaggcaaagggatccatatgtgcaatggcaaagaaatgtgaaaaggcattgggagaagcagtctgggggaggccagcccagtgcgggcacagcacaacacggggagcagcaagagatgagccagggtccaggagacagatgcccatcgcgagtacagactttgtcctattggcaacaaggagtccatggagctttagagagatgcactcagcttcgtgttggccaagactccttctgggccaatggggctgcctcttttcctttcatcagacactgtgaaaacattcccttaagcgtgcactttttaatatcacatctatttgtctgtctgctcattgttttgttgctggaactaaatatgcaatggatcatgagactcagattctatgagaaacccagggtctctgctttaccacggagcagggtcaccaacccagatctccaggcccatgaggatggaacatgaaaggagccgacaaaagttgcttccattggcatgggctctggagctgtccagaagtccagggacaccagacttgatcaaggaagggctgtcactttagaggttcaaaaggaagtgcctcaaagcaaaggcaagcaaaggaaccccacgatgaacttgctcttttcctttgatgagcctctccccaggtgtatttcagcagaccccggggacccacccccactgggcctgctggcctccctcggctccagcccaatgccccagctggccttccccagcctgcaaggagcctgtagcatggcaaatctgcctgctgtatgctattttcttagatcttggtacatccagacaggatgagggtggagggagagctatttaacacaaatcctaagatttttttctgctcaggaaggggtgaaatagctggcagatacaaaagacagtggcttttatcattttaaatggtaggaatttaaggtgtgacttcagggagaaacaaacttgcaaaaaaaaaaaatctcaggccatgttggggtaacccagcaagggccagtgatgatttcccccagctcatccccttattttcccacaacccaaccattctctaaagcaggacagtgaataggtcttaggccagtgcacacaggaagaaattgaggcttatggatggggatgacttccctaagatcccatgggacaaggatgtggcaaggcttggatgagatggggcaccagtgcccaggaatttgaacattttcctttacccaggaaatctccggagccaacaccaccacccccagggggtctccccaccccaccccatttacagggtgagctcagcctgtcatgagcagaggaaaatattattaatgctctctgagtctttacaacaggagctcttacctcatagatgtgggctctgtttggggaagatgcaaggaagtaatgagaagcccaggaaatttctccacctgtgtttatggcctaaatagcttcaggatgtatcttagctgcactccaacattgcatcctttctggggtgaagaatctgggccaaccaggggtccttgggcctctagaaggccacagtaggcctctctttgtgggaatggaaggggacagtttgcttttagtgctggccctctctgtgggtgtggcctgcaaaggaaccaacagaccctatgctggggactctaacatgtgagctcattaaattcttccagcattctaaaggagggtttgtgattgtcaccatttactgatgaggaaactaaggctcctaggggagaaatcacttgcccacagttccacagctagtgagtgaatgaaccaggatttaaaccggttttttctcactacagagacaatatttttccaccattgtatctcacatttttcccaggaggttacccataacagaagagactagagtggaacagatacgtcagtggataaagctcaaagcaaacaacagtaagcttaaaattccttcatagtctcatgttttacgttcacaattcatgcaaaatttgcattccactttctgatttagccttgttggttttaatatgactctatgaatatttcaaaaaaaaatgtgctctgttcctcatgttgttctgttctgttcaccccgctatgacggaccctaggtcagctggtcttcagcttgaccctagaattgactctaggagcagtgaccctgctgcctcccagagccagttataggctcaagatcaagaccaactgaccttctcctaggcagctcctttggtgtgtgggtgctctgacctcactgttcatgaggggacctcaactaaggcatcttccagttgggtgctggaaggaacccattaactcacactagaatgatgaggatttgctcatctggcgtggagaaggatgagcccacaaaaccctaaagggaaaagagaagctggacacagctgtactcagcagattcctgaatgctaggctggaaagtggtgcctgttgtccaagtggagtcacatggttgctaatgtgggcaagtctgaggacacacttcatgagcagctggggtctggaaggctcctcactttaccctagccacacataattactgggtgcctacagcacctagcaccttggagggggcactattaggaaatcgagattactatggcacaattaattcctgggtaaggcatggggttgtggtggacagagctcagtctttagtttgaacgaaaacatacatacatgaaaaacatacatgaaaaaaggaccctcatcaacattagaaggggtagatttggagcactttaggcaggaaaacaggaacgcaaggccaggaaactggaacccagtgaatactcagaaccgaggatgcagatgacttatttagcaaaatggtcacttctgtgacatagctggagaaaggatgggtaacagcttgccagagccacttggaacaagggcaaatctcagtgtctggggcaaaagatgatgcatttccctctgacccatcatgtttattcatcctccactccccattgccacactagctcttgctgtaagtcctcaccaggatctacatttcctcgtcgctggtgggaaccccttagagtacatagaggtatcagtccagtaagactgctctacacaacagaagtgaggcccagggagtagcagccaggcccttatcctgttacctctgcaggagtgactgcccaacccagatccagagacattgaaggaaatgataattccttggtacctcactgccttgggacaaaatgaagaaagccacccttccttaggctgcagcttgccactcctgggctgggtaaacaggtcatcagcaccaggctcaaccaggagtaacattctggaagacatgggtgagcccaagaggaagcatgaacaggacgctgttcctaagtcatgtcaacaggttgtgctgggccaggatccccagggaaaaaaatggtcaacccaactggagggtaggttagaagaaaaaaaacataaacgtggatagtcatgtcatctcaaatccctgacttggcttccccattacttgacagtctgagctccttcttagcctgtgaccagcttcaaatcacagccaagtaaaacaaggaaataggaaaagtaaatccaactagaagagacaagctgagattcagatttgtttactcctcccatgcaaagtttccctgttggaggttttccatgtatacatgtctagaagtgatagaatgcaaggccttggctttgtcttgcagggatctgcctttgaggtcatagactgaacagcagggagagaggttagtggtggagtgtggggggagctgttctagctccagtttcttctgacacatttttcaggatcatggatctgatcctccgaagcacagcagagatatctaagccatatttgtgcacatgagcagactcttctagttttttagtaaccagggatgggcttttgcatggcactgactatagagatgtcttgtagagatcaagccagtcttttgcatcccacctgcccacctccagaagagatgggaaaaggtcatcaaagggcattcaccaactgaaatccactcatgaatgttaggtctctaaaaggaggcatcaacactcacaatggtagcctccaaacctagcatcccacctatctaagagctcaggggtggtccactggggcagatacaagggaagtgcaagggctcaggatgaaagaaaatctattgggaagagttttaggggcttgatcattatggggcttccttctatatctgagaactgctctgggtggtgagatgtggactctgatccttaattggaatgttcggagaatgagtgtctggtggccttgaagtgttggacagaaaagtatcagtataaaagcctggagctcagggtaattaatgtagttcatggttccttagtgagcaggactcttggatgtggaggagaaagggtcataggaagtaaaccaccaaaattacaaaattgagtctctgtacaattacttcagtgcctttgggcttatgaatacaaatcagtgggccttctctatgatggtccaacaaactctcagtgtccaccctgtccctgtatctcccatggaagatgaataatgtcaggtgttctttgggtcaaaggccccagggcagtctggaggcttagagggcagagtggtgtcattccatgtaaagttaggcttctgaggggtcaggcagaatatggtgtccatatcttccatagctctgcagattcttggatgaagtcaagcacagtttgctagacccaggtcactcctctgagtataactaggacccatgagtgaaacttaatagctgtaaggaagaacctgctgtctgccagagaggataagctgcccatctcagcagctgtctaaaagaaggcaggtgtctctttaaagggaagagaagcattggtgaaatggatttcaggtcacttccattccagatgggtgagatcttgtggagctgggatcatgtttgaactcattcatacctgtagagcacgaatccaagtagattgtgtttggtctgtacaggctgaagccccctgctctcccacccaagtgcccccactgagcaggccaacatgctgttgtggccacatatactgggctgatccaggctggttatcaccaaacagcaaaccatagggaacagctgctttgccatagacccaatacccatgtagatctctcatgagagcagccataactcagacccactgaccaacagggccatgagtgacagccagaaccagtgaaggtccaagtaggacacagagcagggcttttcttaccatacacattatctccagaggttatttctaccccactccctattcaaggcctgttggagcacactgcaaaagcaaaagcacagtaactcaatttacacatgattataatcatttccagtgcacacatttcatcaccaggtggatcctgagctagcccatgtaaatccgggttaacccatattggtaatcatactcaaaagcacttttcaccctacattctactagccaatcaaagacaaagagttgtggcctctaccattgccttggcttctggacaccctcacaagctatcccaaggttcccgctcaactccagggaggctgacatcttcacatccactgggcatataatattgcatgagaccaaagtctccacactctttgcagcctcctccatgaatcccaatggcctgcacttgtacagtttgggtgtttgatagataaagcacgtatgagaagagaaaacaaaataaatcaactttttaaaaaagccagcactgtgctgtcaatgttttttttttcttttcaattctagctcagaaaagcagaaggtaaataatgtcaggtcaatgaatatcagatatattttttgactgtacattacagtgaagtgtaatctttttacacctgcaagtccatcttatttattcttgtaaatgttccctgacaatgtttgtaatatggctgtgttaaaaaatctatacaataaagctgtgaccctgagattcatgttttcctaagataaaaaaaa

SEQ ID NO: 418395 - DNA, 8838 bp, Homo sapiens
ctggagcctctggcctcagtccaggcctcatcatcatcagaatatcactgatggatgtgtaatttacgaagcctgtgtcattcctttgtcagagccacaagcagcctgccgccttcgtggtcacccagcaccctctacccaacaccgtggcagacttctggaggctggtgttcgattacaactgctcctctgtggtgatgctgaatgagatggacactgcccagttctgtatgcagtactggcctgagaagacctccgggtgctatgggcccatccaggtggagttcgtctccgcagacatcgacgaggacatcatccacagaatattccgcatctgtaacatggcccggccacaggatggttatcgtatagtccagcacctccagtacattggctggcctgcctaccgggacacgcccccctccaagcgctctctgctcaaagtggtccgacgactggagaagtggcaggagcagtatgacgggagggagggacgtactgtggtccactgcctaaatgggggaggccgtagtggaaccttctgtgccatctgcagtgtgtgtgagatgatccagcagcaaaacatcattgacgtgttccacatcgtgaaaacactgcgtaacaacaaatccaacatggtggagaccctggaacagtataaatttgtatacgaggtggcactggaatatttaagctccttttagctcaatgggatggggaacctgccggagtccagaggctgctgtgaccaagcccccttttgtgtgaatggcagtaactgggctcaggagctctgaggtggcaccctgcctgactccaaggagaagactggtggccctgtgttccacggggggctctgcaccttctgaggggtctcctgttgccgtgggagatgctgctccaaaaggcccaggcttccttttcaacctaaccagccacagccaagggcccaagcagaagtacacccacaagcaaggccttggatttctggctcccagaccacctgcttttgttctgagtttgtggatctcttggcaagccaactgtgcaggtgctggggagtgggaggctcccctgccctccttctccttaggagtggaggagatgtgtgttctgctcctctacgtcatggaaaagattgaggctcttgggggtcactgctctgctgccccctgcaacctccttcaggggcctctggcaccagacatttgcagtctggaccagtgtgaccttacgatgttccctaggccacaagagaggccccccatcctcacacctaacctgcatggggcttcgcccacaaccattctgtaccccttccccagcctgggccttgaccgtccagcattcactggccggccagctgtgtccacagcagtttttgataaaggtgttctttgcttttttgtgtggtcagtgggagggggtggaactgcagggaacttctctgctcctccttgtctttgtaaaaagggaccacctccctggggcagggcttgggctgacctgtaggatgtaacccctgtgtttctttggtggtagctttctttggaagagacaaacaagataagatttgattattttccaaagtgtatgtgaaaagaaactttcttttggagggtgtaaaatcttagtctcttatgtcaaaaagaagggggcgggggagtttgagtatgtacctctaagacaaatctctcgggccttttattttttcctggcaatgtccttaaaagctcccaccctgggacagcatgccactgagcaaggagagatgggtgagcctgaagatggtccctttggtttctggggcaaatagagcaccagctttgtgcataatttggatgtccaaatttgaactccttcctaaagaaacccagcagccaccttgaaaaaggccattgtggagcccattatactttgatttaaaataggccaagagaatcaggcctggagatctagggtcttgtccaaagtgtgagtgagtcaatgagagggaaccaacatttgctaagtctctactgtatgccagggatcatgcttggcactttccataggacatttcacacagtccttagaacccccaggagagagctactgacttgttatcatctccatttgatcatctcctccaatgaggaaacccacgcaccttccttagtaatgaaatcctgggttccaaaggggcaggtaatggcaatgagacttctccgtgctgttttcttcatcttctctaagccaagcaattattttatggagggaaaataaggccagaaacttctgagcagataactccacaaatggaaatttagtactttcttcctgatgccagttcttctgggaagcgcagaatttcagatatattttagtaacacattcccagctccccaggaaagccagtctcatctaatttcttagtcagtaaaaacaattccctgttccttcaggctatgaatggaccagccagggaaactctcgaccttgatctctagccagtgcttaggcccaatatctgacagcctcaggtgggctgggacctaggaagctccatcttgaaggctggtctagccccagacagggcatgaggggcagagaattcaagaaggtacagctttggccctcaagagcccactgtatgctggggaaatggaaccatggtgcagtagtgtggagtggatgagtgttccatgagcctaggagcaagaaagtctcttcggcctcgggcttcctggagaaggggacgtccattcctgctgggtcttaacaagcataaaaaggaaaaaaaggaaactcaggcaaagggatccatatgtgcaatggcaaagaaatgtgaaaaggcattgggagaagcagtctgggggaggccagcccagtgcgggcacagcacaacacggggagcagcaagagatgagccagggtccaggagacagatgcccatcgcgagtacagactttgtcctattggcaacaaggagtccatggagctttagagagatgcactcagcttcgtgttggccaagactccttctgggccaatggggctgcctcttttcctttcatcagacactgtgaaaacattcccttaagcgtgcactttttaatatcacatctatttgtctgtctgctcattgttttgttgctggaactaaatatgcaatggatcatgagactcagattctatgagaaacccagggtctctgctttaccacggagcagggtcaccaacccagatctccaggcccatgaggatggaacatgaaaggagccgacaaaagttgcttccattggcatgggctctggagctgtccagaagtccagggacaccagacttgatcaaggaagggctgtcactttagaggttcaaaaggaagtgcctcaaagcaaaggcaagcaaaggaaccccacgatgaacttgctcttttcctttgatgagcctctccccaggtgtatttcagcagaccccggggacccacccccactgggcctgctggcctccctcggctccagcccaatgccccagctggccttccccagcctgcaaggagcctgtagcatggcaaatctgcctgctgtatgctattttcttagatcttggtacatccagacaggatgagggtggagggagagctatttaacacaaatcctaagatttttttctgctcaggaaggggtgaaatagctggcagatacaaaagacagtggcttttatcattttaaatggtaggaatttaaggtgtgacttcagggagaaacaaacttgcaaaaaaaaaaaatctcaggccatgttggggtaacccagcaagggccagtgatgatttcccccagctcatccccttattttcccacaacccaaccattctctaaagcaggacagtgaataggtcttaggccagtgcacacaggaagaaattgaggcttatggatggggatgacttccctaagatcccatgggacaaggatgtggcaaggcttggatgagatggggcaccagtgcccaggaatttgaacattttcctttacccaggaaatctccggagccaacaccaccacccccagggggtctccccaccccaccccatttacagggtgagctcagcctgtcatgagcagaggaaaatattattaatgctctctgagtctttacaacaggagctcttacctcatagatgtgggctctgtttggggaagatgcaaggaagtaatgagaagcccaggaaatttctccacctgtgtttatggcctaaatagcttcaggatgtatcttagctgcactccaacattgcatcctttctggggtgaagaatctgggccaaccaggggtccttgggcctctagaaggccacagtaggcctctctttgtgggaatggaaggggacagtttgcttttagtgctggccctctctgtgggtgtggcctgcaaaggaaccaacagaccctatgctggggactctaacatgtgagctcattaaattcttccagcattctaaaggagggtttgtgattgtcaccatttactgatgaggaaactaaggctcctaggggagaaatcacttgcccacagttccacagctagtgagtgaatgaaccaggatttaaaccggttttttctcactacagagacaatatttttccaccattgtatctcacatttttcccaggaggttacccataacagaagagactagagtggaacagatacgtcagtggataaagctcaaagcaaacaacagtaagcttaaaattccttcatagtctcatgttttacgttcacaattcatgcaaaatttgcattccactttctgatttagccttgttggttttaatatgactctatgaatatttcaaaaaaaaatgtgctctgttcctcatgttgttctgttctgttcaccccgctatgacggaccctaggtcagctggtcttcagcttgaccctagaattgactctaggagcagtgaccctgctgcctcccagagccagttataggctcaagatcaagaccaactgaccttctcctaggcagctcctttggtgtgtgggtgctctgacctcactgttcatgaggggacctcaactaaggcatcttccagttgggtgctggaaggaacccattaactcacactagaatgatgaggatttgctcatctggcgtggagaaggatgagcccacaaaaccctaaagggaaaagagaagctggacacagctgtactcagcagattcctgaatgctaggctggaaagtggtgcctgttgtccaagtggagtcacatggttgctaatgtgggcaagtctgaggacacacttcatgagcagctggggtctggaaggctcctcactttaccctagccacacataattactgggtgcctacagcacctagcaccttggagggggcactattaggaaatcgagattactatggcacaattaattcctgggtaaggcatggggttgtggtggacagagctcagtctttagtttgaacgaaaacatacatacatgaaaaacatacatgaaaaaaggaccctcatcaacattagaaggggtagatttggagcactttaggcaggaaaacaggaacgcaaggccaggaaactggaacccagtgaatactcagaaccgaggatgcagatgacttatttagcaaaatggtcacttctgtgacatagctggagaaaggatgggtaacagcttgccagagccacttggaacaagggcaaatctcagtgtctggggcaaaagatgatgcatttccctctgacccatcatgtttattcatcctccactccccattgccacactagctcttgctgtaagtcctcaccaggatctacatttcctcgtcgctggtgggaaccccttagagtacatagaggtatcagtccagtaagactgctctacacaacagaagtgaggcccagggagtagcagccaggcccttatcctgttacctctgcaggagtgactgcccaacccagatccagagacattgaaggaaatgataattccttggtacctcactgccttgggacaaaatgaagaaagccacccttccttaggctgcagcttgccactcctgggctgggtaaacaggtcatcagcaccaggctcaaccaggagtaacattctggaagacatgggtgagcccaagaggaagcatgaacaggacgctgttcctaagtcatgtcaacaggttgtgctgggccaggatccccagggaaaaaaatggtcaacccaactggagggtaggttagaagaaaaaaaacataaacgtggatagtcatgtcatctcaaatccctgacttggcttccccattacttgacagtctgagctccttcttagcctgtgaccagcttcaaatcacagccaagtaaaacaaggaaataggaaaagtaaatccaactagaagagacaagctgagattcagatttgtttactcctcccatgcaaagtttccctgttggaggttttccatgtatacatgtctagaagtgatagaatgcaaggccttggctttgtcttgcagggatctgcctttgaggtcatagactgaacagcagggagagaggttagtggtggagtgtggggggagctgttctagctccagtttcttctgacacatttttcaggatcatggatctgatcctccgaagcacagcagagatatctaagccatatttgtgcacatgagcagactcttctagttttttagtaaccagggatgggcttttgcatggcactgactatagagatgtcttgtagagatcaagccagtcttttgcatcccacctgcccacctccagaagagatgggaaaaggtcatcaaagggcattcaccaactgaaatccactcatgaatgttaggtctctaaaaggaggcatcaacactcacaatggtagcctccaaacctagcatcccacctatctaagagctcaggggtggtccactggggcagatacaagggaagtgcaagggctcaggatgaaagaaaatctattgggaagagttttaggggcttgatcattatggggcttccttctatatctgagaactgctctgggtggtgagatgtggactctgatccttaattggaatgttcggagaatgagtgtctggtggccttgaagtgttggacagaaaagtatcagtataaaagcctggagctcagggtaattaatgtagttcatggttccttagtgagcaggactcttggatgtggaggagaaagggtcataggaagtaaaccaccaaaattacaaaattgagtctctgtacaattacttcagtgcctttgggcttatgaatacaaatcagtgggccttctctatgatggtccaacaaactctcagtgtccaccctgtccctgtatctcccatggaagatgaataatgtcaggtgttctttgggtcaaaggccccagggcagtctggaggcttagagggcagagtggtgtcattccatgtaaagttaggcttctgaggggtcaggcagaatatggtgtccatatcttccatagctctgcagattcttggatgaagtcaagcacagtttgctagacccaggtcactcctctgagtataactaggacccatgagtgaaacttaatagctgtaaggaagaacctgctgtctgccagagaggataagctgcccatctcagcagctgtctaaaagaaggcaggtgtctctttaaagggaagagaagcattggtgaaatggatttcaggtcacttccattccagatgggtgagatcttgtggagctgggatcatgtttgaactcattcatacctgtagagcacgaatccaagtagattgtgtttggtctgtacaggctgaagccccctgctctcccacccaagtgcccccactgagcaggccaacatgctgttgtggccacatatactgggctgatccaggctggttatcaccaaacagcaaaccatagggaacagctgctttgccatagacccaatacccatgtagatctctcatgagagcagccataactcagacccactgaccaacagggccatgagtgacagccagaaccagtgaaggtccaagtaggacacagagcagggcttttcttaccatacacattatctccagaggttatttctaccccactccctattcaaggcctgttggagcacactgcaaaagcaaaagcacagtaactcaatttacacatgattataatcatttccagtgcacacatttcatcaccaggtggatcctgagctagcccatgtaaatccgggttaacccatattggtaatcatactcaaaagcacttttcaccctacattctactagccaatcaaagacaaagagttgtggcctctaccattgccttggcttctggacaccctcacaagctatcccaaggttcccgctcaactccagggaggctgacatcttcacatccactgggcatataatattgcatgagaccaaagtctccacactctttgcagcctcctccatgaatcccaatggcctgcacttgtacagtttgggtgtttgatagataaagcacgtatgagaagagaaaacaaaataaatcaactttttaaaaaagccagcactgtgctgtcaatgttttttttttcttttcaattctagctcagaaaagcagaaggtaaataatgtcaggtcaatgaatatcagatatattttttgactgtacattacagtgaagtgtaatctttttacacctgcaagtccatcttatttattcttgtaaatgttccctgacaatgtttgtaatatggctgtgttaaaaaatctatacaataaagctgtgaccctgagattcatgttttcctaagataaaaaaaa

SEQ ID NO: 418396 - DNA, 6515 bp, Homo sapiens
cctcccgcctcagttcgcgccgcgcctcggcttggaacgcaggagcgccggctccgggagcccgagcggagccagccgcgcgcacagccagcggccgcgccggcgatgcggggccaccccgcgcccgccccagtcccggccccggcccccgcgggaaggggctgagctgcccgccgccgcccggatggcgagcctcgccgcgctcgccctcagcctgctcctgaggctgcagctgccgccactgcccggcgcccgggctcagagcgccccaggtggctgttcctttgatgagcactacagcaactgtggttatagtgtggctctagggaccaatgggttcacctgggagcagattaacacaacggagaaaccaatgctggaccaggcagtgcccacaggatctttcatgatggtgaacagctctgggagagcctctggccagaaggcccaccttctcctgccaaccctgaaggagaatgacacccactgcatcgacttccattactacttctccagccgtgacaggtccagcccaggggccttgaacgtctacgtgaaggtgaatggtggcccccaagggaaccctgtgtggaatgtgtccggggtcgtcactgagggctgggtgaaggcagagctcgccatcagcactttctggccacatttctatcaggtgatatttgaatccgtctcattgaagggtcatcctggctacatcgccgtggacgaggtccgggtccttgctcatccatgcagaaaagcacctcattttctgcgactccaaaacgtggaggtgaatgtggggcagaatgccacatttcagtgcattgctggtgggaagtggtctcagcatgacaagctttggctccagcaatggaatggcagggacacggccctgatggtcacccgtgtggtcaaccacaggcgcttctcagccacagtcagtgtggcagacactgcccagcggagcgtcagcaagtaccgctgtgtgatccgctctgatggtgggtctggtgtgtccaactacgcggagctgatcgtgaaagagcctcccacgcccattgctcccccagagctgctggctgtgggggccacatacctgtggatcaagccaaatgccaactccatcatcggggatggccccatcatcctgaaggaagtggaatatcgcaccaccacaggcacgtgggcagagacccacatagtcgactctcccaactataagctgtggcatctggaccccgatgttgagtatgagatccgagtgctcctcacacgaccaggtgaggggggtacgggaccgccaggggctcccctcaccaccaggaccaagtgtgcagatccggtacatggcccacagaacgtggaaatcgtagacatcagagcccggcagctgaccctgcagtgggagcccttcggctacgcggtgacccgctgccatagctacaacctcaccgtgcagtaccagtatgtgttcaaccagcagcagtacgaggccgaggaggtcatccagacctcctcccactacaccctgcgaggcctgcgccccttcatgaccatccggctgcgactcttgctgtctaaccccgagggccgaatggagagcgaggagctggtggtgcagactgaggaagacgttccaggagctgttcctctagaatccatccaaggggggccctttgaggagaagatctacatccagtggaaacctcccaatgagaccaatggggtcatcacgctctacgagatcaactacaaggctgtcggctcgctggacccaagtgctgacctctcgagccagagggggaaagtgttcaagctccggaatgaaacccaccacctctttgtgggtctgtacccagggaccacctattccttcaccatcaaggccagcacagcaaagggctttgggccccctgtcaccactcggattgccaccaaaatttcagctccatccatgcctgagtacgacacagacaccccattgaatgagacagacacgaccatcacagtgatgctgaaacccgctcagtcccggggagctcctgtcagtgtttatcagctggttgtcaaggaggagcgacttcagaagtcacggagggcagctgacattattgagtgcttttcggtgcccgtgagctatcggaatgcctccagcctcgattctctacactactttgctgctgagttgaagcctgccaacctgcctgtcacccagccatttacagtgggtgacaataagacatacaatggctactggaaccctcctctctctcccctgaaaagctacagcatctacttccaggcactcagcaaagccaatggagagaccaaaatcaactgtgttcgtctggctacaaaagcaccaatgggcagcgcccaggtgaccccggggactccactctgcctcctcaccacaggtgcctccacccagaattctaacactgtggagccagagaagcaggtggacaacaccgtgaagatggctggcgtgatcgctggcctcctcatgttcatcatcattctcctgggcgtgatgctcaccatcaaaaggagaagaaatgcttattcctactcctattacttgtcccaaaggaagctggccaagaagcagaaggagacccagagtggagcccagagggagatggggcctgtggcctctgccgacaaacccaccaccaagctcagcgccagccgcaatgatgaaggcttctcttctagttctcaggacgtcaacggattcacagatggcagccgcggggagctttcccagcccaccctcacgatccagactcatccctaccgcacctgtgaccctgtggagatgagctacccccgggaccagttccaactcgccatccgggtggctgacttgctgcagcacatcacgcagatgaagagaggccagggctacgggttcaaggaggaatacgaggccttaccagaggggcagacagcttcgtgggacacagccaaggaggatgaaaaccgcaataagaatcgatatgggaacatcatatcctacgaccattcccgggtgaggctgctggtgctggatggagacccgcactctgactacatcaatgccaactacattgacggataccatcgacctcggcactacattgcgactcaaggtccgatgcaggagactgtaaaggacttttggagaatgatctggcaggagaactccgccagcatcgtcatggtcacaaacctggtggaagtgggcagggtgaaatgtgtgcgatactggccagatgacacggaggtctacggagacattaaagtcaccctgattgaaacagagcccctggcagaatacgtcatacgcaccttcacagtccagaagaaaggctaccatgagatccgggagctccgcctcttccacttcaccagctggcctgaccacggcgttccctgctatgccactggccttctgggcttcgtccgccaggtcaagttcctcaaccccccggaagctgggcccatagtggtccactgcagtgctggggctgggcggactggctgcttcattgccattgacaccatgcttgacatggccgagaatgaaggggtggtggacatcttcaactgcgtgcgtgagctccgggcccaaagggtcaacctggtacagacagaggagcaatatgtgtttgtgcacgatgccatcctggaagcgtgcctctgtggcaacactgccatccctgtgtgtgagttccgttctctctactacaatatcagcaggctggacccccagacaaactccagccaaatcaaagatgaatttcagaccctcaacattgtgacaccccgtgtgcggcccgaggactgcagcattgggctcctgccccggaaccatgataagaatcgaagtatggacgtgctgcctctggaccgctgcctgcccttccttatctcagtggacggagaatccagcaattacatcaacgcagcactgatggatagccacaagcagcctgccgccttcgtggtcacccagcaccctctacccaacaccgtggcagacttctggaggctggtgttcgattacaactgctcctctgtggtgatgctgaatgagatggacactgcccagttctgtatgcagtactggcctgagaagacctccgggtgctatgggcccatccaggtggagttcgtctccgcagacatcgacgaggacatcatccacagaatattccgcatctgtaacatggcccggccacaggatggttatcgtatagtccagcacctccagtacattggctggcctgcctaccgggacacgcccccctccaagcgctctctgctcaaagtggtccgacgactggagaagtggcaggagcagtatgacgggagggagggacgtactgtggtccactgcctaaatgggggaggccgtagtggaaccttctgtgccatctgcagtgtgtgtgagatgatccagcagcaaaacatcattgacgtgttccacatcgtgaaaacactgcgtaacaacaaatccaacatggtggagaccctggaacagtataaatttgtatacgaggtggcactggaatatttaagctccttttagctcaatgggatggggaacctgccggagtccagaggctgctgtgaccaagcccccttttgtgtgaatggcagtaactgggctcaggagctctgaggtggcaccctgcctgactccaaggagaagactggtggccctgtgttccacggggggctctgcaccttctgaggggtctcctgttgccgtgggagatgctgctccaaaaggcccaggcttccttttcaacctaaccagccacagccaagggcccaagcagaagtacacccacaagcaaggccttggatttctggctcccagaccacctgcttttgttctgagtttgtggatctcttggcaagccaactgtgcaggtgctggggagtgggaggctcccctgccctccttctccttaggagtggaggagatgtgtgttctgctcctctacgtcatggaaaagattgaggctcttgggggtcactgctctgctgccccctgcaacctccttcaggggcctctggcaccagacatttgcagtctggaccagtgtgaccttacgatgttccctaggccacaagagaggccccccatcctcacacctaacctgcatggggcttcgcccacaaccattctgtaccccttccccagcctgggccttgaccgtccagcattcactggccggccagctgtgtccacagcagtttttgataaaggtgttctttgcttttttgtgtggtcagtgggagggggtggaactgcagggaacttctctgctcctccttgtctttgtaaaaagggaccacctccctggggcagggcttgggctgacctgtaggatgtaacccctgtgtttctttggtggtagctttctttggaagagacaaacaagataagatttgattattttccaaagtgtatgtgaaaagaaactttcttttggagggtgtaaaatcttagtctcttatgtcaaaaagaagggggcgggggagtttgagtatgtacctctaagacaaatctctcgggccttttattttttcctggcaatgtccttaaaagctcccaccctgggacagcatgccactgagcaaggagagatgggtgagcctgaagatggtccctttggtttctggggcaaatagagcaccagctttgtgcataatttggatgtccaaatttgaactccttcctaaagaaacccagcagccaccttgaaaaaggccattgtggagcccattatactttgatttaaaataggccaagagaatcaggcctggagatctagggtcttgtccaaagtgtgagtgagtcaatgagagggaaccaacatttgctaagtctctactgtatgccagggatcatgcttggcactttccataggacatttcacacagtccttagaacccccaggagagagctactgacttgttatcatctccatttgatcatctcctccaatgaggaaacccacgcaccttccttagtaatgaaatcctgggttccaaaggggcaggtaatggcaatgagacttctccgtgctgttttcttcatcttctctaagccaagcaattattttatggagggaaaataaggccagaaacttctgagcagataactccacaaatggaaatttagtactttcttcctgatgccagttcttctgggaagcgcagaatttcagatatattttagtaacacattcccagctccccaggaaagccagtctcatctaatttcttagtcagtaaaaacaattccctgttccttcaggctatgaatggaccagccagggaaactctcgaccttgatctctagccagtgcttaggcccaatatctgaagtgattgttccccgagcggggaaccatcacttttgctaggcacctagccaaagtgaaccaataggattacatgaagtgaaaaagcttatgtacagccaaggaaaccacaccaagtgattgttccccgct

SEQ ID NO: 418397 - DNA, 775 bp, Homo sapiens
aagaattcacagaaagcaagccgcgcacggtggctcacgcctgtcctcccaaagtgctaggattatagccaccgcacctcgtcttgaaatagccttttaaatgttcacctcagcttgcctcacagtggtaaaaataagcatttttttgttttgtaggatcagggagcttccaaggcatttgatacctttttgatgggaagaagggctctgaggagctccaagataccccaacctccaggcccttcattagggggtagttgggtttctgtttggcctttccccctgggccccataggcttaaactacccccacccccacctccgcctcctacctcagctgggagcactgtcttccatggggcttccacttctctcctcaacctggggaagaccacagggcagtgcctgcctcaggacctgccttccccaaaagctggcttcttgctccaaggagagagcattgacccacctgccagagtcttgccttttgcccaaaggagcctggtcttcagggctgcataggatgcaagtgccttctctgcttctcaccgtgggtggcactaatttcctccttaaccagaactttgttccagccactgacccattctaactcttccccctctgactctcctgcgcagggtctgttcctggtttcccagatgcataaaggaagacatatccctcccctgggcagcaaggctacaatgggagggagggagaacatgggagcatgtgaataaaatggcattaaatactgaaccagggagtccagcctc

SEQ ID NO: 418398 - DNA, 979 bp, Homo sapiens
cgcgcgcacacacacaaacacaaacacacaccccaacacacacgccctgtcccctttctccaccctgcaagctagttgcatttagctcacagagcctgggctgcgacttgaaagagtttaggcagcaacagagtgaccctgggggtgctcttgaccgacagccgcacccccggcgtctaggacctccgagcagggatgcatctggaggtctagggaagcacttccaccccctcctctcctcaatcctggcaggatggctactgctgcttcaagacagtgacgtttctctccggtcagctgtcaggagcgctggtgagcttcctactgtgccacaaggtgcgggtgctggagacacagctgagcctggaaatgagagtgggcatcgccgtggtcatcatgactcctctgcggcgtggtcaccatgttggttcactgtgttgggctcttattgacgggtctcctgctaggcctgaccttgggtgccggagccctgctggcttctgagcctatctaccaaccaccttcagcctgggtgccagctggggggctggtggggctggcgctgctgggagccctgctcacacttcggtggccacgtccattcacagttctgggcacaaccctgctgggttctgcagtgcttgtggcctgtgttgactacttcctggaggggctggcactggggagttggctgggccaacgcctgcagacacttccagccttgccttctctctgctgatatagctgggtcttactggggatctggccagccttgggggcccttggagccctggcccagtggaagctcgtgcctgaggaacatggaggccacgctaatgagggtctgttcctggtttcccagatgcataaaggaagacatatccctcccctgggcagcaaggctacaatgggagggagggagaacatgggagcatgtgaataaaatggcattaaatactgaaccagggagtccagcctc

SEQ ID NO: 418399 - DNA, 553 bp, Homo sapiens
cgcttgtccagggtccccagacttccaagcagattgaggagaggagctccgagagtcaaccctccagcctgtaaggaccttgatatccaaaggacagctgaagaaagtaatgtgcctgcatttttgccacttcattcccacagtgcccgaaatgccagctcctccttggtgttctcctttcaggatttgaattcaaatcccattggcagccctgataccgctgggggaagggtgaggctactgctgcttcaagacagtgacgtttctctccggtcagctgtcaggagcgctggtgagcttcctactgtgccacaaggatcagggagcttccaaggcatttgatacctttttgatgggaagaagggctctgaggagctccaagataccccaacctccaggcccttcattaggggagggtctgttcctggtttcccagatgcataaaggaagacatatccctcccctgggcagcaaggctacaatgggagggagggagaacatgggagcatgtgaataaaatggcattaaatactgaaccagggagtccagcctc

SEQ ID NO: 418400 - DNA, 3841 bp, Homo sapiens
cgcttgtccagggtccccagacttccaagcagattgaggagaggagctccgagagtcaaccctccagcctgtaaggaccttgatatccaaaggacagctgaagaaagtaatgtgcctgcatttttgccacttcattcccacagtgcccgaaatgccagctcctccttggtgttctcctttcaggatttgaattcaaatcccattggcagccctgataccgctgggggaagggtgaggtaggaaaagtcccaccaatatcctaaggggaggtgcgagtggctaccaggatgtgagatgtctgtgggcaaagtccctgcttattccatgaggggctgtgggattaggactgtggctggatgcctcttcctccaacaactccatctcaggatgaagctgaggctttaaaaccctgacaaactgtgggtgactgtctctacttaattcctcctcccaaactcttggtgtctggttttttccctctttctgccctgggcctggagcagctgtccagagacccccaccatgactcatactctcctgttctccctccctctcccctctctattaacctcacccttcccaatccagtggggtagtattaagtcccagtcgcagatggggcaataatgtcccagcacccctccctccacacacccagggcttcctgttctttccaccctcaccctgaagagctgcagggtggtggggggaggcaaaggctcattactttataagattttcattactttataagatttcattttacattttacttaagtgtacttgtttcagagagtggtaaagacagatcctgctcctctcaatccaatcctgtagatttcttcagttacctcaacagggtcatactggctcctgaaatgggcaccattatttaaaagaaatagaggtacagagtcctcaagatttatgggcacctgagtttctgccccgtgccccgctgcaggtttcccaatcccctaaagacattcatggatgggtgagaggagctgacacctcccgctctgtgaccactttctctttggccatggaggaagtcttgctgcccctggctgtgacatctgaccccaggccctttaatcaacaactcccagagcctccagacccaagatgtgttttggaaccccaggacaatcctgaactggcacttgccctggtgtgtgccctttgctgctgctttggaatcatctactgctgcttcagtgagggcagggccaaggacctggggggccattgcccaagactgtcatcctcaaggatgatgccagctttcctccttgctcctgggccatctcacctcctctgccaggggttcctacctctagtgtggcccatgttgctctggctgtattcctaggcccatgttgctcttgccagcttcttgtccatcctccatgcccatgccttccagctttcacctctggcatctatcatttgctcttctcttaactcctacctgaaaaccccattcctaaattattcactatatttcagacttcttcactcttctccaaaaacctgaatcagcttgtgctgattttttcctatctgctatccctaaaaggactagaccttctttctatccttactcccctcaatgtatccatcttacctcttgattttccctcccattccctcacagttcctgaaacagtgcccccccccgaccctaagcgacccctttctgcccctggccttgaggtcccttgacgtgctgctcctgtcttctgctcctctagtgagccattcctctcccttggaattcatcagagtcatccctgtagagcccccttcctgcctctcaattcctcctgcctcacttcccaggctactgctgcttcaagacagtgacgtttctctccggtcagctgtcaggagcgctggtgagcttcctactgtgccacaaggtgcgggtgctggagacacagctgagcctggaaatgagagtgggcatcgccgtggtcatcatgactcctctgcggcgtggtcaccatgttggttcactgtgttgggctcttattgacgggtctcctgctaggcctgaccttgggtgccggagccctgctggcttctgagcctatctaccaaccaccttcagcctgggtgccagctggggggctggtggggctggcgctgctgggagccctgctcacacttcggtggccacgtccattcacagttctgggcacaaccctgctgggttctgcagtgcttgtggcctgtgttgactacttcctggaggggctggcactggggagttggctgggccaacgcctgcagacacttccagccttgccttctctctgctgatatagctgggtcttactggggatctggccagccttgggggcccttggagccctggcccagtggaagctcgtgcctgaggaacatggaggccacgctaatgagttacttccagagtcttcaagagtgccaactgggaccaggaccccagaccacagccccccacaccgtcctggacctggattctgactgtggttccactgtacccctcaccttaatctctggttctaaccagacctgagcctagacttccactttttcccttacccctgtgagggcctgggaacactaggtgggcagggtttgagcccacaggacctgcacacaaacttccccacctcttggacttggggacaggatctgtgcctcaacccagaccagctttgtagggatatgttccaagaacagagaagagtcttatggggaagggggaggaagggaagtatgaatatttacctctgaccaataatagaggtgccctggtccccaaagaaattgactcccgaattccctccaagccttacccatatagcttttgtttgtttgtttgttttcagacaaggtcttgttctgtccagtgccgtggcgtgaccacagctcatgacaactttgatttccccggcccaagcgagcctctcattcagcctcctgagtggctgggaccacagacgccacacacagctaatttttatgtattcgtttttatttttttgcagagacagggtctccctatgttgcccaagctggtcttgaactcctgggctcaagtgatcctcctgcttcagcctcccaaagtgctaggattatagccaccgcacctcgtcttgaaatagccttttaaatgttcacctcagcttgcctcacagtggtaaaaataagcatttttttgttttgtaggatcagggagcttccaaggcatttgatacctttttgatgggaagaagggctctgaggagctccaagataccccaacctccaggcccttcattagggggtagttgggtttctgtttggcctttccccctgggccccataggcttaaactacccccacccccacctccgcctcctacctcagctgggagcactgtcttccatggggcttccacttctctcctcaacctggggaagaccacagggcagtgcctgcctcaggacctgccttccccaaaagctggcttcttgctccaaggagagagcattgacccacctgccagagtcttgccttttgcccaaaggagcctggtcttcagggctgcataggatgcaagtgccttctctgcttctcaccgtgggtggcactaatttcctccttaaccagaactttgttccagccactgacccattctaactcttccccctctgactctcctgcgcagggtctgttcctggtttcccagatgcataaaggaagacatatccctcccctgggcagcaaggctacaatgggagggagggagaacatgggagcatgtgaataaaatggcattaaatactgaaccagggagtccagcctc

SEQ ID NO: 418401 - DNA, 3433 bp, Homo sapiens
cgcttgtccagggtccccagacttccaagcagattgaggagaggagctccgagagtcaaccctccagcctgtaaggaccttgatatccaaaggacagctgaagaaagtaatgtgcctgcatttttgccacttcattcccacagtgcccgaaatgccagctcctccttggtgttctcctttcaggatttgaattcaaatcccattggcagccctgataccgctgggggaagggtgaggtaggaaaagtcccaccaatatcctaaggggaggtgcgagtggctaccaggatgtgagatgtctgtgggcaaagtccctgcttattccatgaggggctgtgggattaggactgtggctggatgcctcttcctccaacaactccatctcaggatgaagctgaggctttaaaaccctgacaaactgtgggtgactgtctctacttaattcctcctcccaaactcttggtgtctggttttttccctctttctgccctgggcctggagcagctgtccagagacccccaccatgactcatactctcctgttctccctccctctcccctctctattaacctcacccttcccaatccagtggggtagtattaagtcccagtcgcagatggggcaataatgtcccagcacccctccctccacacacccagggcttcctgttctttccaccctcaccctgaagagctgcagggtggtggggggaggcaaaggctcattactttataagattttcattactttataagatttcattttacattttacttaagtgtacttgtttcagagagtggtaaagacagatcctgctcctctcaatccaatcctgtagatttcttcagttacctcaacagggtcatactggctcctgaaatgggcaccattatttaaaagaaatagaggtacagagtcctcaagatttatgggcacctgagtttctgccccgtgccccgctgcaggtttcccaatcccctaaagacattcatggatgggtgagaggagctgacacctcccgctctgtgaccactttctctttggccatggaggaagtcttgctgcccctggctgtgacatctgaccccaggccctttaatcaacaactcccagagcctccagacccaagatgtgttttggaaccccaggacaatcctgaactggcacttgccctggtgtgtgccctttgctgctgctttggaatcatctactgctgcttcagtgagggcagggccaaggacctggggggccattgcccaagactgtcatcctcaaggatgatgccagctttcctccttgctcctgggccatctcacctcctctgccaggggttcctacctctagtgtggcccatgttgctctggctgtattcctaggcccatgttgctcttgccagcttcttgtccatcctccatgcccatgccttccagctttcacctctggcatctatcatttgctcttctcttaactcctacctgaaaaccccattcctaaattattcactatatttcagacttcttcactcttctccaaaaacctgaatcagcttgtgctgattttttcctatctgctatccctaaaaggactagaccttctttctatccttactcccctcaatgtatccatcttacctcttgattttccctcccattccctcacagttcctgaaacagtgcccccccccgaccctaagcgacccctttctgcccctggccttgaggtcccttgacgtgctgctcctgtcttctgctcctctagtgagccattcctctcccttggaattcatcagagtcatccctgtagagcccccttcctgcctctcaattcctcctgcctcacttcccaggctactgctgcttcaagacagtgacgtttctctccggtcagctgtcaggagcgctggtgagcttcctactgtgccacaagctgggtcttactggggatctggccagccttgggggcccttggagccctggcccagtggaagctcgtgcctgaggaacatggaggccacgctaatgagttacttccagagtcttcaagagtgccaactgggaccaggaccccagaccacagccccccacaccgtcctggacctggattctgactgtggttccactgtacccctcaccttaatctctggttctaaccagacctgagcctagacttccactttttcccttacccctgtgagggcctgggaacactaggtgggcagggtttgagcccacaggacctgcacacaaacttccccacctcttggacttggggacaggatctgtgcctcaacccagaccagctttgtagggatatgttccaagaacagagaagagtcttatggggaagggggaggaagggaagtatgaatatttacctctgaccaataatagaggtgccctggtccccaaagaaattgactcccgaattccctccaagccttacccatatagcttttgtttgtttgtttgttttcagacaaggtcttgttctgtccagtgccgtggcgtgaccacagctcatgacaactttgatttccccggcccaagcgagcctctcattcagcctcctgagtggctgggaccacagacgccacacacagctaatttttatgtattcgtttttatttttttgcagagacagggtctccctatgttgcccaagctggtcttgaactcctgggctcaagtgatcctcctgcttcagcctcccaaagtgctaggattatagccaccgcacctcgtcttgaaatagccttttaaatgttcacctcagcttgcctcacagtggtaaaaataagcatttttttgttttgtaggatcagggagcttccaaggcatttgatacctttttgatgggaagaagggctctgaggagctccaagataccccaacctccaggcccttcattagggggtagttgggtttctgtttggcctttccccctgggccccataggcttaaactacccccacccccacctccgcctcctacctcagctgggagcactgtcttccatggggcttccacttctctcctcaacctggggaagaccacagggcagtgcctgcctcaggacctgccttccccaaaagctggcttcttgctccaaggagagagcattgacccacctgccagagtcttgccttttgcccaaaggagcctggtcttcagggctgcataggatgcaagtgccttctctgcttctcaccgtgggtggcactaatttcctccttaaccagaactttgttccagccactgacccattctaactcttccccctctgactctcctgcgcagggtctgttcctggtttcccagatgcataaaggaagacatatccctcccctgggcagcaaggctacaatgggagggagggagaacatgggagcatgtgaataaaatggcattaaatactgaaccagggagtccagcctc

SEQ ID NO: 418402 - DNA, 2252 bp, Homo sapiens
cgcgcgcacacacacaaacacaaacacacaccccaacacacacgccctgtcccctttctccaccctgcaagctagttgcatttagctcacagagcctgggctgcgacttgaaagagtttaggcagcaacagagtgaccctgggggtgctcttgaccgacagccgcacccccggcgtctaggacctccgagcagggatgcatctggaggtctagggaagcacttccaccccctcctctcctcaatcctggcaggatggctactgctgcttcaagacagtgacgtttctctccggtcagctgtcaggagcgctggtgagcttcctactgtgccacaaggtgcgggtgctggagacacagctgagcctggaaatgagagtgggcatcgccgtggtcatcatgactcctctgcggcgtggtcaccatgttggttcactgtgttgggctcttattgacgggtctcctgctaggcctgaccttgggtgccggagccctgctggcttctgagcctatctaccaaccaccttcagcctgggtgccagctggggggctggtggggctggcgctgctgggagccctgctcacacttcggtggccacgtccattcacagttctgggcacaaccctgctgggttctgcagtgcttgtggcctgtgttgactacttcctggaggggctggcactggggagttggctgggccaacgcctgcagacacttccagccttgccttctctctgctgatatagctgggtcttactggggatctggccagccttgggggcccttggagccctggcccagtggaagctcgtgcctgaggaacatggaggccacgctaatgagttacttccagagtcttcaagagtgccaactgggaccaggaccccagaccacagccccccacaccgtcctggacctggattctgactgtggttccactgtacccctcaccttaatctctggttctaaccagacctgagcctagacttccactttttcccttacccctgtgagggcctgggaacactaggtgggcagggtttgagcccacaggacctgcacacaaacttccccacctcttggacttggggacaggatctgtgcctcaacccagaccagctttgtagggatatgttccaagaacagagaagagtcttatggggaagggggaggaagggaagtatgaatatttacctctgaccaataatagaggtgccctggtccccaaagaaattgactcccgaattccctccaagccttacccatatagcttttgtttgtttgtttgttttcagacaaggtcttgttctgtccagtgccgtggcgtgaccacagctcatgacaactttgatttccccggcccaagcgagcctctcattcagcctcctgagtggctgggaccacagacgccacacacagctaatttttatgtattcgtttttatttttttgcagagacagggtctccctatgttgcccaagctggtcttgaactcctgggctcaagtgatcctcctgcttcagcctcccaaagtgctaggattatagccaccgcacctcgtcttgaaatagccttttaaatgttcacctcagcttgcctcacagtggtaaaaataagcatttttttgttttgtaggatcagggagcttccaaggcatttgatacctttttgatgggaagaagggctctgaggagctccaagataccccaacctccaggcccttcattagggggtagttgggtttctgtttggcctttccccctgggccccataggcttaaactacccccacccccacctccgcctcctacctcagctgggagcactgtcttccatggggcttccacttctctcctcaacctggggaagaccacagggcagtgcctgcctcaggacctgccttccccaaaagctggcttcttgctccaaggagagagcattgacccacctgccagagtcttgccttttgcccaaaggagcctggtcttcagggctgcataggatgcaagtgccttctctgcttctcaccgtgggtggcactaatttcctccttaaccagaactttgttccagccactgacccattctaactcttccccctctgactctcctgcgcagggtctgttcctggtttcccagatgcataaaggaagacatatccctcccctgggcagcaaggctacaatgggagggagggagaacatgggagcatgtgaataaaatggcattaaatactgaaccagggagtccagcctc

SEQ ID NO: 418403 - DNA, 1937 bp, Homo sapiens
cgcgcgcacacacacaaacacaaacacacaccccaacacacacgccctgtcccctttctccaccctgcaagctagttgcatttagctcacagagcctgggctgcgacttgaaagagtttaggcagcaacagagtgaccctgggggtgctcttgaccgacagccgcacccccggcgtctaggacctccgagcagggatgcatctggaggtctagggaagcacttccaccccctcctctcctcaatcctggcaggatgtgcccgaaatgccagctcctccttggtgttctcctttcaggatttgaattcaaatcccattggcagccctgataccgctgggggaagggtgaggctactgctgcttcaagacagtgacgtttctctccggtcagctgtcaggagcgctggtgagcttcctactgtgccacaagctgggtcttactggggatctggccagccttgggggcccttggagccctggcccagtggaagctcgtgcctgaggaacatggaggccacgctaatgagttacttccagagtcttcaagagtgccaactgggaccaggaccccagaccacagccccccacaccgtcctggacctggattctgactgtggttccactgtacccctcaccttaatctctggttctaaccagacctgagcctagacttccactttttcccttacccctgtgagggcctgggaacactaggtgggcagggtttgagcccacaggacctgcacacaaacttccccacctcttggacttggggacaggatctgtgcctcaacccagaccagctttgtagggatatgttccaagaacagagaagagtcttatggggaagggggaggaagggaagtatgaatatttacctctgaccaataatagaggtgccctggtccccaaagaaattgactcccgaattccctccaagccttacccatatagcttttgtttgtttgtttgttttcagacaaggtcttgttctgtccagtgccgtggcgtgaccacagctcatgacaactttgatttccccggcccaagcgagcctctcattcagcctcctgagtggctgggaccacagacgccacacacagctaatttttatgtattcgtttttatttttttgcagagacagggtctccctatgttgcccaagctggtcttgaactcctgggctcaagtgatcctcctgcttcagcctcccaaagtgctaggattatagccaccgcacctcgtcttgaaatagccttttaaatgttcacctcagcttgcctcacagtggtaaaaataagcatttttttgttttgtaggatcagggagcttccaaggcatttgatacctttttgatgggaagaagggctctgaggagctccaagataccccaacctccaggcccttcattagggggtagttgggtttctgtttggcctttccccctgggccccataggcttaaactacccccacccccacctccgcctcctacctcagctgggagcactgtcttccatggggcttccacttctctcctcaacctggggaagaccacagggcagtgcctgcctcaggacctgccttccccaaaagctggcttcttgctccaaggagagagcattgacccacctgccagagtcttgccttttgcccaaaggagcctggtcttcagggctgcataggatgcaagtgccttctctgcttctcaccgtgggtggcactaatttcctccttaaccagaactttgttccagccactgacccattctaactcttccccctctgactctcctgcgcagggtctgttcctggtttcccagatgcataaaggaagacatatccctcccctgggcagcaaggctacaatgggagggagggagaacatgggagcatgtgaataaaatggcattaaatactgaaccagggagtccagcctc

SEQ ID NO: 418404 - DNA, 2345 bp, Homo sapiens
cgcgcgcacacacacaaacacaaacacacaccccaacacacacgccctgtcccctttctccaccctgcaagctagttgcatttagctcacagagcctgggctgcgacttgaaagagtttaggcagcaacagagtgaccctgggggtgctcttgaccgacagccgcacccccggcgtctaggacctccgagcagggatgcatctggaggtctagggaagcacttccaccccctcctctcctcaatcctggcaggatgtgcccgaaatgccagctcctccttggtgttctcctttcaggatttgaattcaaatcccattggcagccctgataccgctgggggaagggtgaggctactgctgcttcaagacagtgacgtttctctccggtcagctgtcaggagcgctggtgagcttcctactgtgccacaaggtgcgggtgctggagacacagctgagcctggaaatgagagtgggcatcgccgtggtcatcatgactcctctgcggcgtggtcaccatgttggttcactgtgttgggctcttattgacgggtctcctgctaggcctgaccttgggtgccggagccctgctggcttctgagcctatctaccaaccaccttcagcctgggtgccagctggggggctggtggggctggcgctgctgggagccctgctcacacttcggtggccacgtccattcacagttctgggcacaaccctgctgggttctgcagtgcttgtggcctgtgttgactacttcctggaggggctggcactggggagttggctgggccaacgcctgcagacacttccagccttgccttctctctgctgatatagctgggtcttactggggatctggccagccttgggggcccttggagccctggcccagtggaagctcgtgcctgaggaacatggaggccacgctaatgagttacttccagagtcttcaagagtgccaactgggaccaggaccccagaccacagccccccacaccgtcctggacctggattctgactgtggttccactgtacccctcaccttaatctctggttctaaccagacctgagcctagacttccactttttcccttacccctgtgagggcctgggaacactaggtgggcagggtttgagcccacaggacctgcacacaaacttccccacctcttggacttggggacaggatctgtgcctcaacccagaccagctttgtagggatatgttccaagaacagagaagagtcttatggggaagggggaggaagggaagtatgaatatttacctctgaccaataatagaggtgccctggtccccaaagaaattgactcccgaattccctccaagccttacccatatagcttttgtttgtttgtttgttttcagacaaggtcttgttctgtccagtgccgtggcgtgaccacagctcatgacaactttgatttccccggcccaagcgagcctctcattcagcctcctgagtggctgggaccacagacgccacacacagctaatttttatgtattcgtttttatttttttgcagagacagggtctccctatgttgcccaagctggtcttgaactcctgggctcaagtgatcctcctgcttcagcctcccaaagtgctaggattatagccaccgcacctcgtcttgaaatagccttttaaatgttcacctcagcttgcctcacagtggtaaaaataagcatttttttgttttgtaggatcagggagcttccaaggcatttgatacctttttgatgggaagaagggctctgaggagctccaagataccccaacctccaggcccttcattagggggtagttgggtttctgtttggcctttccccctgggccccataggcttaaactacccccacccccacctccgcctcctacctcagctgggagcactgtcttccatggggcttccacttctctcctcaacctggggaagaccacagggcagtgcctgcctcaggacctgccttccccaaaagctggcttcttgctccaaggagagagcattgacccacctgccagagtcttgccttttgcccaaaggagcctggtcttcagggctgcataggatgcaagtgccttctctgcttctcaccgtgggtggcactaatttcctccttaaccagaactttgttccagccactgacccattctaactcttccccctctgactctcctgcgcagggtctgttcctggtttcccagatgcataaaggaagacatatccctcccctgggcagcaaggctacaatgggagggagggagaacatgggagcatgtgaataaaatggcattaaatactgaaccagggagtccagcctc

SEQ ID NO: 418405 - DNA, 2030 bp, Homo sapiens
cgcgcgcacacacacaaacacaaacacacaccccaacacacacgccctgtcccctttctccaccctgcaagctagttgcatttagctcacagagcctgggctgcgacttgaaagagtttaggcagcaacagagtgaccctgggggtgctcttgaccgacagccgcacccccggcgtctaggacctccgagcagggatgcatctggaggtctagggaagcacttccaccccctcctctcctcaatcctggcaggatgtgcccgaaatgccagctcctccttggtgttctcctttcaggatttgaattcaaatcccattggcagccctgataccgctgggggaagggtgaggctactgctgcttcaagacagtgacgtttctctccggtcagctgtcaggagcgctgctgggtcttactggggatctggccagccttgggggcccttggagccctggcccagtggaagctcgtgcctgaggaacatggaggccacgctaatgacccttcagcaaaaggccaaatggcactggatcccctctggggtggggctttgtgagggcagctgtcggcatcagctccctgccaatacctgcagccctgctgacagtctcgctccaagttacttccagagtcttcaagagtgccaactgggaccaggaccccagaccacagccccccacaccgtcctggacctggattctgactgtggttccactgtacccctcaccttaatctctggttctaaccagacctgagcctagacttccactttttcccttacccctgtgagggcctgggaacactaggtgggcagggtttgagcccacaggacctgcacacaaacttccccacctcttggacttggggacaggatctgtgcctcaacccagaccagctttgtagggatatgttccaagaacagagaagagtcttatggggaagggggaggaagggaagtatgaatatttacctctgaccaataatagaggtgccctggtccccaaagaaattgactcccgaattccctccaagccttacccatatagcttttgtttgtttgtttgttttcagacaaggtcttgttctgtccagtgccgtggcgtgaccacagctcatgacaactttgatttccccggcccaagcgagcctctcattcagcctcctgagtggctgggaccacagacgccacacacagctaatttttatgtattcgtttttatttttttgcagagacagggtctccctatgttgcccaagctggtcttgaactcctgggctcaagtgatcctcctgcttcagcctcccaaagtgctaggattatagccaccgcacctcgtcttgaaatagccttttaaatgttcacctcagcttgcctcacagtggtaaaaataagcatttttttgttttgtaggatcagggagcttccaaggcatttgatacctttttgatgggaagaagggctctgaggagctccaagataccccaacctccaggcccttcattagggggtagttgggtttctgtttggcctttccccctgggccccataggcttaaactacccccacccccacctccgcctcctacctcagctgggagcactgtcttccatggggcttccacttctctcctcaacctggggaagaccacagggcagtgcctgcctcaggacctgccttccccaaaagctggcttcttgctccaaggagagagcattgacccacctgccagagtcttgccttttgcccaaaggagcctggtcttcagggctgcataggatgcaagtgccttctctgcttctcaccgtgggtggcactaatttcctccttaaccagaactttgttccagccactgacccattctaactcttccccctctgactctcctgcgcagggtctgttcctggtttcccagatgcataaaggaagacatatccctcccctgggcagcaaggctacaatgggagggagggagaacatgggagcatgtgaataaaatggcattaaatactgaaccagggagtccagcctc

SEQ ID NO: 418406 - DNA, 3669 bp, Homo sapiens
cgcttgtccagggtccccagacttccaagcagattgaggagaggagctccgagagtcaaccctccagcctgtaaggaccttgatatccaaaggacagctgaagaaagtaatgtgcctgcatttttgccacttcattcccacagtgcccgaaatgccagctcctccttggtgttctcctttcaggatttgaattcaaatcccattggcagccctgataccgctgggggaagggtgaggtaggaaaagtcccaccaatatcctaaggggaggtgcgagtggctaccaggatgtgagatgtctgtgggcaaagtccctgcttattccatgaggggctgtgggattaggactgtggctggatgcctcttcctccaacaactccatctcaggatgaagctgaggctttaaaaccctgacaaactgtgggtgactgtctctacttaattcctcctcccaaactcttggtgtctggttttttccctctttctgccctgggcctggagcagctgtccagagacccccaccatgactcatactctcctgttctccctccctctcccctctctattaacctcacccttcccaatccagtggggtagtattaagtcccagtcgcagatggggcaataatgtcccagcacccctccctccacacacccagggcttcctgttctttccaccctcaccctgaagagctgcagggtggtggggggaggcaaaggctcattactttataagattttcattactttataagatttcattttacattttacttaagtgtacttgtttcagagagtggtaaagacagatcctgctcctctcaatccaatcctgtagatttcttcagttacctcaacagggtcatactggctcctgaaatgggcaccattatttaaaagaaatagaggtacagagtcctcaagatttatgggcacctgagtttctgccccgtgccccgctgcaggtttcccaatcccctaaagacattcatggatgggtgagaggagctgacacctcccgctctgtgaccactttctctttggccatggaggaagtcttgctgcccctggctgtgacatctgaccccaggccctttaatcaacaactcccagagcctccagacccaagatgtgttttggaaccccaggacaatcctgaactggcacttgccctggtgtgtgccctttgctgctgctttggaatcatctactgctgcttcagtgagggcagggccaaggacctggggggccattgcccaagactgtcatcctcaaggatgatgccagctttcctccttgctcctgggccatctcacctcctctgccaggggttcctacctctagtgtggcccatgttgctctggctgtattcctaggcccatgttgctcttgccagcttcttgtccatcctccatgcccatgccttccagctttcacctctggcatctatcatttgctcttctcttaactcctacctgaaaaccccattcctaaattattcactatatttcagacttcttcactcttctccaaaaacctgaatcagcttgtgctgattttttcctatctgctatccctaaaaggactagaccttctttctatccttactcccctcaatgtatccatcttacctcttgattttccctcccattccctcacagttcctgaaacagtgcccccccccgaccctaagcgacccctttctgcccctggccttgaggtcccttgacgtgctgctcctgtcttctgctcctctagtgagccattcctctcccttggaattcatcagagtcatccctgtagagcccccttcctgcctctcaattcctcctgcctcacttcccaggctactgctgcttcaagacagtgacgtttctctccggtcagctgtcaggagcgctggtgagcttcctactgtgccacaaggtgcgggtgctggagacacagctgagcctggaaatgagagtgggcatcgccgtggtcatcatgactcctctgcggcgtggtcaccatgttggttcactgtgttgggctcttattgacgggtctcctgctaggcctgaccttgggtgccggagccctgctggcttctgagcctatctaccaaccaccttcagcctgggtgccagctggggggctggtggggctggcgctgctgggagccctgctcacacttcggtggccacgtccattcacagttctgggcacaaccctgctgggttctgcagtgcttgtggcctgtgttgactacttcctggaggggctggcactggggagttggctgggccaacgcctgcagacacttccagccttgccttctctctgctgatatagctgggtcttactggggatctggccagccttgggggcccttggagccctggcccagtggaagctcgtgcctgaggaacatggaggccacgctaatgagttacttccagagtcttcaagagtgccaactgggaccaggaccccagaccacagccccccacaccgtcctggacctggattctgactgtggttccactgtacccctcaccttaatctctggttctaaccagacctgagcctagacttccactttttcccttacccctgtgagggcctgggaacactaggtgggcagggtttgagcccacaggacctgcacacaaacttccccacctcttggacttggggacaggatctgtgcctcaacccagaccagctttgtagggatatgttccaagaacagagaagagtcttatggggaagggggaggaagggaagtatgaatatttacctctgaccaataatagaggtgccctggtccccaaagaaattgactcccgaattccctccaagccttacccatatagcttttgtttgtttgtttgttttcagacaaggtcttgttctgtccagtgccgtggcgtgaccacagctcatgacaactttgatttccccggcccaagcgagcctctcattcagcctcctgagtggctgggaccacagacgccacacacagctaatttttatgtattcgtttttatttttttgcagagacagggtctccctatgttgcccaagctggtcttgaactcctgggctcaagtgatcctcctgcttcagcctcccaaagtgctaggattatagccaccgcacctcgtcttgaaatagccttttaaatgttcacctcagcttgcctcacagtggtaaaaataagcatttttttgttttgtaggatcagggagcttccaaggcatttgatacctttttgatgggaagaagggctctgaggagctccaagataccccaacctccgcctcctacctcagctgggagcactgtcttccatggggcttccacttctctcctcaacctggggaagaccacagggcagtgcctgcctcaggacctgccttccccaaaagctggcttcttgctccaaggagagagcattgacccacctgccagagtcttgccttttgcccaaaggagcctggtcttcagggctgcataggatgcaagtgccttctctgcttctcaccagggtctgttcctggtttcccagatgcataaaggaagacatatccctcccctgggcagcaaggctacaatgggagggagggagaacatgggagcatgtgaataaaatggcattaaatactgaaccagggagtccagcctc

SEQ ID NO: 418407 - DNA, 3730 bp, Homo sapiens
cgcttgtccagggtccccagacttccaagcagattgaggagaggagctccgagagtcaaccctccagcctgtaaggaccttgatatccaaaggacagctgaagaaagtaatgtgcctgcatttttgccacttcattcccacagtgcccgaaatgccagctcctccttggtgttctcctttcaggatttgaattcaaatcccattggcagccctgataccgctgggggaagggtgaggtaggaaaagtcccaccaatatcctaaggggaggtgcgagtggctaccaggatgtgagatgtctgtgggcaaagtccctgcttattccatgaggggctgtgggattaggactgtggctggatgcctcttcctccaacaactccatctcaggatgaagctgaggctttaaaaccctgacaaactgtgggtgactgtctctacttaattcctcctcccaaactcttggtgtctggttttttccctctttctgccctgggcctggagcagctgtccagagacccccaccatgactcatactctcctgttctccctccctctcccctctctattaacctcacccttcccaatccagtggggtagtattaagtcccagtcgcagatggggcaataatgtcccagcacccctccctccacacacccagggcttcctgttctttccaccctcaccctgaagagctgcagggtggtggggggaggcaaaggctcattactttataagattttcattactttataagatttcattttacattttacttaagtgtacttgtttcagagagtggtaaagacagatcctgctcctctcaatccaatcctgtagatttcttcagttacctcaacagggtcatactggctcctgaaatgggcaccattatttaaaagaaatagaggtacagagtcctcaagatttatgggcacctgagtttctgccccgtgccccgctgcaggtttcccaatcccctaaagacattcatggatgggtgagaggagctgacacctcccgctctgtgaccactttctctttggccatggaggaagtcttgctgcccctggctgtgacatctgaccccaggccctttaatcaacaactcccagagcctccagacccaagatgtgttttggaaccccaggacaatcctgaactggcacttgccctggtgtgtgccctttgctgctgctttggaatcatctactgctgcttcagtgagggcagggccaaggacctggggggccattgcccaagactgtcatcctcaaggatgatgccagctttcctccttgctcctgggccatctcacctcctctgccaggggttcctacctctagtgtggcccatgttgctctggctgtattcctaggcccatgttgctcttgccagcttcttgtccatcctccatgcccatgccttccagctttcacctctggcatctatcatttgctcttctcttaactcctacctgaaaaccccattcctaaattattcactatatttcagacttcttcactcttctccaaaaacctgaatcagcttgtgctgattttttcctatctgctatccctaaaaggactagaccttctttctatccttactcccctcaatgtatccatcttacctcttgattttccctcccattccctcacagttcctgaaacagtgcccccccccgaccctaagcgacccctttctgcccctggccttgaggtcccttgacgtgctgctcctgtcttctgctcctctagtgagccattcctctcccttggaattcatcagagtcatccctgtagagcccccttcctgcctctcaattcctcctgcctcacttcccaggctactgctgcttcaagacagtgacgtttctctccggtcagctgtcaggagcgctggtgagcttcctactgtgccacaaggtgcgggtgctggagacacagctgagcctggaaatgagagtgggcatcgccgtggtcatcatgactcctctgcggcgtggtcaccatgttggttcactgtgttgggctcttattgacgggtctcctgctaggcctgaccttgggtgccggagccctgctggcttctgagcctatctaccaaccaccttcagcctgggtgccagctggggggctggtggggctggcgctgctgggagccctgctcacacttcggtggccacgtccattcacagttctgggcacaaccctgctgggttctgcagtgcttgtggcctgtgttgactacttcctggaggggctggcactggggagttggctgggccaacgcctgcagacacttccagccttgccttctctctgctgatatagctgggtcttactggggatctggccagccttgggggcccttggagccctggcccagtggaagctcgtgcctgaggaacatggaggccacgctaatgagttacttccagagtcttcaagagtgccaactgggaccaggaccccagaccacagccccccacaccgtcctggacctggattctgactgtggttccactgtacccctcaccttaatctctggttctaaccagacctgagcctagacttccactttttcccttacccctgtgagggcctgggaacactaggtgggcagggtttgagcccacaggacctgcacacaaacttccccacctcttggacttggggacaggatctgtgcctcaacccagaccagctttgtagggatatgttccaagaacagagaagagtcttatggggaagggggaggaagggaagtatgaatatttacctctgaccaataatagaggtgccctggtccccaaagaaattgactcccgaattccctccaagccttacccatatagcttttgtttgtttgtttgttttcagacaaggtcttgttctgtccagtgccgtggcgtgaccacagctcatgacaactttgatttccccggcccaagcgagcctctcattcagcctcctgagtggctgggaccacagacgccacacacagctaatttttatgtattcgtttttatttttttgcagagacagggtctccctatgttgcccaagctggtcttgaactcctgggctcaagtgatcctcctgcttcagcctcccaaagtgctaggattatagccaccgcacctcgtcttgaaatagccttttaaatgttcacctcagcttgcctcacagtggtaaaaataagcatttttttgttttgtaggatcagggagcttccaaggcatttgatacctttttgatgggaagaagggctctgaggagctccaagataccccaacctccaggcccttcattagggggtagttgggtttctgtttggcctttccccctgggccccataggcttaaactacccccacccccacctccgcctcctacctcagctgggagcactgtcttccatggggcttccacttctctcctcaacctggggaagaccacagggcagtgcctgcctcaggacctgccttccccaaaagctggcttcttgctccaaggagagagcattgacccacctgccagagtcttgccttttgcccaaaggagcctggtcttcagggctgcataggatagggtctgttcctggtttcccagatgcataaaggaagacatatccctcccctgggcagcaaggctacaatgggagggagggagaacatgggagcatgtgaataaaatggcattaaatactgaaccagggagtccagcctc

SEQ ID NO: 418408 - DNA, 1388 bp, Homo sapiens
cgcgcgcacacacacaaacacaaacacacaccccaacacacacgccctgtcccctttctccaccctgcaagctagttgcatttagctcacagagcctgggctgcgacttgaaagagtttaggcagcaacagagtgaccctgggggtgctcttgaccgacagccgcacccccggcgtctaggacctccgagcagggatgcatctggaggtctagggaagcacttccaccccctcctctcctcaatcctggcaggatgtgcccgaaatgccagctcctccttggtgttctcctttcaggatttgaattcaaatcccattggcagccctgataccgctgggggaagggtgagtgagccattcctctcccttggaattcatcagagtcatccctgtagagcccccttcctgcctctcaattcctcctgcctcacttcccaggctactgctgcttcaagacagtgacgtttctctccggtcagctgtcaggagcgctgctgggtcttactggggatctggccagccttgggggcccttggagccctggcccagtggaagctcgtgcctgaggaacatggaggccacgctaatgagacagggtctccctatgttgcccaagctggtcttgaactcctgggctcaagtgatcctcctgcttcagcctcccaaagtgctaggattatagccaccgcacctcgtcttgaaatagccttttaaatgttcacctcagcttgcctcacagtggtaaaaataagcatttttttgttttgtaggatcagggagcttccaaggcatttgatacctttttgatgggaagaagggctctgaggagctccaagataccccaacctccaggcccttcattagggggtagttgggtttctgtttggcctttccccctgggccccataggcttaaactacccccacccccacctccgcctcctacctcagctgggagcactgtcttccatggggcttccacttctctcctcaacctggggaagaccacagggcagtgcctgcctcaggacctgccttccccaaaagctggcttcttgctccaaggagagagcattgacccacctgccagagtcttgccttttgcccaaaggagcctggtcttcagggctgcataggatgcaagtgccttctctgcttctcaccgtgggtggcactaatttcctccttaaccagaactttgttccagccactgacccattctaactcttccccctctgactctcctgcgcagggtctgttcctggtttcccagatgcataaaggaagacatatccctcccctgggcagcaaggctacaatgggagggagggagaacatgggagcatgtgaataaaatggcattaaatactgaaccagggagtccagcctc

SEQ ID NO: 418409 - DNA, 3127 bp, Homo sapiens
cgcttgtccagggtccccagacttccaagcagattgaggagaggagctccgagagtcaaccctccagcctgtaaggaccttgatatccaaaggacagctgaagaaagtaatgtgcctgcatttttgccacttcattcccacagtgcccgaaatgccagctcctccttggtgttctcctttcaggatttgaattcaaatcccattggcagccctgataccgctgggggaagggtgaggtaggaaaagtcccaccaatatcctaaggggaggtgcgagtggctaccaggatgtgagatgtctgtgggcaaagtccctgcttattccatgaggggctgtgggattaggactgtggctggatgcctcttcctccaacaactccatctcaggatgaagctgaggctttaaaaccctgacaaactgtgggtgactgtctctacttaattcctcctcccaaactcttggtgtctggttttttccctctttctgccctgggcctggagcagctgtccagagacccccaccatgactcatactctcctgttctccctccctctcccctctctattaacctcacccttcccaatccagtggggtagtattaagtcccagtcgcagatggggcaataatgtcccagcacccctccctccacacacccagggcttcctgttctttccaccctcaccctgaagagctgcagggtggtggggggaggcaaaggctcattactttataagattttcattactttataagatttcattttacattttacttaagtgtacttgtttcagagagtggtaaagacagatcctgctcctctcaatccaatcctgtagatttcttcagttacctcaacagggtcatactggctcctgaaatgggcaccattatttaaaagaaatagaggtacagagtcctcaagatttatgggcacctgagtttctgccccgtgccccgctgcaggtttcccaatcccctaaagacattcatggatgggtgagaggagctgacacctcccgctctgtgaccactttctctttggccatggaggaagtcttgctgcccctggctgtgacatctgaccccaggccctttaatcaacaactcccagagcctccagacccaagatgtgttttggaaccccaggacaatcctgaactggcacttgccctggtgtgtgccctttgctgctgctttggaatcatctactgctgcttcagtgagggcagggccaaggacctggggggccattgcccaagactgtcatcctcaaggatgatgccagctttcctccttgctcctgggccatctcacctcctctgccaggggttcctacctctagtgtggcccatgttgctctggctgtattcctaggcccatgttgctcttgccagcttcttgtccatcctccatgcccatgccttccagctttcacctctggcatctatcatttgctcttctcttaactcctacctgaaaaccccattcctaaattattcactatatttcagacttcttcactcttctccaaaaacctgaatcagcttgtgctgattttttcctatctgctatccctaaaaggactagaccttctttctatccttactcccctcaatgtatccatcttacctcttgattttccctcccattccctcacagttcctgaaacagtgcccccccccgaccctaagcgacccctttctgcccctggccttgaggtcccttgacgtgctgctcctgtcttctgctcctctagtgagccattcctctcccttggaattcatcagagtcatccctgtagagcccccttcctgcctctcaattcctcctgcctcacttcccaggctactgctgcttcaagacagtgacgtttctctccggtcagctgtcaggagcgctggtgagcttcctactgtgccacaaggtgcgggtgctggagacacagctgagcctggaaatgagagtgggcatcgccgtggtcatcatgactcctctgcggcgtggtcaccatgttggttcactgtgttgggctcttattgacgggtctcctgctaggcctgaccttgggtgccggagccctgctggcttctgagcctatctaccaaccaccttcagcctgggtgccagctggggggctggtggggctggcgctgctgggagccctgctcacacttcggtggccacgtccattcacagttctgggcacaaccctgctgggttctgcagtgcttgtggcctgtgttgactacttcctggaggggctggcactggggagttggctgggccaacgcctgcagacacttccagccttgccttctctctgctgatatagctgggtcttactggggatctggccagccttgggggcccttggagccctggcccagtggaagctcgtgcctgaggaacatggaggccacgctaatgagttacttccagagtcttcaagagtgccaactgggaccaggaccccagaccacagccccccacaccgtcctggacctggattctgactgtggttccactgtacccctcaccttaatctctggttctaaccagacctgagcctagacttccactttttcccttacccctgtgagggcctgggaacactaggtgggcagggtttgagcccacaggacctgcacacaaacttccccacctcttggacttggggacaggatctgtgcctcaacccagaccagctttgtagggatatgttccaagaacagagaagagtcttatggggaagggggaggaagggaagtatgaatatttacctccgcctcctacctcagctgggagcactgtcttccatggggcttccacttctctcctcaacctggggaagaccacagggcagtgcctgcctcaggacctgccttccccaaaagctggcttcttgctccaaggagagagcattgacccacctgccagagtcttgccttttgcccaaaggagcctggtcttcagggctgcataggatagggtctgttcctggtttcccagatgcataaaggaagacatatccctcccctgggcagcaaggctacaatgggagggagggagaacatgggagcatgtgaataaaatggcattaaatactgaaccagggagtccagcctc

SEQ ID NO: 418410 - DNA, 2288 bp, Homo sapiens
cgcttgtccagggtccccagacttccaagcagattgaggagaggagctccgagagtcaaccctccagcctgtaaggaccttgatatccaaaggacagctgaagaaagtaatgtgcctgcatttttgccacttcattcccacagtgcccgaaatgccagctcctccttggtgttctcctttcaggatttgaattcaaatcccattggcagccctgataccgctgggggaagggtgaggtaggaaaagtcccaccaatatcctaaggggaggtgcgagtggctaccaggatgtgagatgtctgtgggcaaagtccctgcttattccatgaggggctgtgggattaggactgtggctggatgcctcttcctccaacaactccatctcaggatgaagctgaggctttaaaaccctgacaaactgtgggtgactgtctctacttaattcctcctcccaaactcttggtgtctggttttttccctctttctgccctgggcctggagcagctgtccagagacccccaccatgactcatactctcctgttctccctccctctcccctctctattaacctcacccttcccaatccagtggggtagtattaagtcccagtcgcagatggggcaataatgtcccagcacccctccctccacacacccagggcttcctgttctttccaccctcaccctgaagagctgcagggtggtggggggaggcaaaggctcattactttataagattttcattactttataagatttcattttacattttacttaagtgtacttgtttcagagagtggtaaagacagatcctgctcctctcaatccaatcctgtagatttcttcagttacctcaacagggtcatactggctcctgaaatgggcaccattatttaaaagaaatagaggtacagagtcctcaagatttatgggcacctgagtttctgccccgtgccccgctgcaggtttcccaatcccctaaagacattcatggatgggtgagaggagctgacacctcccgctctgtgaccactttctctttggccatggaggaagtcttgctgcccctggctgtgacatctgaccccaggccctttaatcaacaactcccagagcctccagacccaagatgtgttttggaaccccaggacaatcctgaactggcacttgccctggtgtgtgccctttgctgctgctttggaatcatctactgctgcttcagtgagggcagggccaaggacctggggggccattgcccaagactgtcatcctcaaggatgatgccagctttcctccttgctcctgggccatctcacctcctctgccaggggttcctacctctagtgtggcccatgttgctctggctgtattcctaggcccatgttgctcttgccagcttcttgtccatcctccatgcccatgccttccagctttcacctctggcatctatcatttgctcttctcttaactcctacctgaaaaccccattcctaaattattcactatatttcagacttcttcactcttctccaaaaacctgaatcagcttgtgctgattttttcctatctgctatccctaaaaggactagaccttctttctatccttactcccctcaatgtatccatcttacctcttgattttccctcccattccctcacagttcctgaaacagtgcccccccccgaccctaagcgacccctttctgcccctggccttgaggtcccttgacgtgctgctcctgtcttctgctcctctagtgagccattcctctcccttggaattcatcagagtcatccctgtagagcccccttcctgcctctcaattcctcctgcctcacttcccaggctactgctgcttcaagacagtgacgtttctctccggtcagctgtcaggagcgctgctgggtcttactggggatctggccagccttgggggcccttggagccctggcccagtggaagctcgtgcctgaggaacatggaggccacgctaatgagacagggtctccctatgttgcccaagctggtcttgaactcctgggctcaagtgatcctcctgcttcagcctcccaaagtgctaggattatagccaccgcacctcgtcttgaaatagccttttaaatgttcacctcagcttgcctcacagtgagggtctgttcctggtttcccagatgcataaaggaagacatatccctcccctgggcagcaaggctacaatgggagggagggagaacatgggagcatgtgaataaaatggcattaaatactgaaccagggagtccagcctc

SEQ ID NO: 418411 - DNA, 780 bp, Homo sapiens
cgcgcgcacacacacaaacacaaacacacaccccaacacacacgccctgtcccctttctccaccctgcaagctagttgcatttagctcacagagcctgggctgcgacttgaaagagtttaggcagcaacagagtgaccctgggggtgctcttgaccgacagccgcacccccggcgtctaggacctccgagcagggatgcatctggaggtctagggaagcacttccaccccctcctctcctcaatcctggcaggatgtgcccgaaatgccagctcctccttggtgttctcctttcaggatttgaattcaaatcccattggcagccctgataccgctgggggaagggtgagctgggtcttactggggatctggccagccttgggggcccttggagccctggcccagtggaagctcgtgcctgaggaacatggaggccacgctaatgagttacttccagagtcttcaagagtgccaactgggaccaggaccccagaccacagccccccacaccgtcctggacctggattctgactgtggttccactgatcagggagcttccaaggcatttgatacctttttgatgggaagaagggctctgaggagctccaagataccccaacctccaggcccttcattaggggagggtctgttcctggtttcccagatgcataaaggaagacatatccctcccctgggcagcaaggctacaatgggagggagggagaacatgggagcatgtgaataaaatggcattaaatactgaaccagggagtccagcctc

SEQ ID NO: 418412 - DNA, 3954 bp, Homo sapiens
cgcgcgcacacacacaaacacaaacacacaccccaacacacacgccctgtcccctttctccaccctgcaagctagttgcatttagctcacagagcctgggctgcgacttgaaagagtttaggcagcaacagagtgaccctgggggtgctcttgaccgacagccgcacccccggcgtctaggacctccgagcagggatgcatctggaggtctagggaagcacttccaccccctcctctcctcaatcctggcaggatgtgcccgaaatgccagctcctccttggtgttctcctttcaggatttgaattcaaatcccattggcagccctgataccgctgggggaagggtgaggtaggaaaagtcccaccaatatcctaaggggaggtgcgagtggctaccaggatgtgagatgtctgtgggcaaagtccctgcttattccatgaggggctgtgggattaggactgtggctggatgcctcttcctccaacaactccatctcaggatgaagctgaggctttaaaaccctgacaaactgtgggtgactgtctctacttaattcctcctcccaaactcttggtgtctggttttttccctctttctgccctgggcctggagcagctgtccagagacccccaccatgactcatactctcctgttctccctccctctcccctctctattaacctcacccttcccaatccagtggggtagtattaagtcccagtcgcagatggggcaataatgtcccagcacccctccctccacacacccagggcttcctgttctttccaccctcaccctgaagagctgcagggtggtggggggaggcaaaggctcattactttataagattttcattactttataagatttcattttacattttacttaagtgtacttgtttcagagagtggtaaagacagatcctgctcctctcaatccaatcctgtagatttcttcagttacctcaacagggtcatactggctcctgaaatgggcaccattatttaaaagaaatagaggtacagagtcctcaagatttatgggcacctgagtttctgccccgtgccccgctgcaggtttcccaatcccctaaagacattcatggatgggtgagaggagctgacacctcccgctctgtgaccactttctctttggccatggaggaagtcttgctgcccctggctgtgacatctgaccccaggccctttaatcaacaactcccagagcctccagacccaagatgtgttttggaaccccaggacaatcctgaactggcacttgccctggtgtgtgccctttgctgctgctttggaatcatctactgctgcttcagtgagggcagggccaaggacctggggggccattgcccaagactgtcatcctcaaggatgatgccagctttcctccttgctcctgggccatctcacctcctctgccaggggttcctacctctagtgtggcccatgttgctctggctgtattcctaggcccatgttgctcttgccagcttcttgtccatcctccatgcccatgccttccagctttcacctctggcatctatcatttgctcttctcttaactcctacctgaaaaccccattcctaaattattcactatatttcagacttcttcactcttctccaaaaacctgaatcagcttgtgctgattttttcctatctgctatccctaaaaggactagaccttctttctatccttactcccctcaatgtatccatcttacctcttgattttccctcccattccctcacagttcctgaaacagtgcccccccccgaccctaagcgacccctttctgcccctggccttgaggtcccttgacgtgctgctcctgtcttctgctcctctagtgagccattcctctcccttggaattcatcagagtcatccctgtagagcccccttcctgcctctcaattcctcctgcctcacttcccaggctactgctgcttcaagacagtgacgtttctctccggtcagctgtcaggagcgctggtgagcttcctactgtgccacaaggtgcgggtgctggagacacagctgagcctggaaatgagagtgggcatcgccgtggtcatcatgactcctctgcggcgtggtcaccatgttggttcactgtgttgggctcttattgacgggtctcctgctaggcctgaccttgggtgccggagccctgctggcttctgagcctatctaccaaccaccttcagcctgggtgccagctggggggctggtggggctggcgctgctgggagccctgctcacacttcggtggccacgtccattcacagttctgggcacaaccctgctgggttctgcagtgcttgtggcctgtgttgactacttcctggaggggctggcactggggagttggctgggccaacgcctgcagacacttccagccttgccttctctctgctgatatagctgggtcttactggggatctggccagccttgggggcccttggagccctggcccagtggaagctcgtgcctgaggaacatggaggccacgctaatgagttacttccagagtcttcaagagtgccaactgggaccaggaccccagaccacagccccccacaccgtcctggacctggattctgactgtggttccactgtacccctcaccttaatctctggttctaaccagacctgagcctagacttccactttttcccttacccctgtgagggcctgggaacactaggtgggcagggtttgagcccacaggacctgcacacaaacttccccacctcttggacttggggacaggatctgtgcctcaacccagaccagctttgtagggatatgttccaagaacagagaagagtcttatggggaagggggaggaagggaagtatgaatatttacctctgaccaataatagaggtgccctggtccccaaagaaattgactcccgaattccctccaagccttacccatatagcttttgtttgtttgtttgttttcagacaaggtcttgttctgtccagtgccgtggcgtgaccacagctcatgacaactttgatttccccggcccaagcgagcctctcattcagcctcctgagtggctgggaccacagacgccacacacagctaatttttatgtattcgtttttatttttttgcagagacagggtctccctatgttgcccaagctggtcttgaactcctgggctcaagtgatcctcctgcttcagcctcccaaagtgctaggattatagccaccgcacctcgtcttgaaatagccttttaaatgttcacctcagcttgcctcacagtggtaaaaataagcatttttttgttttgtaggatcagggagcttccaaggcatttgatacctttttgatgggaagaagggctctgaggagctccaagataccccaacctccaggcccttcattagggggtagttgggtttctgtttggcctttccccctgggccccataggcttaaactacccccacccccacctccgcctcctacctcagctgggagcactgtcttccatggggcttccacttctctcctcaacctggggaagaccacagggcagtgcctgcctcaggacctgccttccccaaaagctggcttcttgctccaaggagagagcattgacccacctgccagagtcttgccttttgcccaaaggagcctggtcttcagggctgcataggatgcaagtgccttctctgcttctcaccgtgggtggcactaatttcctccttaaccagaactttgttccagccactgacccattctaactcttccccctctgactctcctgcgcagggtctgttcctggtttcccagatgcataaaggaagacatatccctcccctgggcagcaaggctacaatgggagggagggagaacatgggagcatgtgaataaaatggcattaaatactgaaccagggagtccagcctc

SEQ ID NO: 418413 - DNA, 1820 bp, Homo sapiens
cgcgcgcacacacacaaacacaaacacacaccccaacacacacgccctgtcccctttctccaccctgcaagctagttgcatttagctcacagagcctgggctgcgacttgaaagagtttaggcagcaacagagtgaccctgggggtgctcttgaccgacagccgcacccccggcgtctaggacctccgagcagggatgcatctggaggtctagggaagcacttccaccccctcctctcctcaatcctggcaggatggctactgctgcttcaagacagtgacgtttctctccggtcagctgtcaggagcgctgctgggtcttactggggatctggccagccttgggggcccttggagccctggcccagtggaagctcgtgcctgaggaacatggaggccacgctaatgagttacttccagagtcttcaagagtgccaactgggaccaggaccccagaccacagccccccacaccgtcctggacctggattctgactgtggttccactgtacccctcaccttaatctctggttctaaccagacctgagcctagacttccactttttcccttacccctgtgagggcctgggaacactaggtgggcagggtttgagcccacaggacctgcacacaaacttccccacctcttggacttggggacaggatctgtgcctcaacccagaccagctttgtagggatatgttccaagaacagagaagagtcttatggggaagggggaggaagggaagtatgaatatttacctctgaccaataatagaggtgccctggtccccaaagaaattgactcccgaattccctccaagccttacccatatagcttttgtttgtttgtttgttttcagacaaggtcttgttctgtccagtgccgtggcgtgaccacagctcatgacaactttgatttccccggcccaagcgagcctctcattcagcctcctgagtggctgggaccacagacgccacacacagctaatttttatgtattcgtttttatttttttgcagagacagggtctccctatgttgcccaagctggtcttgaactcctgggctcaagtgatcctcctgcttcagcctcccaaagtgctaggattatagccaccgcacctcgtcttgaaatagccttttaaatgttcacctcagcttgcctcacagtggtaaaaataagcatttttttgttttgtaggatcagggagcttccaaggcatttgatacctttttgatgggaagaagggctctgaggagctccaagataccccaacctccaggcccttcattagggggtagttgggtttctgtttggcctttccccctgggccccataggcttaaactacccccacccccacctccgcctcctacctcagctgggagcactgtcttccatggggcttccacttctctcctcaacctggggaagaccacagggcagtgcctgcctcaggacctgccttccccaaaagctggcttcttgctccaaggagagagcattgacccacctgccagagtcttgccttttgcccaaaggagcctggtcttcagggctgcataggatgcaagtgccttctctgcttctcaccgtgggtggcactaatttcctccttaaccagaactttgttccagccactgacccattctaactcttccccctctgactctcctgcgcagggtctgttcctggtttcccagatgcataaaggaagacatatccctcccctgggcagcaaggctacaatgggagggagggagaacatgggagcatgtgaataaaatggcattaaatactgaaccagggagtccagcctc

SEQ ID NO: 418414 - DNA, 1857 bp, Homo sapiens
cgcgcgcacacacacaaacacaaacacacaccccaacacacacgccctgtcccctttctccaccctgcaagctagttgcatttagctcacagagcctgggctgcgacttgaaagagtttaggcagcaacagagtgaccctgggggtgctcttgaccgacagccgcacccccggcgtctaggacctccgagcagggatgcatctggaggtctagggaagcacttccaccccctcctctcctcaatcctggcaggatgtgcccgaaatgccagctcctccttggtgttctcctttcaggatttgaattcaaatcccattggcagccctgataccgctgggggaagggtgagctgggtcttactggggatctggccagccttgggggcccttggagccctggcccagtggaagctcgtgcctgaggaacatggaggccacgctaatgagttacttccagagtcttcaagagtgccaactgggaccaggaccccagaccacagccccccacaccgtcctggacctggattctgactgtggttccactgtacccctcaccttaatctctggttctaaccagacctgagcctagacttccactttttcccttacccctgtgagggcctgggaacactaggtgggcagggtttgagcccacaggacctgcacacaaacttccccacctcttggacttggggacaggatctgtgcctcaacccagaccagctttgtagggatatgttccaagaacagagaagagtcttatggggaagggggaggaagggaagtatgaatatttacctctgaccaataatagaggtgccctggtccccaaagaaattgactcccgaattccctccaagccttacccatatagcttttgtttgtttgtttgttttcagacaaggtcttgttctgtccagtgccgtggcgtgaccacagctcatgacaactttgatttccccggcccaagcgagcctctcattcagcctcctgagtggctgggaccacagacgccacacacagctaatttttatgtattcgtttttatttttttgcagagacagggtctccctatgttgcccaagctggtcttgaactcctgggctcaagtgatcctcctgcttcagcctcccaaagtgctaggattatagccaccgcacctcgtcttgaaatagccttttaaatgttcacctcagcttgcctcacagtggtaaaaataagcatttttttgttttgtaggatcagggagcttccaaggcatttgatacctttttgatgggaagaagggctctgaggagctccaagataccccaacctccaggcccttcattagggggtagttgggtttctgtttggcctttccccctgggccccataggcttaaactacccccacccccacctccgcctcctacctcagctgggagcactgtcttccatggggcttccacttctctcctcaacctggggaagaccacagggcagtgcctgcctcaggacctgccttccccaaaagctggcttcttgctccaaggagagagcattgacccacctgccagagtcttgccttttgcccaaaggagcctggtcttcagggctgcataggatgcaagtgccttctctgcttctcaccgtgggtggcactaatttcctccttaaccagaactttgttccagccactgacccattctaactcttccccctctgactctcctgcgcagggtctgttcctggtttcccagatgcataaaggaagacatatccctcccctgggcagcaaggctacaatgggagggagggagaacatgggagcatgtgaataaaatggcattaaatactgaaccagggagtccagcctc

SEQ ID NO: 418415 - DNA, 1913 bp, Homo sapiens
cgcgcgcacacacacaaacacaaacacacaccccaacacacacgccctgtcccctttctccaccctgcaagctagttgcatttagctcacagagcctgggctgcgacttgaaagagtttaggcagcaacagagtgaccctgggggtgctcttgaccgacagccgcacccccggcgtctaggacctccgagcagggatgcatctggaggtctagggaagcacttccaccccctcctctcctcaatcctggcaggatgtgcccgaaatgccagctcctccttggtgttctcctttcaggatttgaattcaaatcccattggcagccctgataccgctgggggaagggtgaggctactgctgcttcaagacagtgacgtttctctccggtcagctgtcaggagcgctgctgggtcttactggggatctggccagccttgggggcccttggagccctggcccagtggaagctcgtgcctgaggaacatggaggccacgctaatgagttacttccagagtcttcaagagtgccaactgggaccaggaccccagaccacagccccccacaccgtcctggacctggattctgactgtggttccactgtacccctcaccttaatctctggttctaaccagacctgagcctagacttccactttttcccttacccctgtgagggcctgggaacactaggtgggcagggtttgagcccacaggacctgcacacaaacttccccacctcttggacttggggacaggatctgtgcctcaacccagaccagctttgtagggatatgttccaagaacagagaagagtcttatggggaagggggaggaagggaagtatgaatatttacctctgaccaataatagaggtgccctggtccccaaagaaattgactcccgaattccctccaagccttacccatatagcttttgtttgtttgtttgttttcagacaaggtcttgttctgtccagtgccgtggcgtgaccacagctcatgacaactttgatttccccggcccaagcgagcctctcattcagcctcctgagtggctgggaccacagacgccacacacagctaatttttatgtattcgtttttatttttttgcagagacagggtctccctatgttgcccaagctggtcttgaactcctgggctcaagtgatcctcctgcttcagcctcccaaagtgctaggattatagccaccgcacctcgtcttgaaatagccttttaaatgttcacctcagcttgcctcacagtggtaaaaataagcatttttttgttttgtaggatcagggagcttccaaggcatttgatacctttttgatgggaagaagggctctgaggagctccaagataccccaacctccaggcccttcattagggggtagttgggtttctgtttggcctttccccctgggccccataggcttaaactacccccacccccacctccgcctcctacctcagctgggagcactgtcttccatggggcttccacttctctcctcaacctggggaagaccacagggcagtgcctgcctcaggacctgccttccccaaaagctggcttcttgctccaaggagagagcattgacccacctgccagagtcttgccttttgcccaaaggagcctggtcttcagggctgcataggatgcaagtgccttctctgcttctcaccgtgggtggcactaatttcctccttaaccagaactttgttccagccactgacccattctaactcttccccctctgactctcctgcgcagggtctgttcctggtttcccagatgcataaaggaagacatatccctcccctgggcagcaaggctacaatgggagggagggagaacatgggagcatgtgaataaaatggcattaaatactgaaccagggagtccagcctc

SEQ ID NO: 418416 - DNA, 3755 bp, Homo sapiens
cgcttgtccagggtccccagacttccaagcagattgaggagaggagctccgagagtcaaccctccagcctgtaaggaccttgatatccaaaggacagctgaagaaagtaatgtgcctgcatttttgccacttcattcccacagtgcccgaaatgccagctcctccttggtgttctcctttcaggatttgaattcaaatcccattggcagccctgataccgctgggggaagggtgaggtaggaaaagtcccaccaatatcctaaggggaggtgcgagtggctaccaggatgtgagatgtctgtgggcaaagtccctgcttattccatgaggggctgtgggattaggactgtggctggatgcctcttcctccaacaactccatctcaggatgaagctgaggctttaaaaccctgacaaactgtgggtgactgtctctacttaattcctcctcccaaactcttggtgtctggttttttccctctttctgccctgggcctggagcagctgtccagagacccccaccatgactcatactctcctgttctccctccctctcccctctctattaacctcacccttcccaatccagtggggtagtattaagtcccagtcgcagatggggcaataatgtcccagcacccctccctccacacacccagggcttcctgttctttccaccctcaccctgaagagctgcagggtggtggggggaggcaaaggctcattactttataagattttcattactttataagatttcattttacattttacttaagtgtacttgtttcagagagtggtaaagacagatcctgctcctctcaatccaatcctgtagatttcttcagttacctcaacagggtcatactggctcctgaaatgggcaccattatttaaaagaaatagaggtacagagtcctcaagatttatgggcacctgagtttctgccccgtgccccgctgcaggtttcccaatcccctaaagacattcatggatgggtgagaggagctgacacctcccgctctgtgaccactttctctttggccatggaggaagtcttgctgcccctggctgtgacatctgaccccaggccctttaatcaacaactcccagagcctccagacccaagatgtgttttggaaccccaggacaatcctgaactggcacttgccctggtgtgtgccctttgctgctgctttggaatcatctactgctgcttcagtgagggcagggccaaggacctggggggccattgcccaagactgtcatcctcaaggatgatgccagctttcctccttgctcctgggccatctcacctcctctgccaggggttcctacctctagtgtggcccatgttgctctggctgtattcctaggcccatgttgctcttgccagcttcttgtccatcctccatgcccatgccttccagctttcacctctggcatctatcatttgctcttctcttaactcctacctgaaaaccccattcctaaattattcactatatttcagacttcttcactcttctccaaaaacctgaatcagcttgtgctgattttttcctatctgctatccctaaaaggactagaccttctttctatccttactcccctcaatgtatccatcttacctcttgattttccctcccattccctcacagttcctgaaacagtgcccccccccgaccctaagcgacccctttctgcccctggccttgaggtcccttgacgtgctgctcctgtcttctgctcctctagtgagccattcctctcccttggaattcatcagagtcatccctgtagagcccccttcctgcctctcaattcctcctgcctcacttcccaggctactgctgcttcaagacagtgacgtttctctccggtcagctgtcaggagcgctggtgagcttcctactgtgccacaaggtgcgggtgctggagacacagctgagcctggaaatgagagtgggcatcgccgtggtcatcatgactcctctgcggcgtggtcaccatgttggttcactgtgttgggctcttattgacgggtctcctgctaggcctgaccttgggtgccggagccctgctggcttctgagcctatctaccaaccaccttcagcctgggtgccagctggggggctggtggggctggcgctgctgggagccctgctcacacttcggtggccacgtccattcacagttctgggcacaaccctgctgggttctgcagtgcttgtggcctgtgttgactacttcctggaggggctggcactggggagttggctgggccaacgcctgcagacacttccagccttgccttctctctgctgatatagctgggtcttactggggatctggccagccttgggggcccttggagccctggcccagtggaagctcgtgcctgaggaacatggaggccacgctaatgagttacttccagagtcttcaagagtgccaactgggaccaggaccccagaccacagccccccacaccgtcctggacctggattctgactgtggttccactgtacccctcaccttaatctctggttctaaccagacctgagcctagacttccactttttcccttacccctgtgagggcctgggaacactaggtgggcagggtttgagcccacaggacctgcacacaaacttccccacctcttggacttggggacaggatctgtgcctcaacccagaccagctttgtagggatatgttccaagaacagagaagagtcttatggggaagggggaggaagggaagtatgaatatttacctctgaccaataatagaggtgccctggtccccaaagaaattgactcccgaattccctccaagccttacccatatagcttttgtttgtttgtttgttttcagacaaggtcttgttctgtccagtgccgtggcgtgaccacagctcatgacaactttgatttccccggcccaagcgagcctctcattcagcctcctgagtggctgggaccacagacgccacacacagctaatttttatgtattcgtttttatttttttgcagagacagggtctccctatgttgcccaagctggtcttgaactcctgggctcaagtgatcctcctgcttcagcctcccaaagtgctaggattatagccaccgcacctcgtcttgaaatagccttttaaatgttcacctcagcttgcctcacagtggtaaaaataagcatttttttgttttgtaggatcagggagcttccaaggcatttgatacctttttgatgggaagaagggctctgaggagctccaagataccccaacctccaggcccttcattagggggtagttgggtttctgtttggcctttccccctgggccccataggcttaaactacccccacccccacctccgcctcctacctcagctgggagcactgtcttccatggggcttccacttctctcctcaacctggggaagaccacagggcagtgcctgcctcaggacctgccttccccaaaagctggcttcttgctccaaggagagagcattgacccacctgccagagtcttgccttttgcccaaaggagcctggtcttcagggctgcataggatgcaagtgccttctctgcttctcaccagggtctgttcctggtttcccagatgcataaaggaagacatatccctcccctgggcagcaaggctacaatgggagggagggagaacatgggagcatgtgaataaaatggcattaaatactgaaccagggagtccagcctc

SEQ ID NO: 418417 - DNA, 1215 bp, Homo sapiens
agcgcggtgactctgaggatcccaactcagggcgagcctcttggacttggggacaggatctgtgcctcaacccagaccagctttgtagggatatgttccaagaacagagaagagtcttatggggaagggggaggaagggaagtatgaatatttacctctgaccaataatagaggtgccctggtccccaaagaaattgactcccgaattccctccaagccttacccatatagcttttgtttgtttgtttgttttcagacaaggtcttgttctgtccagtgccgtggcgtgaccacagctcatgacaactttgatttccccggcccaagcgagcctctcattcagcctcctgagtggctgggaccacagacgccacacacagctaatttttatgtattcgtttttatttttttgcagagacagggtctccctatgttgcccaagctggtcttgaactcctgggctcaagtgatcctcctgcttcagcctcccaaagtgctaggattatagccaccgcacctcgtcttgaaatagccttttaaatgttcacctcagcttgcctcacagtggtaaaaataagcatttttttgttttgtaggatcagggagcttccaaggcatttgatacctttttgatgggaagaagggctctgaggagctccaagataccccaacctccaggcccttcattagggggtagttgggtttctgtttggcctttccccctgggccccataggcttaaactacccccacccccacctccgcctcctacctcagctgggagcactgtcttccatggggcttccacttctctcctcaacctggggaagaccacagggcagtgcctgcctcaggacctgccttccccaaaagctggcttcttgctccaaggagagagcattgacccacctgccagagtcttgccttttgcccaaaggagcctggtcttcagggctgcataggatgcaagtgccttctctgcttctcaccgtgggtggcactaatttcctccttaaccagaactttgttccagccactgacccattctaactcttccccctctgactctcctgcgcagggtctgttcctggtttcccagatgcataaaggaagacatatccctcccctgggcagcaaggctacaatgggagggagggagaacatgggagcatgtgaataaaatggcattaaatactgaaccagggagtccagcctc

SEQ ID NO: 418418 - DNA, 3333 bp, Homo sapiens
cgcttgtccagggtccccagacttccaagcagattgaggagaggagctccgagagtcaaccctccagcctgtaaggaccttgatatccaaaggacagctgaagaaagtaatgtgcctgcatttttgccacttcattcccacagtgcccgaaatgccagctcctccttggtgttctcctttcaggatttgaattcaaatcccattggcagccctgataccgctgggggaagggtgaggtaggaaaagtcccaccaatatcctaaggggaggtgcgagtggctaccaggatgtgagatgtctgtgggcaaagtccctgcttattccatgaggggctgtgggattaggactgtggctggatgcctcttcctccaacaactccatctcaggatgaagctgaggctttaaaaccctgacaaactgtgggtgactgtctctacttaattcctcctcccaaactcttggtgtctggttttttccctctttctgccctgggcctggagcagctgtccagagacccccaccatgactcatactctcctgttctccctccctctcccctctctattaacctcacccttcccaatccagtggggtagtattaagtcccagtcgcagatggggcaataatgtcccagcacccctccctccacacacccagggcttcctgttctttccaccctcaccctgaagagctgcagggtggtggggggaggcaaaggctcattactttataagattttcattactttataagatttcattttacattttacttaagtgtacttgtttcagagagtggtaaagacagatcctgctcctctcaatccaatcctgtagatttcttcagttacctcaacagggtcatactggctcctgaaatgggcaccattatttaaaagaaatagaggtacagagtcctcaagatttatgggcacctgagtttctgccccgtgccccgctgcaggtttcccaatcccctaaagacattcatggatgggtgagaggagctgacacctcccgctctgtgaccactttctctttggccatggaggaagtcttgctgcccctggctgtgacatctgaccccaggccctttaatcaacaactcccagagcctccagacccaagatgtgttttggaaccccaggacaatcctgaactggcacttgccctggtgtgtgccctttgctgctgctttggaatcatctactgctgcttcagtgagggcagggccaaggacctggggggccattgcccaagactgtcatcctcaaggatgatgccagctttcctccttgctcctgggccatctcacctcctctgccaggggttcctacctctagtgtggcccatgttgctctggctgtattcctaggcccatgttgctcttgccagcttcttgtccatcctccatgcccatgccttccagctttcacctctggcatctatcatttgctcttctcttaactcctacctgaaaaccccattcctaaattattcactatatttcagacttcttcactcttctccaaaaacctgaatcagcttgtgctgattttttcctatctgctatccctaaaaggactagaccttctttctatccttactcccctcaatgtatccatcttacctcttgattttccctcccattccctcacagttcctgaaacagtgcccccccccgaccctaagcgacccctttctgcccctggccttgaggtcccttgacgtgctgctcctgtcttctgctcctctagtgagccattcctctcccttggaattcatcagagtcatccctgtagagcccccttcctgcctctcaattcctcctgcctcacttcccaggctactgctgcttcaagacagtgacgtttctctccggtcagctgtcaggagcgctggtgagcttcctactgtgccacaaggtgcgggtgctggagacacagctgagcctggaaatgagagtgggcatcgccgtggtcatcatgactcctctgcggcgtggtcaccatgttggttcactgtgttgggctcttattgacgggtctcctgctaggcctgaccttgggtgccggagccctgctggcttctgagcctatctaccaaccaccttcagcctgggtgccagctggggggctggtggggctggcgctgctgggagccctgctcacacttcggtggccacgtccattcacagttctgggcacaaccctgctgggttctgcagtgcttgtggcctgtgttgactacttcctggaggggctggcactggggagttggctgggccaacgcctgcagacacttccagccttgccttctctctgctgatatagctgggtcttactggggatctggccagccttgggggcccttggagccctggcccagtggaagctcgtgcctgaggaacatggaggccacgctaatgagttacttccagagtcttcaagagtgccaactgggaccaggaccccagaccacagccccccacaccgtcctggacctggattctgactgtggttccactgtacccctcaccttaatctctggttctaaccagacctgagcctagacttccactttttcccttacccctgtgagggcctgggaacactaggtgggcagggtttgagcccacaggacctgcacacaaacttccccacctcttggacttggggacaggatctgtgcctcaacccagaccagctttgtagggatatgttccaagaacagagaagagtcttatggggaagggggaggaagggaagtatgaatatttacctctgaccaataatagaggtgccctggtccccaaagaaattgactcccgaattccctccaagccttacccatatagcttttgtttgtttgtttgttttcagacaaggtcttgttctgtccagtgccgtggcgtgaccacagctcatgacaactttgatttccccggcccaagcgagcctctcattcagcctcctgagtggctgggaccacagacgccacacacagctaatttttatgtattcgtttttatttttttgcagagacagggtctccctatgttgcccaagctggtcttgaactcctgggctcaagtgatcctcctgcttcagcctcccaaagtgctaggattatagccaccgcacctcgtcttgaaatagccttttaaatgttcacctcagcttgcctcacagtgagggtctgttcctggtttcccagatgcataaaggaagacatatccctcccctgggcagcaaggctacaatgggagggagggagaacatgggagcatgtgaataaaatggcattaaatactgaaccagggagtccagcctc

SEQ ID NO: 418419 - DNA, 2568 bp, Homo sapiens
cgcttgtccagggtccccagacttccaagcagattgaggagaggagctccgagagtcaaccctccagcctgtaaggaccttgatatccaaaggacagctgaagaaagtaatgtgcctgcatttttgccacttcattcccacagtgcccgaaatgccagctcctccttggtgttctcctttcaggatttgaattcaaatcccattggcagccctgataccgctgggggaagggtgaggtaggaaaagtcccaccaatatcctaaggggaggtgcgagtggctaccaggatgtgagatgtctgtgggcaaagtccctgcttattccatgaggggctgtgggattaggactgtggctggatgcctcttcctccaacaactccatctcaggatgaagctgaggctttaaaaccctgacaaactgtgggtgactgtctctacttaattcctcctcccaaactcttggtgtctggttttttccctctttctgccctgggcctggagcagctgtccagagacccccaccatgactcatactctcctgttctccctccctctcccctctctattaacctcacccttcccaatccagtggggtagtattaagtcccagtcgcagatggggcaataatgtcccagcacccctccctccacacacccagggcttcctgttctttccaccctcaccctgaagagctgcagggtggtggggggaggcaaaggctcattactttataagattttcattactttataagatttcattttacattttacttaagtgtacttgtttcagagagtggtaaagacagatcctgctcctctcaatccaatcctgtagatttcttcagttacctcaacagggtcatactggctcctgaaatgggcaccattatttaaaagaaatagaggtacagagtcctcaagatttatgggcacctgagtttctgccccgtgccccgctgcaggtttcccaatcccctaaagacattcatggatgggtgagaggagctgacacctcccgctctgtgaccactttctctttggccatggaggaagtcttgctgcccctggctgtgacatctgaccccaggccctttaatcaacaactcccagagcctccagacccaagatgtgttttggaaccccaggacaatcctgaactggcacttgccctggtgtgtgccctttgctgctgctttggaatcatctactgctgcttcagtgagggcagggccaaggacctggggggccattgcccaagactgtcatcctcaaggatgatgccagctttcctccttgctcctgggccatctcacctcctctgccaggggttcctacctctagtgtggcccatgttgctctggctgtattcctaggcccatgttgctcttgccagcttcttgtccatcctccatgcccatgccttccagctttcacctctggcatctatcatttgctcttctcttaactcctacctgaaaaccccattcctaaattattcactatatttcagacttcttcactcttctccaaaaacctgaatcagcttgtgctgattttttcctatctgctatccctaaaaggactagaccttctttctatccttactcccctcaatgtatccatcttacctcttgattttccctcccattccctcacagttcctgaaacagtgcccccccccgaccctaagcgacccctttctgcccctggccttgaggtcccttgacgtgctgctcctgtcttctgctcctctagtgagccattcctctcccttggaattcatcagagtcatccctgtagagcccccttcctgcctctcaattcctcctgcctcacttcccaggctactgctgcttcaagacagtgacgtttctctccggtcagctgtcaggagcgctggtgagcttcctactgtgccacaaggtgcgggtgctggagacacagctgagcctggaaatgagagtgggcatcgccgtggtcatcatgactcctctgcggcgtggtcaccatgttggttcactgtgttgggctcttattgacgggtctcctgctaggcctgaccttgggtgccggagccctgctggcttctgagcctatctaccaaccaccttcagcctgggtgccagctggggggctggtggggctggcgctgctgggagccctgctcacacttcggtggccacgtccattcacagttctgggcacaaccctgctgggttctgcagtgcttgtggcctgtgttgactacttcctggaggggctggcactggggagttggctgggccaacgcctgcagacacttccagccttgccttctctctgctgatatagctgggtcttactggggatctggccagccttgggggcccttggagccctggcccagtggaagctcgtgcctgaggaacatggaggccacgctaatgagggtctgttcctggtttcccagatgcataaaggaagacatatccctcccctgggcagcaaggctacaatgggagggagggagaacatgggagcatgtgaataaaatggcattaaatactgaaccagggagtccagcctc

SEQ ID NO: 418420 - DNA, 2553 bp, Homo sapiens
  misc_feature (1921)..(1921): n is a, c, g, or t
cagggagacatacaggatttaagaagcccatcatggagaagaccttcaattacagagataaaaagtttttcttgtgaacaagttacactagatggaagataacagactgaggagtgagctgcttctgactcgattaaaaagggagtgagccataactggcggctgctcttgcgccaatgagcctccccaattcctcctgcctcttagaagacaagatgtgtgagggcaacaagaccactatggccagcccccagctgatgcccctggtggtggtcctgagcactatctgcttggtcacagtagggctcaacctgctggtgctgtatgccgtacggagtgagcggaagctccacactgtggggaacctgtacatcgtcagcctctcggtggcggacttgatcgtgggtgccgtcgtcatgcctatgaacatcctctacctgctcatgtccaagtggtcactgggccgtcctctctgcctcttttggctttccatggactatgtggccagcacagcgtccattttcagtgtcttcatcctgtgcattgatcgctaccgctctgtccagcagcccctcaggtaccttaagtatcgtaccaagacccgagcctcggccaccattctgggggcctggtttctctcttttctgtgggttattcccattctaggctggaatcacttcatgcagcagacctcggtgcgccgagaggacaagtgtgagacagacttctatgatgtcacctggttcaaggtcatgactgccatcatcaacttctacctgcccaccttgctcatgctctggttctatgccaagatctacaaggccgtacgacaacactgccagcaccgggagctcatcaataggtccctcccttccttctcagaaattaagctgaggccagagaaccccaagggggatgccaagaaaccagggaaggagtctccctgggaggttctgaaaaggaagccaaaagatgctggtggtggatctgtcttgaagtcaccatcccaaacccccaaggagatgaaatccccagttgtcttcagccaagaggatgatagagaagtagacaaactctactgctttccacttgatattgtgcacatgcaggctgcggcagaggggagtagcagggactatgtagccgtcaaccggagccatggccagctcaagacagatgagcagggcctgaacacacatggggccagcgagatatcagaggatcagatgttaggtgatagccaatccttctctcgaacggactcagataccaccacagagacagcaccaggcaaaggcaaattgaggagtgggtctaacacaggcctggattacatcaagtttacttggaagaggctccgctcgcattcaagacagtatgtatctgggttgcacatgaaccgcgaaaggaaggccgccaaacagttgggttttatcatggcagccttcatcctctgctggatcccttatttcatcttcttcatggtcattgccttctgcaagaactgttgcaatgaacatttgcacatgttcaccatctggctgggcaacagagcaagactctgtctcaaaaaaaaaaaatacaatattttaacaatgtgccctcttaagtgtgcacagatacacatacacggtattcccaagagtggtggcagctcaaaatgatatgtttgagtagacgaacagctgacatggagttcccgtgcacctacggaaggggacgctttgaaggaaccaagtgcatttttatctgtgagttctgttgtgtttgtcaaaaagtcattgtaatctttcatagccatacctggtaagcaaaaactagtaaagacataggaacatgtagttttacttggtgtttatgttgcaatctggttgtgatttatattttaaagcttggtgctaaaccacaatatgtatagcanatggagtgcctgtacaagctgatgttttgtattttgtgttcctctttgcatgatctgtcaaagtgagatatttttacctgcctaaaatatgatgtttaaaagcatactctatgtgatttatttatttctacctttctgagtctcttggactaagaagatgttttgaaatgtaccatcaaatgttaacagagtttgatatgggctttctctttggtttctcatcacatttgtaaatgtcttttcaaaaggatttactttttgtaaaaagcttcattctcactctgctttgcatcccccaaacttcttgttcaaaacggggggagtttaggagactttaatcccggtttcagaagctgcagctggtctgtttccaggtcagaaaccattgttcagaagacctccctgtgagagagttgctcctcagggtccctcaggaccaaagaacactcgaaaagagcacttcacacagacaagtggctaagtgtccattatttaccttgaacaatcaaggcaactagtggagagaactgattgtgagctctgcctctgggtcagagagacctggatttgagtctgacaagaacaagaaatggtcaataaatataaattaccagcgtctaaggaaaaaaaaa

SEQ ID NO: 418421 - DNA, 3960 bp, Homo sapiens
  misc_feature (3328)..(3328): n is a, c, g, or t
cagggagacatacaggatttaagaagcccatcatggagaagaccttcaattacagagataaaaagtttttcttgtgaacaagttacactagatggaagataacagactgaggagtgagctgcttctgactcgattaaaaagggagtgagccataactggcggctgctcttgcgccaatgagcctccccaattcctcctgcctcttagaagacaagatgtgtgagggcaacaagaccactatggccagcccccagctgatgcccctggtggtggtcctgagcactatctgcttggtcacagtagggctcaacctgctggtgctgtatgccgtacggagtgagcggaagctccacactgtggggaacctgtacatcgtcagcctctcggtggcggacttgatcgtgggtgccgtcgtcatgcctatgaacatcctctacctgctcatgtccaagtggtcactgggccgtcctctctgcctcttttggctttccatggactatgtggccagcacagcgtccattttcagtgtcttcatcctgtgcattgatcgctaccgctctgtccagcagcccctcaggtaccttaagtatcgtaccaagacccgagcctcggccaccattctgggggcctggtttctctcttttctgtgggttattcccattctaggctggaatcacttcatgcagcagacctcggtgcgccgagaggacaagtgtgagacagacttctatgatgtcacctggttcaaggtcatgactgccatcatcaacttctacctgcccaccttgctcatgctctggttctatgccaagatctacaaggccgtacgacaacactgccagcaccgggagctcatcaataggtccctcccttccttctcagaaattaagctgaggccagagaaccccaagggggatgccaagaaaccagggaaggagtctccctgggaggttctgaaaaggaagccaaaagatgctggtggtggatctgtcttgaagtcaccatcccaaacccccaaggagatgaaatccccagttgtcttcagccaagaggatgatagagaagtagacaaactctactgctttccacttgatattgtgcacatgcaggctgcggcagaggggagtagcagggactatgtagccgtcaaccggagccatggccagctcaagacagatgagcagggcctgaacacacatggggccagcgagatatcagaggatcagatgttaggtgatagccaatccttctctcgaacggactcagataccaccacagagacagcaccaggcaaaggcaaattgaggagtgggtctaacacaggcctggattacatcaagtttacttggaagaggctccgctcgcattcaagacagtatgtatctgggttgcacatgaaccgcgaaaggaaggccgccaaacagttgggttttatcatggcagccttcatcctctgctggatcccttatttcatcttcttcatggtcattgccttctgcaagaactgttgcaatgaacatttgcacatgttcaccatctggctgggctacatcaactccacactgaaccccctcatctaccccttgtgcaatgagaacttcaagaagacattcaagagaattctgcatattcgctcctaagggaggctctgaggggatgcaacaaaatgatccttatgatgtccaacaaggaaatagaggacgaaggcctgtgtgttgccaggcaggcacctgggctttctggaatccaaaccacagtcttaggggcttggtagtttggaaagttcttaggcaccatagaagaacagcagatggcggtgatcagcagagagattgaactttgaggaggaagcagaatctttgcaagaaagtcagacctgtttcttgtaactgggttcaaaaagaaaaaaataataaaaataaaagagagagagaatcagacctgggtggaactctcctgctcctcaggaactatgggagcctcagactcattgtaattcaagctttccgagtcaagtgattgacaactgaagagacacgtggctagggttccactggagaattgaaaaggactcttgagccctcctggaatggagctgtataactgtgcagagactttatccatgccaatagttgctgtccccttccaggggtcaccttgagaggcatgacagctgttccacaggggctatcccttctcagaaaacttctcttctgagcctctttaacagctttctccagaaccagtgtctgaaccaccctggaaattctgccttattatttcttactcaaacatgtttagagtggatagaaaattatgcagcttgcacacccatcgtctttaaccccaaatttcctttggctattaaaaaagtggtggcaaaaggcatcctcaaaagaaagagaaatgaaatatttttgaatggttgcacgttaaaaattaaaagaaggaatgggggcagaatgccatatttttgagggctgtactaggtttatctcatttaagccccacaacaccccacaggagggtaattttctaactctagtttgcagaggagcaaattgaggttcagcaaggtgagagaggtacccaaggtcacatagctagttatgtgagaaagttagagtacagatcctctggggtttcagcttattgtagcatattttctccgaaaggcaaaaatgtgcccttttggccgggcatggtagctcaagcctataatcccagcatgttgagaggctgaggtgggcagatcatttgaggccaggagttcaagaccagtctggccaatatggagaaaccttgtctctactaaaaacacaaaaattatctgggcatggtggggcatgcctgtagtcccacttacttgggaggccgaggcacgagaatcgcttgaacccgggaggtggaggttgccgtgagccaagatcacgccactgcactccagcctgggcaacagagcaagactctgtctcaaaaaaaaaaaatacaatattttaacaatgtgccctcttaagtgtgcacagatacacatacacggtattcccaagagtggtggcagctcaaaatgatatgtttgagtagacgaacagctgacatggagttcccgtgcacctacggaaggggacgctttgaaggaaccaagtgcatttttatctgtgagttctgttgtgtttgtcaaaaagtcattgtaatctttcatagccatacctggtaagcaaaaactagtaaagacataggaacatgtagttttacttggtgtttatgttgcaatctggttgtgatttatattttaaagcttggtgctaaaccacaatatgtatagcanatggagtgcctgtacaagctgatgttttgtattttgtgttcctctttgcatgatctgtcaaagtgagatatttttacctgcctaaaatatgatgtttaaaagcatactctatgtgatttatttatttctacctttctgagtctcttggactaagaagatgttttgaaatgtaccatcaaatgttaacagagtttgatatgggctttctctttggtttctcatcacatttgtaaatgtcttttcaaaaggatttactttttgtaaaaagcttcattctcactctgctttgcatcccccaaacttcttgttcaaaacggggggagtttaggagactttaatcccggtttcagaagctgcagctggtctgtttccaggtcagaaaccattgttcagaagacctccctgtgagagagttgctcctcagggtccctcaggaccaaagaacactcgaaaagagcacttcacacagacaagtggctaagtgtccattatttaccttgaacaatcaaggcaactagtggagagaactgattgtgagctctgcctctgggtcagagagacctggatttgagtctgacaagaacaagaaatggtcaataaatataaattaccagcgtctaaggaaaaaaaaa

SEQ ID NO: 418422 - DNA, 1036 bp, Homo sapiens
  misc_feature (581)..(581): n is a, c, g, or t
  misc_feature (745)..(745): n is a, c, g, or t
ctaggaattggcctgaaggcccacagttactcagcaatattagagacagctatgcaaagggagaagccaggcgttttaagattcacgggagacagtttgtaggaaggctgtttgctgaataagacaaagatacagacatgcaaagtaaaggatgtgggcctatagggaaggtcaaagaataaggaaagttcacttgagtgagcagaaatggaagagggatttaagcaaatagatgaacaagaattgtctctcctaaaaaaaaaaaacctacacaattatttgatgatttattatgacttttggggtagagaccacgctagtcacaggatctgcaagccctgccacctggatgatctggctccagctggctcactgcctcttctcaccagtctctggatcatgtgactgtaccggctcctagtctttgcatatgctgcttccttggcttgggatcatcacttctatcagctcttctatcccttctatgcgctcttcgttttaaaaatctcatgtgtccttgtactcttccttcataacgcttattacagttgataattttttagtgcttatttgattaatgncctccagagatcaggaccagtagtgttttgctctctcttgcaatctcagtggttggcagggtgcttggcacatagtaaacactaaataaacatttgttgaatgaatcagtgaactacatgctttggtctttactagttggtctcaaggaccaaaaacctacagnaggaagatgtttgttggactaagagattagcaggaaatatgagagctttgaggaaaaaggaaaagatgaagttttttaaagataggattagaaagttctatgtagtcaggagaaagaaaattattcgtggaataattcaacaaatgcacatgaaatgcctactatgtattgagaattagatactggaaatgtggagtggaaagattctgtcttctgtattaaaggagtgtataattgtagtagtttactgaaatggggacagtccttagtggttgtttggagcaggtgtaa

SEQ ID NO: 418423 - DNA, 1009 bp, Homo sapiens
  misc_feature (581)..(581): n is a, c, g, or t
ctaggaattggcctgaaggcccacagttactcagcaatattagagacagctatgcaaagggagaagccaggcgttttaagattcacgggagacagtttgtaggaaggctgtttgctgaataagacaaagatacagacatgcaaagtaaaggatgtgggcctatagggaaggtcaaagaataaggaaagttcacttgagtgagcagaaatggaagagggatttaagcaaatagatgaacaagaattgtctctcctaaaaaaaaaaaacctacacaattatttgatgatttattatgacttttggggtagagaccacgctagtcacaggatctgcaagccctgccacctggatgatctggctccagctggctcactgcctcttctcaccagtctctggatcatgtgactgtaccggctcctagtctttgcatatgctgcttccttggcttgggatcatcacttctatcagctcttctatcccttctatgcgctcttcgttttaaaaatctcatgtgtccttgtactcttccttcataacgcttattacagttgataattttttagtgcttatttgattaatgncctccagagatcaggaccagtagtgttttgctctctcttgcaatctcagtggttggcagggtgcttggcacatagtaaacactaaataaacatttgttgaatgaatcagtgaactacatgctttggtctttactagttggaagatgtttgttggactaagagattagcaggaaatatgagagctttgaggaaaaaggaaaagatgaagttttttaaagataggattagaaagttctatgtagtcaggagaaagaaaattattcgtggaataattcaacaaatgcacatgaaatgcctactatgtattgagaattagatactggaaatgtggagtggaaagattctgtcttctgtattaaaggagtgtataattgtagtagtttactgaaatggggacagtccttagtggttgtttggagcaggtgtaa

SEQ ID NO: 418424 - DNA, 3195 bp, Homo sapiens
acagcatggagtggggttacctgttggaagtgacctcgctgctggccgccttggcgctgctgcagcgctctagcggcgctgcggccgcctcggccaaggagctggcatgccaagagatcaccgtgccgctgtgtaagggcatcggctacaactacacctacatgcccaatcagttcaaccacgacacgcaagacgaggcgggcctggaggtgcaccagttctggccgctggtggagatccagtgctcgcccgatctcaagttcttcctgtgcagcatgtacacgcccatctgcctagaggactacaagaagccgctgccgccctgccgctcggtgtgcgagcgcgccaaggccggctgcgcgccgctcatgcgccagtacggcttcgcctggcccgaccgcatgcgctgcgaccggctgcccgagcaaggcaaccctgacacgctgtgcatggactacaaccgcaccgacctaaccaccgccgcgcccagcccgccgcgccgcctgccgccgccgccgcccggcgagcagccgccttcgggcagcggccacggccgcccgccgggggccaggcccccgcaccgcggaggcggcaggggcggtggcggcggggacgcggcggcgcccccagctcgcggcggcggcggtggcgggaaggcgcggccccctggcggcggcgcggctccctgcgagcccgggtgccagtgccgcgcgcctatggtgagcgtgtccagcgagcgccacccgctctacaaccgcgtcaagacaggccagatcgctaactgcgcgctgccctgccacaacccctttttcagccaggacgagcgcgccttcaccgtcttctggatcggcctgtggtcggtgctctgcttcgtgtccaccttcgccaccgtctccaccttccttatcgacatggagcgcttcaagtacccggagcggcccattatcttcctctcggcctgctacctcttcgtgtcggtgggctacctagtgcgcctggtggcgggccacgagaaggtggcgtgcagcggtggcgcgccgggcgcggggggcgctgggggcgcgggcggcgcggcggcgggcgcgggcgcggcgggcgcgggcgcgggcggcccgggcgggcgcggcgagtacgaggagctgggcgcggtggagcagcacgtgcgctacgagaccaccggccccgcgctgtgcaccgtggtcttcttgctggtctacttcttcggcatggccagctccatctggtgggtgatcttgtcgctcacatggttcctggcggccggtatgaagtggggcaacgaagccatcgccggctactcgcagtacttccacctggccgcgtggcttgtgcccagcgtcaagtccatcgcggtgctggcgctcagctcggtggacggcgacccggtggcgggcatctgctacgtgggcaaccagagcctggacaacctgcgcggcttcgtgctggcgccgctggtcatctacctcttcatcggcaccatgttcctgctggccggcttcgtgtccctgttccgcatccgctcggtcatcaagcaacaggacggccccaccaagacgcacaagctggagaagctgatgatccgcctgggcctgttcaccgtgctctacaccgtgcccgccgcggtggtggtcgcctgcctcttctacgagcagcacaaccgcccgcgctgggaggccacgcacaactgcccgtgcctgcgggacctgcagcccgaccaggcacgcaggcccgactacgccgtcttcatgctcaagtacttcatgtgcctagtggtgggcatcacctcgggcgtgtgggtctggtccggcaagacgctggagtcctggcgctccctgtgcacccgctgctgctgggccagcaagggcgccgcggtgggcgggggcgcgggcgccacggccgcggggggtggcggcgggccggggggcggcggcggcgggggacccggcggcggcggggggccgggcggcggcgggggctccctctacagcgacgtcagcactggcctgacgtggcggtcgggcacggcgagctccgtgtcttatccaaagcagatgccattgtcccaggtctgagcggaggggagggggcgcccaggaggggtggggaggggggcgaggagacccaagtgcagcgaagggacacttgatgggctgaggttcccaccccttcacagtgttgattgctattagcatgataatgaactcttaatggtatccattagctgggacttaaatgactcacttagaacaaagtacctggcattgaagcctcccagacccagccccttttcctccattgatgtgcggggagctcctcccgccacgcgttaatttctgttggctgaggagggtggactctgcggcgtttccagaacccgagatttggagccctccctggctgcacttggctgggtttgcagtcagatacacagatttcacctgggagaacctctttttctccctcgactcttcctacgtaaactcccacccctgacttaccctggaggaggggtgaccgccacctgatgggattgcacggtttgggtattcttaatgaccaggcaaatgccttaagtaaacaaacaagaaatgtcttaattatacaccccacgtaaatacgggtttcttacattagaggatgtatttatataattatttgttaaattgtaaaaaaaaaaagtgtaaaatatgtatatatccaaagatatagtgtgtacatttttttgtaaaaagtttagaggcttacccctgtaagaacagatataagtattctattttgtcaataaaatgacttttgataaatgatttaaccattgccctctcccccgcctcttctgagctgtcacctttaaagtgcttgctaaggacgcatggggaaaatggacattttctggcttgtcattctgtacactgaccttaggcatggagaaaattacttgttaaactctagttcttaagttgttagccaagtaaatatcattgttgaactgaaatcaaaattgagtttttgcaccttccccaaagacggtgtttttcatgggagctcttttctgatccatggataacaactctcactttagtggatgtaaatggaacttctgcaaggcagtaattccccttaggccttgttatttatcctgcatggtatcactaaaggtttcaaaaccctgaaaaaaaa

SEQ ID NO: 418425 - DNA, 2603 bp, Homo sapiens
cccagctccatctgctggctgatcttctcgctcacattggttcctgccgcccggtatgaagtgggcaaacgaagccatcgccggctactcccagtacttccacctgcccgcttgggcttgttgcccagcctcaaagtccatcgcggttctggcgctcagctcggtggacggcgacccggtggcgggcatctgctacgtgggcaaccagagcccgggtgccagtgccgcgcgcctatggtgagcgtgtccagcgagcgccacccgctctacaaccgcgtcaagacaggccagatcgctaactgcgcgctgccctgccacaacccctttttcagccaggacgagcgcgccttcaccgtcttctggatcggcctgtggtcggtgctctgcttcgtgtccaccttcgccaccgtctccaccttccttatcgacatggagcgcttcaagtacccggagcggcccattatcttcctctcggcctgctacctcttcgtgtcggtgggctacctagtgcgcctggtggcgggccacgagaaggtggcgtgcagcggtggcgcgccgggcgcggggggcgctgggggcgcgggcggcgcggcggcgggcgcgggcgcggcgggcgcgggcgcgggcggcccgggcgggcgcggcgagtacgaggagctgggcgcggtggagcagcacgtgcgctacgagaccaccggccccgcgctgtgcaccgtggtcttcttgctggtctacttcttcggcatggccagctccatctggtgggtgatcttgtcgctcacatggttcctggcggccggtatgaagtggggcaacgaagccatcgccggctactcgcagtacttccacctggccgcgtggcttgtgcccagcgtcaagtccatcgcggtgctggcgctcagctcggtggacggcgacccggtggcgggcatctgctacgtgggcaaccagagcctggacaacctgcgcggcttcgtgctggcgccgctggtcatctacctcttcatcggcaccatgttcctgctggccggcttcgtgtccctgttccgcatccgctcggtcatcaagcaacaggacggccccaccaagacgcacaagctggagaagctgatgatccgcctgggcctgttcaccgtgctctacaccgtgcccgccgcggtggtggtcgcctgcctcttctacgagcagcacaaccgcccgcgctgggaggccacgcacaactgcccgtgcctgcgggacctgcagcccgaccaggcacgcaggcccgactacgccgtcttcatgctcaagtacttcatgtgcctagtggtgggcatcacctcgggcgtgtgggtctggtccggcaagacgctggagtcctggcgctccctgtgcacccgctgctgctgggccagcaagggcgccgcggtgggcgggggcgcgggcgccacggccgcggggggtggcggcgggccggggggcggcggcggcgggggacccggcggcggcggggggccgggcggcggcgggggctccctctacagcgacgtcagcactggcctgacgtggcggtcgggcacggcgagctccgtgtcttatccaaagcagatgccattgtcccaggtctgagcggaggggagggggcgcccaggaggggtggggaggggggcgaggagacccaagtgcagcgaagggacacttgatgggctgaggttcccaccccttcacagtgttgattgctattagcatgataatgaactcttaatggtatccattagctgggacttaaatgactcacttagaacaaagtacctggcattgaagcctcccagacccagccccttttcctcttggctgggtttgcagtcagatacacagatttcacctgggagaacctctttttctccctcgactcttcctacgtaaactcccacccctgacttaccctggaggaggggtgaccgccacctgatgggattgcacggtttgggtattcttaatgaccaggcaaatgccttaagtaaacaaacaagaaatgtcttaattatacaccccacgtaaatacgggtttcttacattagaggatgtatttatataattatttgttaaattgtaaaaaaaaaaagtgtaaaatatgtatatatccaaagatatagtgtgtacatttttttgtaaaaagtttagaggcttacccctgtaagaacagatataagtattctattttgtcaataaaatgacttttgataaatgatttaaccattgccctctcccccgcctcttctgagctgtcacctttaaagtgcttgctaaggacgcatggggaaaatggacattttctggcttgtcattctgtacactgaccttaggcatggagaaaattacttgttaaactctagttcttaagttgttagccaagtaaatatcattgttgaactgaaatcaaaattgagtttttgcaccttccccaaagacggtgtttttcatgggagctcttttctgatccatggataacaactctcactttagtggatgtaaatggaacttctgcaaggcagtaattccccttaggccttgttatttatcctgcatggtatcactaaaggtttcaaaaccctgaaaaaaaa

SEQ ID NO: 418426 - DNA, 2713 bp, Homo sapiens
cccagctccatctgctggctgatcttctcgctcacattggttcctgccgcccggtatgaagtgggcaaacgaagccatcgccggctactcccagtacttccacctgcccgcttgggcttgttgcccagcctcaaagtccatcgcggttctggcgctcagctcggtggacggcgacccggtggcgggcatctgctacgtgggcaaccagagcccgggtgccagtgccgcgcgcctatggtgagcgtgtccagcgagcgccacccgctctacaaccgcgtcaagacaggccagatcgctaactgcgcgctgccctgccacaacccctttttcagccaggacgagcgcgccttcaccgtcttctggatcggcctgtggtcggtgctctgcttcgtgtccaccttcgccaccgtctccaccttccttatcgacatggagcgcttcaagtacccggagcggcccattatcttcctctcggcctgctacctcttcgtgtcggtgggctacctagtgcgcctggtggcgggccacgagaaggtggcgtgcagcggtggcgcgccgggcgcggggggcgctgggggcgcgggcggcgcggcggcgggcgcgggcgcggcgggcgcgggcgcgggcggcccgggcgggcgcggcgagtacgaggagctgggcgcggtggagcagcacgtgcgctacgagaccaccggccccgcgctgtgcaccgtggtcttcttgctggtctacttcttcggcatggccagctccatctggtgggtgatcttgtcgctcacatggttcctggcggccggtatgaagtggggcaacgaagccatcgccggctactcgcagtacttccacctggccgcgtggcttgtgcccagcgtcaagtccatcgcggtgctggcgctcagctcggtggacggcgacccggtggcgggcatctgctacgtgggcaaccagagcctggacaacctgcgcggcttcgtgctggcgccgctggtcatctacctcttcatcggcaccatgttcctgctggccggcttcgtgtccctgttccgcatccgctcggtcatcaagcaacaggacggccccaccaagacgcacaagctggagaagctgatgatccgcctgggcctgttcaccgtgctctacaccgtgcccgccgcggtggtggtcgcctgcctcttctacgagcagcacaaccgcccgcgctgggaggccacgcacaactgcccgtgcctgcgggacctgcagcccgaccaggcacgcaggcccgactacgccgtcttcatgctcaagtacttcatgtgcctagtggtgggcatcacctcgggcgtgtgggtctggtccggcaagacgctggagtcctggcgctccctgtgcacccgctgctgctgggccagcaagggcgccgcggtgggcgggggcgcgggcgccacggccgcggggggtggcggcgggccggggggcggcggcggcgggggacccggcggcggcggggggccgggcggcggcgggggctccctctacagcgacgtcagcactggcctgacgtggcggtcgggcacggcgagctccgtgtcttatccaaagcagatgccattgtcccaggtctgagcggaggggagggggcgcccaggaggggtggggaggggggcgaggagacccaagtgcagcgaagggacacttgatgggctgaggttcccaccccttcacagtgttgattgctattagcatgataatgaactcttaatggtatccattagctgggacttaaatgactcacttagaacaaagtacctggcattgaagcctcccagacccagccccttttcctccattgatgtgcggggagctcctcccgccacgcgttaatttctgttggctgaggagggtggactctgcggcgtttccagaacccgagatttggagccctccctggctgcacttggctgggtttgcagtcagatacacagatttcacctgggagaacctctttttctccctcgactcttcctacgtaaactcccacccctgacttaccctggaggaggggtgaccgccacctgatgggattgcacggtttgggtattcttaatgaccaggcaaatgccttaagtaaacaaacaagaaatgtcttaattatacaccccacgtaaatacgggtttcttacattagaggatgtatttatataattatttgttaaattgtaaaaaaaaaaagtgtaaaatatgtatatatccaaagatatagtgtgtacatttttttgtaaaaagtttagaggcttacccctgtaagaacagatataagtattctattttgtcaataaaatgacttttgataaatgatttaaccattgccctctcccccgcctcttctgagctgtcacctttaaagtgcttgctaaggacgcatggggaaaatggacattttctggcttgtcattctgtacactgaccttaggcatggagaaaattacttgttaaactctagttcttaagttgttagccaagtaaatatcattgttgaactgaaatcaaaattgagtttttgcaccttccccaaagacggtgtttttcatgggagctcttttctgatccatggataacaactctcactttagtggatgtaaatggaacttctgcaaggcagtaattccccttaggccttgttatttatcctgcatggtatcactaaaggtttcaaaaccctgaaaaaaaa

SEQ ID NO: 418427 - DNA, 2757 bp, Homo sapiens
  misc_feature (2040)..(2040): n is a, c, g, or t
  misc_feature (2042)..(2042): n is a, c, g, or t
cccagctccatctgctggctgatcttctcgctcacattggttcctgccgcccggtatgaagtgggcaaacgaagccatcgccggctactcccagtacttccacctgcccgcttgggcttgttgcccagcctcaaagtccatcgcggttctggcgctcagctcggtggacggcgacccggtggcgggcatctgctacgtgggcaaccagagcccgggtgccagtgccgcgcgcctatggtgagcgtgtccagcgagcgccacccgctctacaaccgcgtcaagacaggccagatcgctaactgcgcgctgccctgccacaacccctttttcagccaggacgagcgcgccttcaccgtcttctggatcggcctgtggtcggtgctctgcttcgtgtccaccttcgccaccgtctccaccttccttatcgacatggagcgcttcaagtacccggagcggcccattatcttcctctcggcctgctacctcttcgtgtcggtgggctacctagtgcgcctggtggcgggccacgagaaggtggcgtgcagcggtggcgcgccgggcgcggggggcgctgggggcgcgggcggcgcggcggcgggcgcgggcgcggcgggcgcgggcgcgggcggcccgggcgggcgcggcgagtacgaggagctgggcgcggtggagcagcacgtgcgctacgagaccaccggccccgcgctgtgcaccgtggtcttcttgctggtctacttcttcggcatggccagctccatctggtgggtgatcttgtcgctcacatggttcctggcggccggtatgaagtggggcaacgaagccatcgccggctactcgcagtacttccacctggccgcgtggcttgtgcccagcgtcaagtccatcgcggtgctggcgctcagctcggtggacggcgacccggtggcgggcatctgctacgtgggcaaccagagcctggacaacctgcgcggcttcgtgctggcgccgctggtcatctacctcttcatcggcaccatgttcctgctggccggcttcgtgtccctgttccgcatccgctcggtcatcaagcaacaggacggccccaccaagacgcacaagctggagaagctgatgatccgcctgggcctgttcaccgtgctctacaccgtgcccgccgcggtggtggtcgcctgcctcttctacgagcagcacaaccgcccgcgctgggaggccacgcacaactgcccgtgcctgcgggacctgcagcccgaccaggcacgcaggcccgactacgccgtcttcatgctcaagtacttcatgtgcctagtggtgggcatcacctcgggcgtgtgggtctggtccggcaagacgctggagtcctggcgctccctgtgcacccgctgctgctgggccagcaagggcgccgcggtgggcgggggcgcgggcgccacggccgcggggggtggcggcgggccggggggcggcggcggcgggggacccggcggcggcggggggccgggcggcggcgggggctccctctacagcgacgtcagcactggcctgacgtggcggtcgggcacggcgagctccgtgtcttatccaaagcagatgccattgtcccaggtctgagcggaggggagggggcgcccaggaggggtggggaggggggcgaggagacccaagtgcagcgaagggacacttgatgggctgaggttcccaccccttcacagtgttgattgctattagcatgataatgaactcttaatggtatccattagctgggacttaaatgactcacttagaacaaagtacctggcattgaagcctcccagacccagccccttttcctccattgatgtgcggggagctcctcccgccacgcgttaatttctgttggctgaggagggtggactctgcggcgtttccagaacccgagatttggagccctccctggctgcacttggctgggtttgcagtcagatacacagatttcacctgggagaacctctttttctccctcgactctttttttccttttttcccccctaaaaacgggtatanancatcttcccctacgtaaactcccacccctgacttaccctggaggaggggtgaccgccacctgatgggattgcacggtttgggtattcttaatgaccaggcaaatgccttaagtaaacaaacaagaaatgtcttaattatacaccccacgtaaatacgggtttcttacattagaggatgtatttatataattatttgttaaattgtaaaaaaaaaaagtgtaaaatatgtatatatccaaagatatagtgtgtacatttttttgtaaaaagtttagaggcttacccctgtaagaacagatataagtattctattttgtcaataaaatgacttttgataaatgatttaaccattgccctctcccccgcctcttctgagctgtcacctttaaagtgcttgctaaggacgcatggggaaaatggacattttctggcttgtcattctgtacactgaccttaggcatggagaaaattacttgttaaactctagttcttaagttgttagccaagtaaatatcattgttgaactgaaatcaaaattgagtttttgcaccttccccaaagacggtgtttttcatgggagctcttttctgatccatggataacaactctcactttagtggatgtaaatggaacttctgcaaggcagtaattccccttaggccttgttatttatcctgcatggtatcactaaaggtttcaaaaccctgaaaaaaaa

SEQ ID NO: 418428 - DNA, 2751 bp, Homo sapiens
ggccgggctgtccggcgctttagcttagcaggcgacgttgcgggccctgggcgccaggagagcttcccggagtcgaccttcctgctggctgctctgtgaccgcttcccggctctgccctcttggccgaagtgcccgctgccgggcgcgggcctcagacaatacaatggtgggtgaagagaagatgtctctaagaaaccggctgtcaaagtccagggaaaatcctgaggaagatgaagaccagagaaaccctgcaaaggagtccctagagacacctagtaatggtcgaattgacataaaacagttgatagcaaagaagataaagttgacagcagaggcagaggaattgaagccattttttatgaaggaagttggcagtcactttgatgattttgtgaccaatctcattgaaaagtcagcatcattagataatggtgggtgcgctctcacaaccttttctgttcttgaaggagagaaaaacaaccatagagcgaaggatttgagagcacctccagaacaaggaaagatttttattgcaaggcgctctctcttagatgaactgcttgaagtggaccacatcagaacaatatatcacatgtttattgccctcctcattctctttatcctcagcacacttgtagtagattacattgatgaaggaaggctggtgcttgagttcagcctcctgtcttatgcttttggcaaatttcctaccgttgtttggacctggtggatcatgttcctgtctacattttcagttccctattttctgtttcaacattgggccactggctatagcaagagttctcatccgctgatccgttctctcttccatggctttcttttcatgatcttccagattggagttctaggttttggaccaacatatgttgtgttagcatatacactgccaccagcttcccggttcatcattatattcgagcagattcgttttgtaatgaaggcccactcatttgtcagagagaacgtgcctcgggtactaaattcagctaaggagaaatcaagcactgttccaatacctacagtcaaccagtatttgtacttcttatttgctcctacccttatctaccgtgacagctatcccaggaatcccactgtaagatggggttatgtcgctatgaagtttgcacaggtctttggttgctttttctatgtgtactacatctttgaaaggctttgtgcccccttgtttcggaatatcaaacaggagcccttcagcgctcgtgttctggtcctatgtgtatttaactccatcttgccaggtgtgctgattctcttccttactttttttgcctttttgcactgctggctcaatgcctttgctgagatgttacgctttggtgacaggatgttctataaggattggtggaactccacgtcatactccaactattatagaacctggaatgtggtggtccatgactggctatattactatgcttacaaggactttctctggtttttctccaagagattcaaatctgctgccatgttagctgtctttgctgtatctgctgtagtacacgaatatgccttggctgtttgcttgagctttttctatcccgtgctcttcgtgctcttcatgttctttggaatggctttcaacttcattgtcaatgatagtcggaaaaagccgatttggaatgttctgatgtggacttctcttttcttgggcaatggagtcttactctgcttttattctcaagaatggtatgcacgtcagcactgtcctctgaaaaatcccacatttttggattatgtccggccacgttcctggacttgtcgttacgtgttttagaagcttggactttgtttcctccttgtcactgaagattgggtagctccctgatttggagccagctgtttccagttgttactgaagttatctgtgttatttggaccactccaggctttacagatgactcactccattcctaggtcacttgaagccaaactgttggaagttcactggagtcttgtacacttaagcagagcagaactttttttgtggggctgggtggggggagaagaccgactaacagctgaagtaatgacagattgttgctgggtcatatcagctttatcccttggtaattatatctgttttgtttcttgactctgtccaatcagagaataaacatcatagtttcttggccactgaattagccaaaacacttaggaagaaatcacttaaatacctctggcttagaaattttttcatgcacactgttggaatgtatgctaattgaacatgcaattggggaagaaaaaatgtagaatgatttttgctatttctagtagaaagaaaatgtctgttttccaaagataatgttatacatcctattttgtaatttttttgaaaaaagttcaatgttcagttttccttagtttttaccttgttttctctataggtcatgatttctgtgaagcaaaaagatgccttttaccatgaattcttgagtttacatcaataatattgtatattaaggggatcagaagtaggaaggaaaaaataagagatagcagaggaaaaagaaaaacatttcctcttataacttctgaagtaatttgtaaaaaagatttgtagagtcaatcatgtgtttaaattattttatcacaaacttaacatggaagatattcctttttaactttgtggtaacttctttgaagttatttagaaatatcctttggaacaattattttattgtctaataaatattgacttctcttga

SEQ ID NO: 418429 - DNA, 4725 bp, Homo sapiens
  misc_feature (1)..(2): n is a, c, g, or t
  misc_feature (11)..(11): n is a, c, g, or t
  misc_feature (22)..(22): n is a, c, g, or t
  misc_feature (27)..(27): n is a, c, g, or t
  misc_feature (34)..(34): n is a, c, g, or t
  misc_feature (41)..(41): n is a, c, g, or t
  misc_feature (44)..(44): n is a, c, g, or t
  misc_feature (47)..(47): n is a, c, g, or t
  misc_feature (79)..(79): n is a, c, g, or t
  misc_feature (83)..(83): n is a, c, g, or t
  misc_feature (98)..(100): n is a, c, g, or t
  misc_feature (109)..(109): n is a, c, g, or t
nngtagagacngggtttcaccntgttngccaggntggtctnganctnctgacctcgtgatccacccacctcggcctccnaaantgctgggattacagnnntgagccacngcgcccagccctattcatcccttttcaaaagtcagaccctaggaagctggagggaggtggggcatggttttacagtgaatttctgatttcactcagggtgataaatcagactcttggggaagcgggtggtggctctggacagcagcaggaatggggatccagttagcaacaaatccatggacctatgacaggctgaaagccaccccttctccatctttgggaggttgccaatgtctgatttaacactatccaatgaatgatcattgaaagtaaaaaataactatcaactagcagaaaatataaatggtaagcattagcacatatttcacatgtttatatttggctctcagattgacctataaaacaaagtctgggaaattctatatgatcctgaaaaaatgatacgctggtctggatggtagaataagttggagaaatgtttaagccaaaatgcagtcttaccaatgactttttattttattttattaattttcaggatttttggtatacaggtggtttttggttacatggaaaagttctttactggtgatttctgagattttagttcaccccttatcctgagcagtgtacactgttcccaatatgtagccttttatccctcaccccctctaagttcaagaagactatggtcctgcagaaagctttatatgtaattaacatatctttatctttatctttataggcagtagactcatcttttgaaacagattccattaagagtgaatgtgtaccctccctctagcctttattattactgtttttgctattacatgtgttagtgtatgtgaatttaatgcttaaaaatgtatcccattggctactatggcaaaaggttgactcataagagtttagcacgggttaagatctgaaagttttctcccagcctcttatcactggcgcagacttcacaattcatggaagccaccagtgagatgacattgcctcaggcagttactatttttatattctataactcgaggagctcagggtttcggaaatcattaaactttttttgtccttttaaagttggagacagcaattgtagacagccttccagtgggttatctttttgtgtctccttacctgtggagaagcctattagctgggatatgtagttaaatagctatatttatatatatccagggcaccccgaattcgggagagcttcccggagtcgaccttcctgctggctgctctgtgaccgcttcccggctctgccctcttggccgaagtgcccgctgccgggcgcgggcctcagacaatacaatggtgggtgaagagaagatgtctctaagaaaccggctgtcaaagtccagggaaaatcctgaggaagatgaagaccagagaaaccctgcaaaggagtccctagagacacctagtaatggtcgaattgacataaaacagttgatagcaaagaagataaagttgacagcagaggcagaggaattgaagccattttttatgaaggaagttggcagtcactttgatgattttgtgaccaatctcattgaaaagtcagcatcattagataatggtgggtgcgctctcacaaccttttctgttcttgaaggagagaaaaacaaccatagagcgaaggatttgagagcacctccagaacaaggaaagatttttattgcaaggcgctctctcttagatgaactgcttgaagtggaccacatcagaacaatatatcacatgtttattgccctcctcattctctttatcctcagcacacttgtagtagattacattgatgaaggaaggctggtgcttgagttcagcctcctgtcttatgcttttggcaaatttcctaccgttgtttggacctggtggatcatgttcctgtctacattttcagttccctattttctgtttcaacattgggccactggctatagcaagagttctcatccgctgatccgttctctcttccatggctttcttttcatgatcttccagattggagttctaggttttggaccaacatatgttgtgttagcatatacactgccaccagcttcccggttcatcattatattcgagcagattcgttttgtaatgaaggcccactcatttgtcagagagaacgtgcctcgggtactaaattcagctaaggagaaatcaagcactgttccaatacctacagtcaaccagtatttgtacttcttatttgctcctacccttatctaccgtgacagctatcccaggaatcccactgtaagatggggttatgtcgctatgaagtttgcacaggtctttggttgctttttctatgtgtactacatctttgaaaggctttgtgcccccttgtttcggaatatcaaacaggagcccttcagcgctcgtgttctggtcctatgtgtatttaactccatcttgccaggtgtgctgattctcttccttactttttttgcctttttgcactgctggctcaatgcctttgctgagatgttacgctttggtgacaggatgttctataaggattggtggaactccacgtcatactccaactattatagaacctggaatgtggtggtccatgactggctatattactatgcttacaaggactttctctggtttttctccaagagattcaaatctgctgccatgttagctgtctttgctgtatctgctgtagtacacgaatatgccttggctgtttgcttgagctttttctatcccgtgctcttcgtgctcttcatgttctttggaatggctttcaacttcattgtcaatgatagtcggaaaaagccgatttggaatgttctgatgtggacttctcttttcttgggcaatggagtcttactctgcttttattctcaagaatggtatgcacgtcagcactgtcctctgaaaaatcccacatttttggattatgtccggccacgttcctggacttgtcgttacgtgttttagaagcttggactttgtttcctccttgtcactgaagattgggtagctccctgatttggagccagctgtttccagttgttactgaagttatctgtgttatttggaccactccaggctttacagatgactcactccattcctaggtcacttgaagccaaactgttggaagttcactggagtcttgtacacttaagcagagcagaactttttttgtggggctgggtggggggagaagaccgactaacagctgaagtaatgacagattgttgctgggtcatatcagctttatcccttggtaattatatctgttttgtttcttgactctgtccaatcagagaataaacatcatagtttcttggccactgaattagccaaaacacttaggaagaaatcacttaaatacctctggcttagaaattttttcatgcacactgttggaatgtatgctaattgaacatgcaattggggaagaaaaaatgtagaatgatttttgctatttctagtagaaagaaaatgtctgttttccaaagataatgttatacatcctattttgtaatttttttgaaaaaagttcaatgttcagttttccttagtttttaccttgttttctctataggtcatgatttctgtgaagcaaaaagatgccttttaccatgaattcttgagtttacatcaataatattgtatattaaggggatcagaagtaggaaggaaaaaataagagatagcagaggaaaaagaaaaacatttcctcttataacttctgaagtaatttgtaaaaaagatttgtagagtcaatcatgtgtttaaattattttatcacaaacttaacatggaagatattcctttttaactttgtggtaacttctttgaagttatttagaaatatcctttggaacaattattttattgtctaataaatattgacttctcttgaattattttgcagactagtgagtctgtaacataagtattaatcacctccactcatattaaagtgatcattaagaatccagaagctggcttctgcatttgctcagttatacttttaatggtagtatgtttttaggtggaataaattaatatgtgattggtttcaaggaaatgtactctattatgtaatacttccattttataagatgcccatttctaatacaatgtgtgtaggaattatttgtatgtatgaggtatgattgtaaagattgagcattggaaggggtatcagagaccatgtagttcaactttccactcaaagtaagatttatgaattatttaaatgatagttgttacttggaacagccacttgagaggctctcttggtattgtttggaattgttttaaagtcagtttgagtctcacaagaaggtaagtagagtttcttaatagtcacaacttaatttgaaccacaagtatccagcttaatcacgtatcttactcacgataccactggtccagatgagtttaggtaattttcaaacattaaatccaacttcaacggaaacaaatacactcaagggaagttatttttaaaaaggtactctgcatgttcccgcagtaatgttctgcacaacagtattgtaattgtaatggaatcataacctgctaactagtttgctttaatatggcttgtaattcttgacatttttcttaaaattaaaacgaatttttattttgaattt

SEQ ID NO: 418430 - DNA, 2476 bp, Homo sapiens
ggccgggctgtccggcgctttagcttagcaggcgacgttgcgggccctgggcgccaggagagcttcccggagtcgaccttcctgctggctgctctgtgaccgcttcccggctctgccctcttggccgaagtgcccgctgccgggcgcgggcctcagacaatacaatggtgggtgaagagaagatgtctctaagaaaccggctgtcaaagtccagggaaaatcctgaggaagatgaagaccagagaaaccctgcaaaggagtccctagagacacctagtaatggtcgaattgacataaaacagttgatagcaaagaagataaagttgacagcagaggcagaggaattgaagccattttttatgaaggaagttggcagtcactttgatgattttgtgaccaatctcattgaaaagtcagcatcattagataatggtgggtgcgctctcacaaccttttctgttcttgaaggagagaaaaacaaccatagagcgaaggatttgagagcacctccagaacaaggaaagatttttattgcaaggcgctctctcttagatgaactgcttgaagtggaccacatcagaacaatatatcacatgtttattgccctcctcattctctttatcctcagcacacttgtagtagattacattgatgaaggaaggctggtgcttgagttcagcctcctgtcttatgcttttggcaaatttcctaccgttgtttggacctggtggatcatgttcctgtctacattttcagttccctattttctgtttcaacattgggccactggctatagcaagagttctcatccgctgatccgttctctcttccatggctttcttttcatgatcttccagattggagttctaggttttggaccaacatatgttgtgttagcatatacactgccaccagcttcccggttcatcattatattcgagcagattcgttttgtaatgaaggcccactcatttgtcagagagaacgtgcctcgggtactaaattcagctaaggagaaatcaagcactgttccaatacctacagtcaaccagtatttgtacttcttatttgctcctacccttatctaccgtgacagctatcccaggaatcccactgtaagatggggttatgtcgctatgaagtttgcacaggtctttggttgctttttctatgtgtactacatctttgaaaggctttgtgcccccttgtttcggaatatcaaacaggagcccttcagcgctcgtgttctggtcctatgtgtatttaactccatcttgccaggtgtgctgattctcttccttactttttttgcctttttgcactgctggctcaatgcctttgctgagatgttacgctttggtgacaggatgttctataaggattggtggaactccacgtcatactccaactattatagaacctggaatgtggtggtccatgactggctatattactatgcttacaaggactttctctggtttttctccaagagattcaaatctgctgccatgttagctgtctttgctgtatctgctgtagtacacgaatatgccttggctgtttgcttgagctttttctatcccgtgctcttcgtgctcttcatgttctttggaatggctttcaacttcattgtcaatgatagtcggaaaaagccgatttggaatgttctgatgtggacttctcttttcttgggcaatggagtcttactctgcttttattctcaagaatggtatgcacgtcagcactgtcctctgaaaaatcccacatttttggattatgtccggccacgttcctggacttgtcgttacgtgttttagaagcttggactttgtttcctccttgtcactgaagattgggtagctccctgatttggagccagctgtttccagttgttactgaagttatctgtgttatttggaccactccaggctttacagatgactcactccattcctaggtcacttgaagccaaactgttggaagttcactggagtcttgtacacttaagcagagcagaactttttttgtggggctgggtggggggagaagaccgactaacagctgaagtaatgacagattgttgctgggtcatatcagctttatcccttggtaattatatctgttttgtttcttgactctgtccaatcagagaataaacatcatagtttcttggccactgaattagccaaaaaaaaaaaaaaaaaaaaaaaaaaaaaaaaaaaaaaaaaaaaaaaaaaaaaaaaaaaaaaaaaaaaaaaaaaaaataaaaaaaaataaaaaaaaatataaaaaaaaaataatataaaaaaaaataaaaaaaaaaacttgggggggggccctggacccaatttccccttatggggggcttttataaaataatggggcgatatttaaaaaattttttatggggaaaactcttggttccccacattaatgcccttggaacaaatctcctttctccaattggggtaaaaac

SEQ ID NO: 418431 - DNA, 323 bp, Homo sapiens
aaggagtccctagagacacctagtaatggtgaggcttaattttttttttttaggtgaattagtgaaatagagaacaaatacagtgttatagaataagtattgccatctctttaattctttattgtaaatgggtattgatagagttttatatgtctagtaacaaagcaattagacaataagtcctttctcgttaattaatttggtggacatctattggtatctgctgtgttttagagaccattcattcagtcacgtaacctaccaataattgctgaggtcccccgctggatgctggggctatagcagtgatcagtacggatttg

SEQ ID NO: 418432 - DNA, 592 bp, Homo sapiens
gattacaagcgtgagccactgtgcccggccatgttacgggttttaagcagcaggaaaacaggttccaagagtaagctcttctaaaaatatcatttggtaaagggttaggaaaagtgatggtagaaactaggcttgagtaatctccctgaaggattatagcagtcttctatactagtgttaaatggaatacatatgcgaacattactgtaagggtcacatctgtactttcttttggagagaaaaaaatcgccttccatcttattaagccatcgttattataattctgtctctgttatgttccaggtctttggttgctttttctatgtgtactacatctttgaaaggctttgtgcccccttgtttcggaatatcaaacaggagcccttcagcgctcgtgttctggtcctatgtgtatttaactccatcttgccaggtaacatgggtacttgttaatttggtcatgcataaattcacgaggtaaatagaaagctattgcctatgagcacctttgctttgcctactttttcatctaaacttctatacatctatgcccatcttgacctcttttgcatctactttataaatgaagtat

SEQ ID NO: 418433 - DNA, 5496 bp, Homo sapiens
  misc_feature (1)..(2): n is a, c, g, or t
  misc_feature (11)..(11): n is a, c, g, or t
  misc_feature (22)..(22): n is a, c, g, or t
  misc_feature (27)..(27): n is a, c, g, or t
  misc_feature (34)..(34): n is a, c, g, or t
  misc_feature (41)..(41): n is a, c, g, or t
  misc_feature (44)..(44): n is a, c, g, or t
  misc_feature (47)..(47): n is a, c, g, or t
  misc_feature (79)..(79): n is a, c, g, or t
  misc_feature (83)..(83): n is a, c, g, or t
  misc_feature (98)..(100): n is a, c, g, or t
  misc_feature (109)..(109): n is a, c, g, or t
nngtagagacngggtttcaccntgttngccaggntggtctnganctnctgacctcgtgatccacccacctcggcctccnaaantgctgggattacagnnntgagccacngcgcccagccctattcatcccttttcaaaagtcagaccctaggaagctggagggaggtggggcatggttttacagtgaatttctgatttcactcagggtgataaatcagactcttggggaagcgggtggtggctctggacagcagcaggaatggggatccagttagcaacaaatccatggacctatgacaggctgaaagccaccccttctccatctttgggaggttgccaatgtctgatttaacactatccaatgaatgatcattgaaagtaaaaaataactatcaactagcagaaaatataaatggtaagcattagcacatatttcacatgtttatatttggctctcagattgacctataaaacaaagtctgggaaattctatatgatcctgaaaaaatgatacgctggtctggatggtagaataagttggagaaatgtttaagccaaaatgcagtcttaccaatgactttttattttattttattaattttcaggatttttggtatacaggtggtttttggttacatggaaaagttctttactggtgatttctgagattttagttcaccccttatcctgagcagtgtacactgttcccaatatgtagccttttatccctcaccccctctaagttcaagaagactatggtcctgcagaaagctttatatgtaattaacatatctttatctttatctttataggcagtagactcatcttttgaaacagattccattaagagtgaatgtgtaccctccctctagcctttattattactgtttttgctattacatgtgttagtgtatgtgaatttaatgcttaaaaatgtatcccattggctactatggcaaaaggttgactcataagagtttagcacgggttaagatctgaaagttttctcccagcctcttatcactggcgcagacttcacaattcatggaagccaccagtgagatgacattgcctcaggcagttactatttttatattctataactcgaggagctcagggtttcggaaatcattaaactttttttgtccttttaaagttggagacagcaattgtagacagccttccagtgggttatctttttgtgtctccttacctgtggagaagcctattagctgggatatgtagttaaatagctatatttatatatatccagggcaccccgaattcgggagagcttcccggagtcgaccttcctgctggctgctctgtgaccgcttcccggctctgccctcttggccgaagtgcccgctgccgggcgcgggcctcagacaatacaatggtgggtgaagagaagatgtctctaagaaaccggctgtcaaagtccagggaaaatcctgaggaagatgaagaccagagaaaccctgcaaaggagtccctagagacacctagtaatggtcgaattgacataaaacagttgatagcaaagaagataaagttgacagcagaggcagaggaattgaagccattttttatgaaggaagttggcagtcactttgatgattttgtgaccaatctcattgaaaagtcagcatcattagataatggtgggtgcgctctcacaaccttttctgttcttgaaggagagaaaaacaaccatagagcgaaggatttgagagcacctccagaacaaggaaagatttttattgcaaggcgctctctcttagatgaactgcttgaagtggaccacatcagaacaatatatcacatgtttattgccctcctcattctctttatcctcagcacacttgtagtagattacattgatgaaggaaggctggtgcttgagttcagcctcctgtcttatgcttttggcaaatttcctaccgttgtttggacctggtggatcatgttcctgtctacattttcagttccctattttctgtttcaacattgggccactggctatagcaagagttctcatccgctgatccgttctctcttccatggctttcttttcatgatcttccagattggagttctaggttttggaccaacatatgttgtgttagcatatacactgccaccagcttcccggttcatcattatattcgagcagattcgttttgtaatgaaggcccactcatttgtcagagagaacgtgcctcgggtactaaattcagctaaggagaaatcaagcactgttccaatacctacagtcaaccagtatttgtacttcttatttgctcctacccttatctaccgtgacagctatcccaggaatcccactgtaagatggggttatgtcgctatgaagtttgcacaggtctttggttgctttttctatgtgtactacatctttgaaaggctttgtgcccccttgtttcggaatatcaaacaggagcccttcagcgctcgtgttctggtcctatgtgtatttaactccatcttgccaggtgtgctgattctcttccttactttttttgcctttttgcactgctggctcaatgcctttgctgagatgttacgctttggtgacaggatgttctataaggattggtggaactccacgtcatactccaactattatagaacctggaatgtggtggtccatgactggctatattactatgcttacaaggactttctctggtttttctccaagagattcaaatctgctgccatgttagctgtctttgctgtatctgctgtagtacacgaatatgccttggctgtttgcttgagctttttctatcccgtgctcttcgtgctcttcatgttctttggaatggctttcaacttcattgtcaatgatagtcggaaaaagccgatttggaatgttctgatgtggacttctcttttcttgggcaatggagtcttactctgcttttattctcaagaatggtatgcacgtcagcactgtcctctgaaaaatcccacatttttggattatgtccggccacgttcctggacttgtcgttacgtgttttagaagcttggactttgtttcctccttgtcactgaagattgggtagctccctgatttggagccagctgtttccagttgttactgaagttatctgtgttatttggaccactccaggctttacagatgactcactccattcctaggtcacttgaagccaaactgttggaagttcactggagtcttgtacacttaagcagagcagaactttttttgtggggctgggtggggggagaagaccgactaacagctgaagtaatgacagattgttgctgggtcatatcagctttatcccttggtaattatatctgttttgtttcttgactctgtccaatcagagaataaacatcatagtttcttggccactgaattagccaaaacacttaggaagaaatcacttaaatacctctggcttagaaattttttcatgcacactgttggaatgtatgctaattgaacatgcaattggggaagaaaaaatgtagaatgatttttgctatttctagtagaaagaaaatgtctgttttccaaagataatgttatacatcctattttgtaatttttttgaaaaaagttcaatgttcagttttccttagtttttaccttgttttctctataggtcatgatttctgtgaagcaaaaagatgccttttaccatgaattcttgagtttacatcaataatattgtatattaaggggatcagaagtaggaaggaaaaaataagagatagcagaggaaaaagaaaaacatttcctcttataacttctgaagtaatttgtaaaaaagatttgtagagtcaatcatgtgtttaaattattttatcacaaacttaacatggaagatattcctttttaactttgtggtaacttctttgaagttatttagaaatatcctttggaacaattattttattgtctaataaatattgacttctcttgaattattttgcagactagtgagtctgtaacataagtattaatcacctccactcatattaaagtgatcattaagaatccagaagctggcttctgcatttgctcagttatacttttaatggtagtatgtttttaggtggaataaattaatatgtgattggtttcaaggaaatgtactctattatgtaatacttccattttataagatgcccatttctaatacaatgtgtgtaggaattatttgtatgtatgaggtatgattgtaaagattgagcattggaaggggtatcagagaccatgtagttcaactttccactcaaagtaagatttatgaattatttaaatgatagttgttacttggaacagccacttgagaggctctcttggtattgtttggaattgttttaaagtcagtttgagtctcacaagaaggtaagtagagtttcttaatagtcacaacttaatttgaaccacaagtatccagcttaatcacgtatcttactcacgataccactggtccagatgagtttaggtaattttcaaacattaaatccaacttcaacggaaacaaatacactcaagggaagttatttttaaaaaggtactctgcatgttcccgcagtaatgttctgcacaacagtattgtaattgtaatggaatcataacctgctaactagtttgctttaatatggcttgtaattcttgacatttttcttaaaattaaaacgaatttttattttgaatttataactgcattttaaatatattggggacagattgcgctgagacctggttatgagcaagccaatcttttgaatctagagaatggaattcttaggtttatatttctgttaagaaatactataaatatgactcttatgagaagactttgttgctctgtagtgtttctgaatactgtatttgttggattgatcaaggctatttttcaaaaagctctctgcttcctgtttgtttgtttgtttgtttttgagacagagtcttgctctgtcgccggggctggagtgcaatggcgtgaactcagctcactgcaacctctgcctccctggttcaagctattctcctgcctcagcctcctgagtagctgggattacagggccacgcctggctaatttttgtatttttagtagagatggggtttcaccctgttggtcaggctggtctcaaactcctgaccttgtgatctgcccacctcagcctcccaaagtgctgggaagacaggcgttagccaccgtgcccggcctctgtttcctgttattagtgattttcctgcccaagattgcaacaacaaatatgtagaactacagactgtttagaatgctgagactgttctaagaaactttcaaaaacagtagcacttcaaggaatggtcactttctatgaaagaaactggtttgatagccataatcttattgctagctgcttttagcaaaagtcttttcttgaaaccaccacctatactctttaaacaaataaaaactaaaatctcttgctaatgt

SEQ ID NO: 418434 - DNA, 973 bp, Homo sapiens
ggccgggctgtccggcgctttagcttagcaggcgacgttgcgggccctgggcgccaggagagcttcccggagtcgaccttcctgctggctgctctgtgaccgcttcccggctctgccctcttggccgaagtgcccgctgccgggcgcgggcctcagacaatacaatggtgggtgaagagaagatgtctctaagaaaccggctgtcaaagtccagggaaaatcctgaggaagatgaagaccagagaaaccctgcaaaggagtccctagagacacctagtaatggtcgaattgacataaaacagttgatagcaaagaagataaagttgacagcagaggcagaggaattgaagccattttttatgaaggaagttggcagtcactttgatgattttgtgaccaatctcattgaaaagtcagcatcattagataatggtgggtgcgctctcacaaccttttctgttcttgaaggagagaaaaacaaccatagagcgaaggatttgagagcacctccagaacaaggaaagatttttattgcaaggcgctctctcttagatgaactgcttgaagtggaccacatcagaacaatatatcacatgtttattgccctcctcattctctttatcctcagcacacttgtagtagattacattgatgaaggaaggctggtgcttgagttcagttatctgtgctagtgacaatgaatgtcagaactgccaaaggataccagtgatcatacgatgatttgcatgatcgggtctatttcacccaatagtcacttgtgtgtcccccgaaattgggatgggtgagcacccttgctgtggtgtaaacttcctgttatttaatctcccccacggtttcatttttctcttctgttaatacttagaactttctaagaaactccatgaaatgaggaaatactgtttctaataatatgaggtaagaagtcacatgtcttccaagtggcagctcatgg

SEQ ID NO: 418435 - DNA, 622 bp, Homo sapiens
agcgaggcgttggagagctccgaggccgggcccgatggcgtccctgtctgcagcgccgcgtctgtcgacttgtccacgcccgtgttttcctgccgtaagaggttgcgcctgaacttggctcgggcgttctggaaccagacctgcgggggacgacagggaagggctggtgagcggaaggcaggcagagcattcccccgactgcttcactcagagctctgctgcctctggggacgctgatctgtgttttgccaagaggatccaaaaagtcagagacggggtcttgcaatgttgcccaggctggtctcaaactccaggcttcaagtgatccctcctgcctcagcctcctaaagcgttgggattacagatgtggttccagagctgagctgtactcccgaatatcacagccacgagccacgtatggctgctgagcacttaaaatggcattagcccaaattcaaccagtctgcaggtgaaaacacacaacctatctgaaggctgaatatgaaaaaaaaagcaggtagaatatctcaataatttttatattgattacatgtcgaaatgattaatagtttggctatactgagttaagcaaaatacattattaaaattaattttactttta

SEQ ID NO: 418436 - DNA, 531 bp, Homo sapiens
ctcagcctcctgggtagctggggctatagataggccaccggcccccgcctaaactttttaaagttaatttttttgtaagagacggggtcttgcaatgttgcccaggctggtctcaaactccaggcttcaagtgatccctcctgcctcagcctcctaaagcgttgggattacagatgtgagccactgcaccctggcccaatattttgctcttaataaaataaaacaaaaatttcactctatctaatgggctacggctgggcttctctttctgataggtggttccagagctgagctgtactcccgaatatcacagccacgagccacgtatggctgctgagcacttaaaatggcattagcccaaattcaaccagtctgcaggtgaaaacacacaacctatctgaaggctgaatatgaaaaaaaaagcaggtagaatatctcaataatttttatattgattacatgtcgaaatgattaatagtttggctatactgagttaagcaaaatacattattaaaattaattttactttta

SEQ ID NO: 418437 - DNA, 1366 bp, Homo sapiens
  misc_feature (485)..(485): n is a, c, g, or t
  misc_feature (512)..(512): n is a, c, g, or t
  misc_feature (524)..(524): n is a, c, g, or t
gatagattcacttatgttatgaatctatattgtctgaaacttttttcttaaaaaaatgattttcttaggcttcttcactctctctgactttactagctctagtaattgacgtacttttcataacagttttaagtaatcaaacagttatatcacttcagaagtgaaaaactctttgtcttcaaagacatctctttgataatagacttaccagttgctgatcctgaacaactggctaggcctgttcatttgttttttgtttgtttgtgagatggagttgctcaggttggagagcagtggcacaatctcggctcactgccgcctccatctaccaggttcgggcaattctcatgcctcagcctcccgagtagcagggattgcaggcgcatgcaaccgtgcctgggctaatttttgtatttttagcagagatggggtttcaccgtgttggccaggctggtcttgaactcctgacttcaggtaatccgccngccctcagcctcccaaagtgctgggantcacacctgttncatttgttaaagcaatttgctaaaaactgacgaggtttattccattgctatacagcagtgtttgattcagataaatatccttaatagagtcacatttccttcatgtcatgcctttaaggttgttccccaaatagtcataaagaacagaggatactcaggtatgtaagatcttagagccaagagagagtatggaaatggatgttcagctggtatttactgtcataagtgggattaggaattgtgggtttagggaattaaaaacaaccaacaattctacttggcttttaatctcttcagttatgagtgaagcatatttgcttgtaagggaagagataaggtaaaggaaatgaaataaagaaaaaaaatttggtggttggtatggggaattcaagaaagataaaattttgtagaaataaaaggcttgatgagctggattagaaacccagcacagttggaaaaattgacagttttcaatcaccaggcatatctttaaagtgaataaactgagattcaattaggacagggaaggaagtgaacaggagagataatggtatagcaaaagggagtccaaggagaagaagtctcagtgggagttttggaaaaccaagagaggcagcaagataccggaaagagcgtagacggtacaatgaacggtaagcaaagcataatttcccaaaatagtcttgatcagtatttcctgtaaaatgtttgatttaagcattttgtccatctctactaaaaatacaaaaaattagccggatgtggtggtgtgtgtctgtagtcctagctgctcggagggctgaggcaggagaatcacctgaacccgggaggcagaggttgca

SEQ ID NO: 418438 - DNA, 490 bp, Homo sapiens
gtgggagcgcccgctgattttgtttcttttttattctatcactgtggtaaactgctcctttatttcctgaattgtttttctgatttctttgtattgttttttgaaattctcttgtatctcattgggcttctttagtatcataattttgaattctttttctgggatttcttttttttttttttttttgaaacagagtgagatcctgtctcaaaaaaaaaagaaattaatgaagatattttttattgctattatgataaaatgcctaagatatattaaatgaaacaaaggtagatgcagtgaataatatactactgtttgtgtaaatagaagctatatgtatgtatgcatatatgtatatacttgtgtgtgtgtgtgtgtgtataattgcttttattagattaagtctttataaaaggatgcataagaaaccaaaacattggtgatccttagggagaactaaggtagctggaggaaggagaggggggctttt

SEQ ID NO: 418439 - DNA, 4786 bp, Homo sapiens
caactagaggagctcgccccctgcctgtgacagcttagggtcgcctactttttgtggacacactgccgtccacggagtgcagaggccgcctgcagttttcttgcgtccctgtgagacgcacggtggcgcaattcccgagcgtgccaatcccgggctggctggagggcgggctcttcaaatttgaattgcggaagtgttttgtgtgttagagaacgtcgcggaggaggtaagcgtcgcttggcgcctggccgccgcgggcaggatacaccgtgggcctgaggcgcgagcccggcggcgtgcggccctctctccgcgcggagccgagccggaactgcggcagtctctccctgccaggctcttcatccaaggtttctgtggatcccttctgaagttctatctgaaaattgcgcttaagtgaattttctgttagaagaacttggttgctactttcttgtcaagatgattgcaacacctttgaaacattcaagaatttacttacctccagaggcatcttctcaaaggagaaatctacccatggatgcaatcttttttgacagcattccttcaggcacacttactcctgtaaaagatttggtgaaatatcagaactcctccttaaaattgaatgaccataaaaagaatcagttcctaaaaatgacaacttttaacaataaaaatatatttcaatcaactatgctaacagaggctactacctctaacagttctcttgatatcagtgctataaagcccaacaaggatggattaaaaaataaagcaaactatgaatcaccaggaaaaatatttctaagaatgaaagaaaaagtactgcgtgacaagcaagaacagccatcaagaaacagtagtttgttggaaccacagaaaagtggaaataatgaaaccttcactcctaacagagttgaaaaaaaaaaattgcagcatacctacctatgtgaagaaaaggaaaacaacaaatcattccagtcagatgacagttcactaagagcctcagtccaaggagttcctctagaatcatcaaataatgatattttcctcccggtcaaacaaaagattcagtgccagcaggaaaagaaagcaccactgcacaatttaacttacgaacttccaactctgaaccaagaacaggaaaattttttggctgtagaagcccgaaacaagacattaactagagctcagttggctaaacaaatttttcactcaaaggagagtatagttgcaaccactaaatccaaaaaggacacgtttgttttagaaagcgttgattctgctgatgaacaatttcaaaatactaatgctgagactctcagtactaattgtattcctattaaaaatggcagcctgttaatggtttctgatagtgagaggacaacagaagggacttcgcaacagaaagttaaggaaggaaatggaaaaacagtgcctggagagacaggtcttccaggttccatgaaagatacatgtaaaattgtacttgcaacaccaagacttcatataacaatacctcggaggtcaaaaagaaatatttcaaagctttctcctccaagaatatttcaaactgttacaaatggacttaaaaaaaatcaggtagttcagctacaggaatggatgattaaaagcatcaataataatactgctatatgtgtagaaggaaaattgatagacgtcactaacatatattggcacagtaatgtaattatagagcggattgagcacaacaaacttaggactatatcaggcaacgtttatatattaaaaggcatgatagaccaaatttccatgaaagaagcaggatatccaaattatctcataaggaaatttatgtttggatttccagaaaattggaaagagcacattgataattttctggaacaattaagggctggtgaaaagaacagggaaaagaccaaacaaaaacagaaaactggaagatctgtccgtgacataaggaaatcaatgaaaaatgatgcacgagaaaaccaaacagatactgctcaaagagccaccaccacttacgattttgattgtgataatttggaactgaagagtaataagcacagtgagtcaccaggagctacagaattaaacatgtgccacagtaattgccaaaataaaccaacattaaggttcccagatgaccaagtaaataatactattcaaaatggaggaggagatgacttatctaatcaggaattaattggaaaaaaagaatataaaatgtcttcaaagaaactaaaaattggtgaaagaacaaatgaaaggataataaaaagtcagaagcaagagacaactgaagaattggatgtatccattgatattctaacctcaagggaacagtttttctcagatgaagaaagaaaatacatggccatcaatcagaagaaagcttatattttagtaacaccacttaaatctagaaaagtgatagagcaaagatgcatgaggtataatctgtccgctggcaccatcaaagcagtaacagattttgtaataccagagtgtcaaaaaaaaagtcccatcagcaagtccatggggactttagaaaatacatttgaaggtcataaaagtaaaaacaaggaagattgcgatgaacgtgacttacttactgtcaaccggaaaataaaaatatctaaccttgaaaaggaacaaatgctcacctctgactttaagaaaaataccagactattaccaaaattgaagaaaatagaaaatcaggtagctatgtcattttataagcatcagtcctcaccagatttgtcaagtgaagaaagtgaaacagaaaaggaaattaaaaggaaagctgaagttaagaaaaccaaagcaggaaacaccaaagaagcagtggttcacctgagaaagagcacaagaaacacaagtaatattccagtgattttggaacctgaaactgaagaaagtgaaaatgaattttatatcaaacaaaagaaagctagaccttccgtcaaagaaactcttcagaagtctggtgttaggaaagagtttccaattactgaggcagtaggatctgataagacaaataggcatcccttagaatgcttacctggtttaattcaggataaggaatggaatgagaaggagttacagaaacttcattgtgcttttgcatctcttccaaagcacaaacctggtttctggtcagaggtagctgcggctgtaggttctcgatctcctgaagaatgccagaggaaatacatggaaaatcccagaggaaaaggatcccagaaacatgtcactaagaagaagccagccaattccaaaggccaaaatggcaagagaggtgatgctgatcagaaacaaactattaagataactgccaaagtgggaactcttaaaaggaagcaacagatgagggaatttctggaacagttgccaaaagatgaccatgatgattttttcagtacaacacctttacagcatcaaagaatactgttgccaagtttccaggacagtgaagatgatgatgatattctgccaaatatggacaaaaatccaacaactccatcatcagttatctttccattggtaaaaactcctcaatgtcagcatgtcagtcctggcatgctaggttctataaataggaatgactgtgataaatatgtttttcgtatgcaaaaatatcataaaagtaatggtggtattgtctggggcaacatcaagaaaaaattagttgaaactgatttctcaactccaacaccaagaaggaaaaccccatttaacacagacttaggagaaaactctggtattggaaaacttttcactaatgctgtggaatctttagatgaagaagagaaagattattatttttcgaactctgattctgcatagtaaaatgagaaaatatgattcctgggatttttaccataaagcagacagtgtttgtattttcaactggagtacatgtattttctttgtaaagtagcttcctatgaaaatgtggacttttttgaaggtttcatatgtttgtgttcaaagtaaaatatcctcattgctgcagcttactaaaaatgtaaagaaaattgtttttgctcgtgtagatatctgtaaatttgtttttgcatattaaaatatatatagataattttttaataagcatccaagtctgtttactttaagaaaaccatttcccaaacagattttttttttatttcaagaaaattttgctaccatttaagtaagagaaggtgagaaggatgacagaggttgtattggtagctattgaattcatgaaaacttttaagttagcatttgttagcagttattatccaagccagagtaggatttgttaccagttgttatccaaacctaatgtttaaattacacattgttgaaattaaattacacattgttgacatgcttctctcctgattgtttttattttaaacttgtgataggcatatctatgaaacctttgtaaatttagtttattgctttaccattattttactaggtaaaattagagaacagattttgttctctaatttttaagccttatttacatatgcagaaacagcttaaatattttgactagattagacaaacagttaatagatccaccattaggaatcaatatattatgtcataataaacatcctttttctttcactgaaatttcttttagaaataaacttatttttgcttgttatgttttgaaacttgacataggatattttccctctggctacacattcacctacccttgttctctatttagattattcaaataaagttagtttgcttttatagtaaaaaaatc

SEQ ID NO: 418440 - DNA, 4905 bp, Homo sapiens
caactagaggagctcgccccctgcctgtgacagcttagggtcgcctactttttgtggacacactgccgtccacggagtgcagaggccgcctgcagttttcttgcgtccctgtgagacgcacggtggcgcaattcccgagcgtgccaatcccgggctggctggagggcgggctcttcaaatttgaattgcggaagtgttttgtgtgttagagaacgtcgcggaggaggtaagcgtcgcttggcgcctggccgccgcgggcaggatacaccgtgggcctgaggcgcgagcccggcggcgtgcggccctctctccgcgcggagccgagccggaactgcggcagtctctccctgccaggctcttcatccaaggtttctgtggatcccttctgaagttctatctgaaaattgcgcttaagtgaattttctgttagaagaacttggttgctactttcttgtcaagatgattgcaacacctttgaaacattcaagaatttacttacctccagaggcatcttctcaaaggagaaatctacccatggatgcaatcttttttgacagcattccttcaggcacacttactcctgtaaaagatttggtgaaatatcagaactcctccttaaaattgaatgaccataaaaagaatcagttcctaaaaatgacaacttttaacaataaaaatatatttcaatcaactatgctaacagaggctactacctctaacagttctcttgatatcagtgctataaagcccaacaaggatggattaaaaaataaagcaaactatgaatcaccaggaaaaatatttctaagaatgaaagaaaaagtactgcgtgacaagcaagaacagccatcaagaaacagtagtttgttggaaccacagaaaagtggaaataatgaaaccttcactcctaacagagttgaaaaaaaaaaattgcagcatacctacctatgtgaagaaaaggaaaacaacaaatcattccagtcagatgacagttcactaagagcctcagtccaaggagttcctctagaatcatcaaataatgatattttcctcccggtcaaacaaaagattcagtgccagcaggaaaagaaagcaccactgcacaatttaacttacgaacttccaactctgaaccaagaacaggaaaattttttggctgtagaagcccgaaacaagacattaactagagctcagttggctaaacaaatttttcactcaaaggagagtatagttgcaaccactaaatccaaaaaggacacgtttgttttagaaagcgttgattctgctgatgaacaatttcaaaatactaatgctgagactctcagtactaattgtattcctattaaaaatggcagcctgttaatggtttctgatagtgagaggacaacagaagggacttcgcaacagaaagttaaggaaggaaatggaaaaacagtgcctggagagacaggtcttccaggttccatgaaagatacatgtaaaattgtacttgcaacaccaagacttcatataacaatacctcggaggtcaaaaagaaatatttcaaagctttctcctccaagaatatttcaaactgttacaaatggacttaaaaaaaatcaggtagttcagctacaggaatggatgattaaaagcatcaataataatactgctatatgtgtagaaggaaaattgatagacgtcactaacatatattggcacagtaatgtaattatagagcggattgagcacaacaaacttaggactatatcaggcaacgtttatatattaaaaggcatgatagaccaaatttccatgaaagaagcaggatatccaaattatctcataaggaaatttatgtttggatttccagaaaattggaaagagcacattgataattttctggaacaattaagagatggggtttcgtcatgttggccagactggtctcgaactcctggctacaagtgatccgcctgtctcagcctcccaaagtgttgggattacaggcatgagccactgtgcctggcctgagggctggtgaaaagaacagggaaaagaccaaacaaaaacagaaaactggaagatctgtccgtgacataaggaaatcaatgaaaaatgatgcacgagaaaaccaaacagatactgctcaaagagccaccaccacttacgattttgattgtgataatttggaactgaagagtaataagcacagtgagtcaccaggagctacagaattaaacatgtgccacagtaattgccaaaataaaccaacattaaggttcccagatgaccaagtaaataatactattcaaaatggaggaggagatgacttatctaatcaggaattaattggaaaaaaagaatataaaatgtcttcaaagaaactaaaaattggtgaaagaacaaatgaaaggataataaaaagtcagaagcaagagacaactgaagaattggatgtatccattgatattctaacctcaagggaacagtttttctcagatgaagaaagaaaatacatggccatcaatcagaagaaagcttatattttagtaacaccacttaaatctagaaaagtgatagagcaaagatgcatgaggtataatctgtccgctggcaccatcaaagcagtaacagattttgtaataccagagtgtcaaaaaaaaagtcccatcagcaagtccatggggactttagaaaatacatttgaaggtcataaaagtaaaaacaaggaagattgcgatgaacgtgacttacttactgtcaaccggaaaataaaaatatctaaccttgaaaaggaacaaatgctcacctctgactttaagaaaaataccagactattaccaaaattgaagaaaatagaaaatcaggtagctatgtcattttataagcatcagtcctcaccagatttgtcaagtgaagaaagtgaaacagaaaaggaaattaaaaggaaagctgaagttaagaaaaccaaagcaggaaacaccaaagaagcagtggttcacctgagaaagagcacaagaaacacaagtaatattccagtgattttggaacctgaaactgaagaaagtgaaaatgaattttatatcaaacaaaagaaagctagaccttccgtcaaagaaactcttcagaagtctggtgttaggaaagagtttccaattactgaggcagtaggatctgataagacaaataggcatcccttagaatgcttacctggtttaattcaggataaggaatggaatgagaaggagttacagaaacttcattgtgcttttgcatctcttccaaagcacaaacctggtttctggtcagaggtagctgcggctgtaggttctcgatctcctgaagaatgccagaggaaatacatggaaaatcccagaggaaaaggatcccagaaacatgtcactaagaagaagccagccaattccaaaggccaaaatggcaagagaggtgatgctgatcagaaacaaactattaagataactgccaaagtgggaactcttaaaaggaagcaacagatgagggaatttctggaacagttgccaaaagatgaccatgatgattttttcagtacaacacctttacagcatcaaagaatactgttgccaagtttccaggacagtgaagatgatgatgatattctgccaaatatggacaaaaatccaacaactccatcatcagttatctttccattggtaaaaactcctcaatgtcagcatgtcagtcctggcatgctaggttctataaataggaatgactgtgataaatatgtttttcgtatgcaaaaatatcataaaagtaatggtggtattgtctggggcaacatcaagaaaaaattagttgaaactgatttctcaactccaacaccaagaaggaaaaccccatttaacacagacttaggagaaaactctggtattggaaaacttttcactaatgctgtggaatctttagatgaagaagagaaagattattatttttcgaactctgattctgcatagtaaaatgagaaaatatgattcctgggatttttaccataaagcagacagtgtttgtattttcaactggagtacatgtattttctttgtaaagtagcttcctatgaaaatgtggacttttttgaaggtttcatatgtttgtgttcaaagtaaaatatcctcattgctgcagcttactaaaaatgtaaagaaaattgtttttgctcgtgtagatatctgtaaatttgtttttgcatattaaaatatatatagataattttttaataagcatccaagtctgtttactttaagaaaaccatttcccaaacagattttttttttatttcaagaaaattttgctaccatttaagtaagagaaggtgagaaggatgacagaggttgtattggtagctattgaattcatgaaaacttttaagttagcatttgttagcagttattatccaagccagagtaggatttgttaccagttgttatccaaacctaatgtttaaattacacattgttgaaattaaattacacattgttgacatgcttctctcctgattgtttttattttaaacttgtgataggcatatctatgaaacctttgtaaatttagtttattgctttaccattattttactaggtaaaattagagaacagattttgttctctaatttttaagccttatttacatatgcagaaacagcttaaatattttgactagattagacaaacagttaatagatccaccattaggaatcaatatattatgtcataataaacatcctttttctttcactgaaatttcttttagaaataaacttatttttgcttgttatgttttgaaacttgacataggatattttccctctggctacacattcacctacccttgttctctatttagattattcaaataaagttagtttgcttttatagtaaaaaaatc

SEQ ID NO: 418441 - DNA, 5091 bp, Homo sapiens
caactagaggagctcgccccctgcctgtgacagcttagggtcgcctactttttgtggacacactgccgtccacggagtgcagaggccgcctgcagttttcttgcgtccctgtgagacgcacggtggcgcaattcccgagcgtgccaatcccgggctggctggagggcgggctcttcaaatttgaattgcggaagtgttttgtgtgttagagaacgtcgcggaggaggtaagcgtcgcttggcgcctggccgccgcgggcaggatacaccgtgggcctgaggcgcgagcccggcggcgtgcggccctctctccgcgcggagccgagccggaactgcggcagtctctccctgccaggctcttcatccaaggtttctgtggatcccttctgaagttctatctgaaaattgcgcttaagtgaattttctgttagaagaacttggttgctactttcttgtcaagatgattgcaacacctttgaaacattcaagaatttacttacctccagaggcatcttctcaaaggagaaatctacccatggatgcaatcttttttgacagcattccttcaggcacacttactcctgtaaaagatttggtgaaatatcagaactcctccttaaaattgaatgaccataaaaagaatcagttcctaaaaatgacaacttttaacaataaaaatatatttcaatcaactatgctaacagaggctactacctctaacagttctcttgatatcagtgctataaagcccaacaaggatggattaaaaaataaagcaaactatgaatcaccaggaaaaatatttctaagaatgaaagaaaaagtactgcgtgacaagcaagaacagccatcaagaaacagtagtttgttggaaccacagaaaagtggaaataatgaaaccttcactcctaacagagttgaaaaaaaaaaattgcagcatacctacctatgtgaagaaaaggaaaacaacaaatcattccagtcagatgacagttcactaagagcctcagtccaaggagttcctctagaatcatcaaataatgatattttcctcccggtcaaacaaaagattcagtgccagcaggaaaagaaagcaccactgcacaatttaacttacgaacttccaactctgaaccaagaacaggaaaattttttggctgtagaagcccgaaacaagacattaactagagctcagttggctaaacaaatttttcactcaaaggagagtatagttgcaaccactaaatccaaaaaggacacgtttgttttagaaagcgttgattctgctgatgaacaatttcaaaatactaatgctgagactctcagtactaattgtattcctattaaaaatggcagcctgttaatggtttctgatagtgagaggacaacagaagggacttcgcaacagaaagttaaggaaggaaatggaaaaacagtgcctggagagacaggtcttccaggttccatgaaagatacatgtaaaattgtacttgcaacaccaagacttcatataacaatacctcggaggtcaaaaagaaatatttcaaagctttctcctccaagaatatttcaaactgttacaaatggacttaaaaaaaatcaggtagttcagctacaggaatggatgattaaaagcatcaataataatactgctatatgtgtagaaggaaaattgatagacgtcactaacatatattggcacagtaatgtaattatagagcggattgagcacaacaaacttaggactatatcaggcaacgtttatatattaaaaggcatgatagaccaaatttccatgaaagaagcaggatatccaaattatctcataaggaaatttatgtttggatttccagaaaattggaaagagcacattgataattttctggaacaattaagagatggggtttcgtcatgttggccagactggtctcgaactcctggctacaagtgatccgcctgtctcagcctcccaaagtgttgggattacaggcatgagccactgtgcctggcctgagggctggtgaaaagaacagggaaaagaccaaacaaaaacagaaaactggaagatctgtccgtgacataaggaaatcaatgaaaaatgatgcacgagaaaaccaaacagatactgctcaaagagccaccaccacttacgattttgattgtgataatttggaactgaagagtaataagcacagtgagtcaccaggagctacagaattaaacatgtgccacagtaattgccaaaataaaccaacattaaggttcccagatgaccaagtaaataatactattcaaaatggaggaggagatgacttatctaatcaggaattaattggaaaaaaagaatataaaatgtcttcaaagaaactaaaaattggtgaaagaacaaatgaaaggataataaaaagtcagaagcaagagacaactgaagaattggatgtatccattgatattctaacctcaagggaacagtttttctcagatgaagaaagaaaatacatggccatcaatcagaagaaagcttatattttagtaacaccacttaaatctagaaaagtgatagagcaaagatgcatgaggtataatctgtccgctggcaccatcaaagcagtaacagattttgtaataccagagtgtcaaaaaaaaagtcccatcagcaagtccatggggactttagaaaatacatttgaaggtcataaaagtaaaaacaaggaagattgcgatgaacgtgacttacttactgtcaaccggaaaataaaaatatctaaccttgaaaaggaacaaatgctcacctctgactttaagaaaaataccagactattaccaaaattgaagaaaatagaaaatcaggtagctatgtcattttataagcatcagtcctcaccagatttgtcaagtgaagaaagtgaaacagaaaaggaaattaaaaggaaagctgaagttaagaaaaccaaagcaggaaacaccaaagaagcagtggttcacctgagaaagagcacaagaaacacaagtaatattccagtgattttggaacctgaaactgaagaaagtgaaaatgaattttatatcaaacaaaagaaagctagaccttccgtcaaagaaactcttcagaagtctggtgttaggaaagagtttccaattactgaggcagtaggatctgataagacaaataggcatcccttagaatgcttacctggtttaattcaggataaggaatggaatgagaaggagttacagaaacttcattgtgcttttgcatctcttccaaagcacaaacctggtttctggtcagaggtagctgcggctgtaggttctcgatctcctgaagaatgccagaggaaatacatggaaaatcccagaggaaaaggatcccagaaacatgtcactaagaagaagccagccaattccaaaggccaaaatggcaagagaggtgatgctgatcagaaacaaactattaagataactgccaaagtgggaactcttaaaaggaagcaacagatgagggaatttctggaacagttgccaaaagatgaccatgatgattttttcagtacaacacctttacagcatcaaagaatactgttgccaagtttccaggacagtgaagatgatgatgatattctgccaaatatggacaaaaatccaacaactccatcatcagttatctttccattggtaaaaactcctcaatgtcagcatgtcagtcctggcatgctaggttctataaataggaatgactgtgataaatatgtttttcgtatgcaaaaatatcataaaagtaatggtggtattgtctggggcaacatcaagaaaaaattagttgaaactgatttctcaactccaacaccaagaaggaaaaccccatttaacacaggtaatacacttacagctttcttttgtggctcagttctattataaggtaggttctttatttaaatggtattaaaattaattgctctcaagtggacagacttagcattttattccttatagttgttttcagttttattgaaagtacttttagaaatttattatctttttattaaacttctctttacagacttaggagaaaactctggtattggaaaacttttcactaatgctgtggaatctttagatgaagaagagaaagattattatttttcgaactctgattctgcatagtaaaatgagaaaatatgattcctgggatttttaccataaagcagacagtgtttgtattttcaactggagtacatgtattttctttgtaaagtagcttcctatgaaaatgtggacttttttgaaggtttcatatgtttgtgttcaaagtaaaatatcctcattgctgcagcttactaaaaatgtaaagaaaattgtttttgctcgtgtagatatctgtaaatttgtttttgcatattaaaatatatatagataattttttaataagcatccaagtctgtttactttaagaaaaccatttcccaaacagattttttttttatttcaagaaaattttgctaccatttaagtaagagaaggtgagaaggatgacagaggttgtattggtagctattgaattcatgaaaacttttaagttagcatttgttagcagttattatccaagccagagtaggatttgttaccagttgttatccaaacctaatgtttaaattacacattgttgaaattaaattacacattgttgacatgcttctctcctgattgtttttattttaaacttgtgataggcatatctatgaaacctttgtaaatttagtttattgctttaccattattttactaggtaaaattagagaacagattttgttctctaatttttaagccttatttacatatgcagaaacagcttaaatattttgactagattagacaaacagttaatagatccaccattaggaatcaatatattatgtcataataaacatcctttttctttcactgaaatttcttttagaaataaacttatttttgcttgttatgttttgaaacttgacataggatattttccctctggctacacattcacctacccttgttctctatttagattattcaaataaagttagtttgcttttatagtaaaaaaatc

SEQ ID NO: 418442 - DNA, 5057 bp, Homo sapiens
caactagaggagctcgccccctgcctgtgacagcttagggtcgcctactttttgtggacacactgccgtccacggagtgcagaggccgcctgcagttttcttgcgtccctgtgagacgcacggtggcgcaattcccgagcgtgccaatcccgggctggctggagggcgggctcttcaaatttgaattgcggaagtgttttgtgtgttagagaacgtcgcggaggaggtaagcgtcgcttggcgcctggccgccgcgggcaggatacaccgtgggcctgaggcgcgagcccggcggcgtgcggccctctctccgcgcggagccgagccggaactgcggcagtctctccctgccaggctcttcatccaaggtttctgtggatcccttctgaagttctatctgaaaattgcgcttaagtgaattttctgttagaagaacttggttgctactttcttgtcaagatgattgcaacacctttgaaacattcaagaatttacttacctccagaggcatcttctcaaaggagaaatctacccatggatgcaatcttttttgacagcattccttcaggcacacttactcctgtaaaagatttggtgaaatatcagaactcctccttaaaattgaatgaccataaaaagaatcagttcctaaaaatgacaacttttaacaataaaaatatatttcaatcaactatgctaacagaggctactacctctaacagttctcttgatatcagtgctataaagcccaacaaggatggattaaaaaataaagcaaactatgaatcaccaggaaaaatatttctaagaatgaaagaaaaagtactgcgtgacaagcaagaacagccatcaagaaacagtagtttgttggaaccacagaaaagtggaaataatgaaaccttcactcctaacagagttgaaaaaaaaaaattgcagcatacctacctatgtgaagaaaaggaaaacaacaaatcattccagtcagatgacagttcactaagagcctcagtccaaggagttcctctagaatcatcaaataatgatattttcctcccggtcaaacaaaagattcagtgccagcaggaaaagaaagcaccactgcacaatttaacttacgaacttccaactctgaaccaagaacaggaaaattttttggctgtagaagcccgaaacaagacattaactagagctcagttggctaaacaaatttttcactcaaaggagagtatagttgcaaccactaaatccaaaaaggacacgtttgttttagaaagcgttgattctgctgatgaacaatttcaaaatactaatgctgagactctcagtactaattgtattcctattaaaaatggcagcctgttaatggtttctgatagtgagaggacaacagaagggacttcgcaacagaaagttaaggaaggaaatggaaaaacagtgcctggagagacaggtcttccaggttccatgaaagatacatgtaaaattgtacttgcaacaccaagacttcatataacaatacctcggaggtcaaaaagaaatatttcaaagctttctcctccaagaatatttcaaactgttacaaatggacttaaaaaaaatcaggtagttcagctacaggaatggatgattaaaagcatcaataataatactgctatatgtgtagaaggaaaattgatagacgtcactaacatatattggcacagtaatgtaattatagagcggattgagcacaacaaacttaggactatatcaggcaacgtttatatattaaaaggcatgatagaccaaatttccatgaaagaagcaggatatccaaattatctcataaggaaatttatgtttggatttccagaaaattggaaagagcacattgataattttctggaacaattaagagatggggtttcgtcatgttggccagactggtctcgaactcctggctacaagtgatccgcctgtctcagcctcccaaagtgttgggattacaggcatgagccactgtgcctggcctgagggctggtgaaaagaacagggaaaagaccaaacaaaaacagaaaactggaagatctgtccgtgacataaggaaatcaatgaaaaatgatgcacgagaaaaccaaacagatactgctcaaagagccaccaccacttacgattttgattgtgataatttggaactgaagagtaataagcacagtgagtcaccaggagctacagaattaaacatgtgccacagtaattgccaaaataaaccaacattaaggttcccagatgaccaagtaaataatactattcaaaatggaggaggagatgacttatctaatcaggaattaattggaaaaaaagaatataaaatgtcttcaaagaaactaaaaattggtgaaagaacaaatgaaaggataataaaaagtcagaagcaagagacaactgaagaattggatgtatccattgatattctaacctcaagggaacagtttttctcagatgaagaaagaaaatacatggccatcaatcagaagaaagcttatattttagtaacaccacttaaatctagaaaagtgatagagcaaagatgcatgaggtataatctgtccgctggcaccatcaaagcagtaacagattttgtaataccagagtgtcaaaaaaaaagtcccatcagcaagtccatggggactttagaaaatacatttgaaggtcataaaagtaaaaacaaggaagattgcgatgaacgtgacttacttactgtcaaccggaaaataaaaatatctaaccttgaaaaggaacaaatgctcacctctgactttaagaaaaataccagactattaccaaaattgaagaaaatagaaaatcaggtagctatgtcattttataagcatcagtcctcaccagatttgtcaagtgaagaaagtgaaacagaaaaggaaattaaaaggaaagctgaagttaagaaaaccaaagcaggaaacaccaaagaagcagtggttcacctgagaaagagcacaagaaacacaagtaatattccagtgattttggaacctgaaactgaagaaagtgaaaatgaattttatatcaaacaaaagaaagctagaccttccgtcaaagaaactcttcagaagtctggtgttaggaaagagtttccaattactgaggcagtaggatctgataagacaaataggcatcccttagaatgcttacctggtttaattcaggataaggaatggaatgagaaggagttacagaaacttcattgtgcttttgcatctcttccaaagcacaaacctggtttctggtcagaggtagctgcggctgtaggttctcgatctcctgaagaatgccagaggaaatacatggaaaatcccagaggaaaaggatcccagaaacatgtcactaagaagaagccagccaattccaaaggccaaaatggcaagagaggtgatgctgatcagaaacaaactattaagataactgccaaagtgggaactcttaaaaggaagcaacagatgagggaatttctggaacagttgccaaaagatgaccatgatgattttttcagtacaacacctttacagcatcaaagaatactgttgccaagtttccaggacagtgaagatgatgatgatattctgccaaatatggacaaaaatccaacaactccatcatcagttatctttccattggtaaaaactcctcaatgtcagcatgtcagtcctggcatgctaggttctataaataggtaaatattcatgcatatgatatgttaattctctgcatcagagtagtgaggaacatttaaacatttcatgaggaccatagatgccagtaatgggaagaggcattatttaaaaaatcaagaatgtgtagtttctagaagttaaggatggacaagttcatcaaatcggggtgctattcaataaacagcattgtgatataacccacatttacttctggatcaattcgaaatggatcaaggttttacttgtaaaaaactttaaaaaaaaaaaactaaagaaaccttggagaattattttataataccagattagtgatggtctttctaactatactataaaacctacaagccattaatgaaaagatgaataaagtcaactgtgtaaaaatgtttaacaaattttacctggtaccaaccactacaaacaaaagacaacctgagaaaagaatatatgcaacttgtcacaggcaaaaggctaatttccgtaatatatacagcattcctacaaactaacaaggaatgcattgttaatttttgtgcattgctagtgagaaggtaaagtagtgcgatctttgcagcaacaatttgtaagtatcaaaattataaatgcacatgccctttgacttaggaattttacttatagaattgtgaatgtacagcttattcattgtagcattgtttaaatggcagtacctcaaaaatctatcagtagggactaattaaatgaactctggtccattatatagtcatagaaattaatgaagagccaggcacagtggctgaagcctgtaatcccagcactttgggaggatcacttgagcccaggagttcaagaccagcatgggcaacataggaagaccccatttctacaaaaaaaacccaaaaatgttagcaggatgcagtggggcaagcctgtggccctagctactagggaggctgatgtagaaggattgcttgagtcccagaggtgtaggctgcagtgagctgtgattgcaacaattgcactccatcctgggcaacagagtgagaacagagtgagatcctgtctcaaaaaaaaaagaaattaatgaagatattttttattgctattatgataaaatgcctaagatatattaaatgaaacaaaggtagatgcagtgaataatatactactgtttgtgtaaatagaagctatatgtatgtatgcatatatgtatatacttgtgtgtgtgtgtgtgtgtataattgcttttattagattaagtctttataaaaggatgcataagaaaccaaaacattggtgatccttagggagaactaaggtagctggaggaaggagaggggggctttt

SEQ ID NO: 418443 - DNA, 4851 bp, Homo sapiens
caactagaggagctcgccccctgcctgtgacagcttagggtcgcctactttttgtggacacactgccgtccacggagtgcagaggccgcctgcagttttcttgcgtccctgtgagacgcacggtggcgcaattcccgagcgtgccaatcccgggctggctggagggcgggctcttcaaatttgaattgcggaagtgttttgtgtgttagagaacgtcgcggaggaggtaagcgtcgcttggcgcctggccgccgcgggcaggatacaccgtgggcctgaggcgcgagcccggcggcgtgcggccctctctccgcgcggagccgagccggaactgcggcagtctctccctgccaggctcttcatccaaggtttctgtggatcccttctgaagttctatctgaaaattgcgcttaagtgaattttctgttagaagaacttggttgctactttcttgtcaagatgattgcaacacctttgaaacattcaagaatttacttacctccagaggcatcttctcaaaggagaaatctacccatggatgcaatcttttttgacagcattccttcaggcacacttactcctgtaaaagatttggtgaaatatcagaactcctccttaaaattgaatgaccataaaaagaatcagttcctaaaaatgacaacttttaacaataaaaatatatttcaatcaactatgctaacagaggctactacctctaacagttctcttgatatcagtgctataaagcccaacaaggatggattaaaaaataaagcaaactatgaatcaccaggaaaaatatttctaagaatgaaagaaaaagtactgcgtgacaagcaagaacagccatcaagaaacagtagtttgttggaaccacagaaaagtggaaataatgaaaccttcactcctaacagagttgaaaaaaaaaaattgcagcatacctacctatgtgaagaaaaggaaaacaacaaatcattccagtcagatgacagttcactaagagcctcagtccaaggagttcctctagaatcatcaaataatgatattttcctcccggtcaaacaaaagattcagtgccagcaggaaaagaaagcaccactgcacaatttaacttacgaacttccaactctgaaccaagaacaggaaaattttttggctgtagaagcccgaaacaagacattaactagagctcagttggctaaacaaatttttcactcaaaggagagtatagttgcaaccactaaatccaaaaaggacacgtttgttttagaaagcgttgattctgctgatgaacaatttcaaaatactaatgctgagactctcagtactaattgtattcctattaaaaatggcagcctgttaatggtttctgatagtgagaggacaacagaagggacttcgcaacagaaagttaaggaaggaaatggaaaaacagtgcctggagagacaggtcttccaggttccatgaaagatacatgtaaaattgtacttgcaacaccaagacttcatataacaatacctcggaggtcaaaaagaaatatttcaaagctttctcctccaagaatatttcaaactgttacaaatggacttaaaaaaaatcaggtagttcagctacaggaatggatgattaaaagcatcaataataatactgctatatgtgtagaaggaaaattgatagacgtcactaacatatattggcacagtaatgtaattatagagcggattgagcacaacaaacttaggactatatcaggcaacgtttatatattaaaaggcatgatagaccaaatttccatgaaagaagcaggatatccaaattatctcataaggaaatttatgtttggatttccagaaaattggaaagagcacattgataattttctggaacaattaagagatggggtttcgtcatgttggccagactggtctcgaactcctggctacaagtgatccgcctgtctcagcctcccaaagtgttgggattacaggcatgagccactgtgcctggcctgagggctggtgaaaagaacagggaaaagaccaaacaaaaacagaaaactggaagatctgtccgtgacataaggaaatcaatgaaaaatgatgcacgagaaaaccaaacagatactgctcaaagagccaccaccacttacgattttgattgtgataatttggaactgaagagtaataagcacagtgagtcaccaggagctacagaattaaacatgtgccacagtaattgccaaaataaaccaacattaaggttcccagatgaccaagtaaataatactattcaaaatggaggaggagatgacttatctaatcaggaattaattggaaaaaaagaatataaaatgtcttcaaagaaactaaaaattggtgaaagaacaaatgaaaggataataaaaagtcagaagcaagagacaactgaagaattggatgtatccattgatattctaacctcaagggaacagtttttctcagatgaagaaagaaaatacatggccatcaatcagaagaaagcttatattttagtaacaccacttaaatctagaaaagtgatagagcaaagatgcatgaggtataatctgtccgctggcaccatcaaagcagtaacagattttgtaataccagagtgtcaaaaaaaaagtcccatcagcaagtccatggggactttagaaaatacatttgaaggtcataaaagtaaaaacaaggaagattgcgatgaacgtgacttacttactgtcaaccggaaaataaaaatatctaaccttgaaaaggaacaaatgctcacctctgactttaagaaaaataccagactattaccaaaattgaagaaaatagaaaatcaggtagctatgtcattttataagcatcagtcctcaccagatttgtcaagtgaagaaagtgaaacagaaaaggaaattaaaaggaaagctgaagttaagaaaaccaaagcaggaaacaccaaagaagcagtggttcacctgagaaagagcacaagaaacacaagtaatattccagtgattttggaacctgaaactgaagaaagtgaaaatgaattttatatcaaacaaaagaaagctagaccttccgtcaaagaaactcttcagaagtctggtgttaggaaagagtttccaattactgaggcagtaggatctgataagacaaataggcatcccttagaatgcttacctggtttaattcaggataaggaatggaatgagaaggagttacagaaacttcattgtgcttttgcatctcttccaaagcacaaacctggtttctggtcagaggtagctgcggctgtaggttctcgatctcctgaagaatgccagaggaaatacatggaaaatcccagaggaaaaggatcccagaaacatgtcactaagaagaagccagccaattccaaaggccaaaatggcaagagaggtgatgctgatcagaaacaaactattaagataactgccaaagtgggaactcttaaaaggaagcaacagatgagggaatttctggaacagttgccaaaagatgaccatgatgattttttcagtacaacacctttacagcatcaaagaatactgttgccaagtttccaggacagtgaagatgatgatgatattctgccaaatatggacaaaaatccaacaactccatcatcagttatctttccattggtaaaaactcctcaatgtcagcatgtcagtcctggcatgctaggttctataaataggaatgactgtgataaatatgtttttcgtatgcaaaaatatcataaaagtaatggtggtattgtctggggcaacatcaagaaaaaattagttgaaactgatttctcaactccaacaccaagaaggaaaaccccatttaacacagacttaggagaaaactctggtattggaaaacttttcactaatgctgtggaatctttagatgaagaagagaaagattattatttttcgaactctgattctgcatagtaaaatgagatggagtacatgtattttctttgtaaagtagcttcctatgaaaatgtggacttttttgaaggtttcatatgtttgtgttcaaagtaaaatatcctcattgctgcagcttactaaaaatgtaaagaaaattgtttttgctcgtgtagatatctgtaaatttgtttttgcatattaaaatatatatagataattttttaataagcatccaagtctgtttactttaagaaaaccatttcccaaacagattttttttttatttcaagaaaattttgctaccatttaagtaagagaaggtgagaaggatgacagaggttgtattggtagctattgaattcatgaaaacttttaagttagcatttgttagcagttattatccaagccagagtaggatttgttaccagttgttatccaaacctaatgtttaaattacacattgttgaaattaaattacacattgttgacatgcttctctcctgattgtttttattttaaacttgtgataggcatatctatgaaacctttgtaaatttagtttattgctttaccattattttactaggtaaaattagagaacagattttgttctctaatttttaagccttatttacatatgcagaaacagcttaaatattttgactagattagacaaacagttaatagatccaccattaggaatcaatatattatgtcataataaacatcctttttctttcactgaaatttcttttagaaataaacttatttttgcttgttatgttttgaaacttgacataggatattttccctctggctacacattcacctacccttgttctctatttagattattcaaataaagttagtttgcttttatagtaaaaaaatc

SEQ ID NO: 418444 - DNA, 4894 bp, Homo sapiens
caactagaggagctcgccccctgcctgtgacagcttagggtcgcctactttttgtggacacactgccgtccacggagtgcagaggccgcctgcagttttcttgcgtccctgtgagacgcacggtggcgcaattcccgagcgtgccaatcccgggctggctggagggcgggctcttcaaatttgaattgcggaagtgttttgtgtgttagagaacgtcgcggaggaggtaagcgtcgcttggcgcctggccgccgcgggcaggatacaccgtgggcctgaggcgcgagcccggcggcgtgcggccctctctccgcgcggagccgagccggaactgcggcagtctctccctgccaggctcttcatccaaggggcagggacattaggaaacagaaagctctgttttggttcttggagcctttcaacgtgaccacaattatctgactttaaatgaagacagttctgcatgtccattacaggtttctgtggatcccttctgaagttctatctgaaaattgcgcttaagtgaattttctgttagaagaacttggttgctactttcttgtcaagatgattgcaacacctttgaaacattcaagaatttacttacctccagaggcatcttctcaaaggagaaatctacccatggatgcaatcttttttgacagcattccttcaggcacacttactcctgtaaaagatttggtgaaatatcagaactcctccttaaaattgaatgaccataaaaagaatcagttcctaaaaatgacaacttttaacaataaaaatatatttcaatcaactatgctaacagaggctactacctctaacagttctcttgatatcagtgctataaagcccaacaaggatggattaaaaaataaagcaaactatgaatcaccaggaaaaatatttctaagaatgaaagaaaaagtactgcgtgacaagcaagaacagccatcaagaaacagtagtttgttggaaccacagaaaagtggaaataatgaaaccttcactcctaacagagttgaaaaaaaaaaattgcagcatacctacctatgtgaagaaaaggaaaacaacaaatcattccagtcagatgacagttcactaagagcctcagtccaaggagttcctctagaatcatcaaataatgatattttcctcccggtcaaacaaaagattcagtgccagcaggaaaagaaagcaccactgcacaatttaacttacgaacttccaactctgaaccaagaacaggaaaattttttggctgtagaagcccgaaacaagacattaactagagctcagttggctaaacaaatttttcactcaaaggagagtatagttgcaaccactaaatccaaaaaggacacgtttgttttagaaagcgttgattctgctgatgaacaatttcaaaatactaatgctgagactctcagtactaattgtattcctattaaaaatggcagcctgttaatggtttctgatagtgagaggacaacagaagggacttcgcaacagaaagttaaggaaggaaatggaaaaacagtgcctggagagacaggtcttccaggttccatgaaagatacatgtaaaattgtacttgcaacaccaagacttcatataacaatacctcggaggtcaaaaagaaatatttcaaagctttctcctccaagaatatttcaaactgttacaaatggacttaaaaaaaatcaggtagttcagctacaggaatggatgattaaaagcatcaataataatactgctatatgtgtagaaggaaaattgatagacgtcactaacatatattggcacagtaatgtaattatagagcggattgagcacaacaaacttaggactatatcaggcaacgtttatatattaaaaggcatgatagaccaaatttccatgaaagaagcaggatatccaaattatctcataaggaaatttatgtttggatttccagaaaattggaaagagcacattgataattttctggaacaattaagggctggtgaaaagaacagggaaaagaccaaacaaaaacagaaaactggaagatctgtccgtgacataaggaaatcaatgaaaaatgatgcacgagaaaaccaaacagatactgctcaaagagccaccaccacttacgattttgattgtgataatttggaactgaagagtaataagcacagtgagtcaccaggagctacagaattaaacatgtgccacagtaattgccaaaataaaccaacattaaggttcccagatgaccaagtaaataatactattcaaaatggaggaggagatgacttatctaatcaggaattaattggaaaaaaagaatataaaatgtcttcaaagaaactaaaaattggtgaaagaacaaatgaaaggataataaaaagtcagaagcaagagacaactgaagaattggatgtatccattgatattctaacctcaagggaacagtttttctcagatgaagaaagaaaatacatggccatcaatcagaagaaagcttatattttagtaacaccacttaaatctagaaaagtgatagagcaaagatgcatgaggtataatctgtccgctggcaccatcaaagcagtaacagattttgtaataccagagtgtcaaaaaaaaagtcccatcagcaagtccatggggactttagaaaatacatttgaaggtcataaaagtaaaaacaaggaagattgcgatgaacgtgacttacttactgtcaaccggaaaataaaaatatctaaccttgaaaaggaacaaatgctcacctctgactttaagaaaaataccagactattaccaaaattgaagaaaatagaaaatcaggtagctatgtcattttataagcatcagtcctcaccagatttgtcaagtgaagaaagtgaaacagaaaaggaaattaaaaggaaagctgaagttaagaaaaccaaagcaggaaacaccaaagaagcagtggttcacctgagaaagagcacaagaaacacaagtaatattccagtgattttggaacctgaaactgaagaaagtgaaaatgaattttatatcaaacaaaagaaagctagaccttccgtcaaagaaactcttcagaagtctggtgttaggaaagagtttccaattactgaggcagtaggatctgataagacaaataggcatcccttagaatgcttacctggtttaattcaggataaggaatggaatgagaaggagttacagaaacttcattgtgcttttgcatctcttccaaagcacaaacctggtttctggtcagaggtagctgcggctgtaggttctcgatctcctgaagaatgccagaggaaatacatggaaaatcccagaggaaaaggatcccagaaacatgtcactaagaagaagccagccaattccaaaggccaaaatggcaagagaggtgatgctgatcagaaacaaactattaagataactgccaaagtgggaactcttaaaaggaagcaacagatgagggaatttctggaacagttgccaaaagatgaccatgatgattttttcagtacaacacctttacagcatcaaagaatactgttgccaagtttccaggacagtgaagatgatgatgatattctgccaaatatggacaaaaatccaacaactccatcatcagttatctttccattggtaaaaactcctcaatgtcagcatgtcagtcctggcatgctaggttctataaataggaatgactgtgataaatatgtttttcgtatgcaaaaatatcataaaagtaatggtggtattgtctggggcaacatcaagaaaaaattagttgaaactgatttctcaactccaacaccaagaaggaaaaccccatttaacacagacttaggagaaaactctggtattggaaaacttttcactaatgctgtggaatctttagatgaagaagagaaagattattatttttcgaactctgattctgcatagtaaaatgagaaaatatgattcctgggatttttaccataaagcagacagtgtttgtattttcaactggagtacatgtattttctttgtaaagtagcttcctatgaaaatgtggacttttttgaaggtttcatatgtttgtgttcaaagtaaaatatcctcattgctgcagcttactaaaaatgtaaagaaaattgtttttgctcgtgtagatatctgtaaatttgtttttgcatattaaaatatatatagataattttttaataagcatccaagtctgtttactttaagaaaaccatttcccaaacagattttttttttatttcaagaaaattttgctaccatttaagtaagagaaggtgagaaggatgacagaggttgtattggtagctattgaattcatgaaaacttttaagttagcatttgttagcagttattatccaagccagagtaggatttgttaccagttgttatccaaacctaatgtttaaattacacattgttgaaattaaattacacattgttgacatgcttctctcctgattgtttttattttaaacttgtgataggcatatctatgaaacctttgtaaatttagtttattgctttaccattattttactaggtaaaattagagaacagattttgttctctaatttttaagccttatttacatatgcagaaacagcttaaatattttgactagattagacaaacagttaatagatccaccattaggaatcaatatattatgtcataataaacatcctttttctttcactgaaatttcttttagaaataaacttatttttgcttgttatgttttgaaacttgacataggatattttccctctggctacacattcacctacccttgttctctatttagattattcaaataaagttagtttgcttttatagtaaaaaaatc

SEQ ID NO: 418445 - DNA, 3118 bp, Homo sapiens
attcggcacgaggagttaagaaaaccaaagcaggaaacaccaaagaagcaggtggttcacctgagaaagagcacaagaaacacaagtaatattccagtgattttggaacctgaaactgaagaaagtgaaaatgaattttatatcaaacaaaagaaaatagaaaatcaggtagctatgtcattttataagcatcagtcctcaccagatttgtcaagtgaagaaagtgaggctggtgaaaagaacagggaaaagaccaaacaaaaacagaaaactggaagatctgtccgtgacataaggaaatcaatgaaaaatgatgcacgagaaaaccaaacagatactgctcaaagagccaccaccacttacgattttgattgtgataatttggaactgaagagtaataagcacagtgagtcaccaggagctacagaattaaacatgtgccacagtaattgccaaaataaaccaacattaaggttcccagatgaccaagtaaataatactattcaaaatggaggaggagatgacttatctaatcaggaattaattggaaaaaaagaatataaaatgtcttcaaagaaactaaaaattggtgaaagaacaaatgaaaggataataaaaagtcagaagcaagagacaactgaagaattggatgtatccattgatattctaacctcaagggaacagtttttctcagatgaagaaagaaaatacatggccatcaatcagaagaaagcttatattttagtaacaccacttaaatctagaaaagtgatagagcaaagatgcatgaggtataatctgtccgctggcaccatcaaagcagtaacagattttgtaataccagagtgtcaaaaaaaaagtcccatcagcaagtccatggggactttagaaaatacatttgaaggtcataaaagtaaaaacaaggaagattgcgatgaacgtgacttacttactgtcaaccggaaaataaaaatatctaaccttgaaaaggaacaaatgctcacctctgactttaagaaaaataccagactattaccaaaattgaagaaaatagaaaatcaggtagctatgtcattttataagcatcagtcctcaccagatttgtcaagtgaagaaagtgaaacagaaaaggaaattaaaaggaaagctgaagttaagaaaaccaaagcaggaaacaccaaagaagcagtggttcacctgagaaagagcacaagaaacacaagtaatattccagtgattttggaacctgaaactgaagaaagtgaaaatgaattttatatcaaacaaaagaaagctagaccttccgtcaaagaaactcttcagaagtctggtgttaggaaagagtttccaattactgaggcagtaggatctgataagacaaataggcatcccttagaatgcttacctggtttaattcaggataaggaatggaatgagaaggagttacagaaacttcattgtgcttttgcatctcttccaaagcacaaacctggtttctggtcagaggtagctgcggctgtaggttctcgatctcctgaagaatgccagaggaaatacatggaaaatcccagaggaaaaggatcccagaaacatgtcactaagaagaagccagccaattccaaaggccaaaatggcaagagaggtgatgctgatcagaaacaaactattaagataactgccaaagtgggaactcttaaaaggaagcaacagatgagggaatttctggaacagttgccaaaagatgaccatgatgattttttcagtacaacacctttacagcatcaaagaatactgttgccaagtttccaggacagtgaagatgatgatgatattctgccaaatatggacaaaaatccaacaactccatcatcagttatctttccattggtaaaaactcctcaatgtcagcatgtcagtcctggcatgctaggttctataaataggaatgactgtgataaatatgtttttcgtatgcaaaaatatcataaaagtaatggtggtattgtctggggcaacatcaagaaaaaattagttgaaactgatttctcaactccaacaccaagaaggaaaaccccatttaacacagacttaggagaaaactctggtattggaaaacttttcactaatgctgtggaatctttagatgaagaagagaaagattattatttttcgaactctgattctgcatagtaaaatgagaaaatatgattcctgggatttttaccataaagcagacagtgtttgtattttcaactggagtacatgtattttctttgtaaagtagcttcctatgaaaatgtggacttttttgaaggtttcatatgtttgtgttcaaagtaaaatatcctcattgctgcagcttactaaaaatgtaaagaaaattgtttttgctcgtgtagatatctgtaaatttgtttttgcatattaaaatatatatagataattttttaataagcatccaagtctgtttactttaagaaaaccatttcccaaacagattttttttttatttcaagaaaattttgctaccatttaagtaagagaaggtgagaaggatgacagaggttgtattggtagctattgaattcatgaaaacttttaagttagcatttgttagcagttattatccaagccagagtaggatttgttaccagttgttatccaaacctaatgtttaaattacacattgttgaaattaaattacacattgttgacatgcttctctcctgattgtttttattttaaacttgtgataggcatatctatgaaacctttgtaaatttagtttattgctttaccattattttactaggtaaaattagagaacagattttgttctctaatttttaagccttatttacatatgcagaaacagcttaaatattttgactagattagacaaacagttaatagatccaccattaggaatcaatatattatgtcataataaacatcctttttctttcactgaaatttcttttagaaataaacttatttttgcttgttatgttttgaaacttgacataggatattttccctctggctacacattcacctacccttgttctctatttagattattcaaataaagttagtttgcttttatagtaaaaaaatc

SEQ ID NO: 418446 - DNA, 2937 bp, Homo sapiens
gagaatcagtattaaggaaaaataaaataattgtttttaaagggctggctggtgaaaagaacagggaaaagaccaaacaaaaacagaaaactggaagatctgtccgtgacataaggaaatcaatgaaaaatgatgcacgagaaaaccaaacagatactgctcaaagagccaccaccacttacgattttgattgtgataatttggaactgaagagtaataagcacagtgagtcaccaggagctacagaattaaacatgtgccacagtaattgccaaaataaaccaacattaaggttcccagatgaccaagtaaataatactattcaaaatggaggaggagatgacttatctaatcaggaattaattggaaaaaaagaatataaaatgtcttcaaagaaactaaaaattggtgaaagaacaaatgaaaggataataaaaagtcagaagcaagagacaactgaagaattggatgtatccattgatattctaacctcaagggaacagtttttctcagatgaagaaagaaaatacatggccatcaatcagaagaaagcttatattttagtaacaccacttaaatctagaaaagtgatagagcaaagatgcatgaggtataatctgtccgctggcaccatcaaagcagtaacagattttgtaataccagagtgtcaaaaaaaaagtcccatcagcaagtccatggggactttagaaaatacatttgaaggtcataaaagtaaaaacaaggaagattgcgatgaacgtgacttacttactgtcaaccggaaaataaaaatatctaaccttgaaaaggaacaaatgctcacctctgactttaagaaaaataccagactattaccaaaattgaagaaaatagaaaatcaggtagctatgtcattttataagcatcagtcctcaccagatttgtcaagtgaagaaagtgaaacagaaaaggaaattaaaaggaaagctgaagttaagaaaaccaaagcaggaaacaccaaagaagcagtggttcacctgagaaagagcacaagaaacacaagtaatattccagtgattttggaacctgaaactgaagaaagtgaaaatgaattttatatcaaacaaaagaaagctagaccttccgtcaaagaaactcttcagaagtctggtgttaggaaagagtttccaattactgaggcagtaggatctgataagacaaataggcatcccttagaatgcttacctggtttaattcaggataaggaatggaatgagaaggagttacagaaacttcattgtgcttttgcatctcttccaaagcacaaacctggtttctggtcagaggtagctgcggctgtaggttctcgatctcctgaagaatgccagaggaaatacatggaaaatcccagaggaaaaggatcccagaaacatgtcactaagaagaagccagccaattccaaaggccaaaatggcaagagaggtgatgctgatcagaaacaaactattaagataactgccaaagtgggaactcttaaaaggaagcaacagatgagggaatttctggaacagttgccaaaagatgaccatgatgattttttcagtacaacacctttacagcatcaaagaatactgttgccaagtttccaggacagtgaagatgatgatgatattctgccaaatatggacaaaaatccaacaactccatcatcagttatctttccattggtaaaaactcctcaatgtcagcatgtcagtcctggcatgctaggttctataaataggaatgactgtgataaatatgtttttcgtatgcaaaaatatcataaaagtaatggtggtattgtctggggcaacatcaagaaaaaattagttgaaactgatttctcaactccaacaccaagaaggaaaaccccatttaacacagacttaggagaaaactctggtattggaaaacttttcactaatgctgtggaatctttagatgaagaagagaaagattattatttttcgaactctgattctgcatagtaaaatgagaaaatatgattcctgggatttttaccataaagcagacagtgtttgtattttcaactggagtacatgtattttctttgtaaagtagcttcctatgaaaatgtggacttttttgaaggtttcatatgtttgtgttcaaagtaaaatatcctcattgctgcagcttactaaaaatgtaaagaaaattgtttttgctcgtgtagatatctgtaaatttgtttttgcatattaaaatatatatagataattttttaataagcatccaagtctgtttactttaagaaaaccatttcccaaacagattttttttttatttcaagaaaattttgctaccatttaagtaagagaaggtgagaaggatgacagaggttgtattggtagctattgaattcatgaaaacttttaagttagcatttgttagcagttattatccaagccagagtaggatttgttaccagttgttatccaaacctaatgtttaaattacacattgttgaaattaaattacacattgttgacatgcttctctcctgattgtttttattttaaacttgtgataggcatatctatgaaacctttgtaaatttagtttattgctttaccattattttactaggtaaaattagagaacagattttgttctctaatttttaagccttatttacatatgcagaaacagcttaaatattttgactagattagacaaacagttaatagatccaccattaggaatcaatatattatgtcataataaacatcctttttctttcactgaaatttcttttagaaataaacttatttttgcttgttatgttttgaaacttgacataggatattttccctctggctacacattcacctacccttgttctctatttagattattcaaataaagttagtttgcttttatagtaaaaaaatc

SEQ ID NO: 418447 - DNA, 1648 bp, Homo sapiens
  misc_feature (9)..(9): n is a, c, g, or t
agaggatcnccggaaggcacactgcaacacatcagggtcaaatggttgaacatttgataaagagataaaggataaaggtctcttgaaagcagccaagaaggaagtgactcatgttaaaggatcctcaataagaggaagccagccaattccaaaggccaaaatggcaagagaggtgatgctgatcagaaacaaactattaagataactgccaaagtgggaactcttaaaaggaagcaacagatgagggaatttctggaacagttgccaaaagatgaccatgatgattttttcagtacaacacctttacagcatcaaagaatactgttgccaagtttccaggacagtgaagatgatgatgatattctgccaaatatggacaaaaatccaacaactccatcatcagttatctttccattggtaaaaactcctcaatgtcagcatgtcagtcctggcatgctaggttctataaataggaatgactgtgataaatatgtttttcgtatgcaaaaatatcataaaagtaatggtggtattgtctggggcaacatcaagaaaaaattagttgaaactgatttctcaactccaacaccaagaaggaaaaccccatttaacacagacttaggagaaaactctggtattggaaaacttttcactaatgctgtggaatctttagatgaagaagagaaagattattatttttcgaactctgattctgcatagtaaaatgagaaaatatgattcctgggatttttaccataaagcagacagtgtttgtattttcaactggagtacatgtattttctttgtaaagtagcttcctatgaaaatgtggacttttttgaaggtttcatatgtttgtgttcaaagtaaaatatcctcattgctgcagcttactaaaaatgtaaagaaaattgtttttgctcgtgtagatatctgtaaatttgtttttgcatattaaaatatatatagataattttttaataagcatccaagtctgtttactttaagaaaaccatttcccaaacagattttttttttatttcaagaaaattttgctaccatttaagtaagagaaggtgagaaggatgacagaggttgtattggtagctattgaattcatgaaaacttttaagttagcatttgttagcagttattatccaagccagagtaggatttgttaccagttgttatccaaacctaatgtttaaattacacattgttgaaattaaattacacattgttgacatgcttctctcctgattgtttttattttaaacttgtgataggcatatctatgaaacctttgtaaatttagtttattgctttaccattattttactaggtaaaattagagaacagattttgttctctaatttttaagccttatttacatatgcagaaacagcttaaatattttgactagattagacaaacagttaatagatccaccattaggaatcaatatattatgtcataataaacatcctttttctttcactgaaatttcttttagaaataaacttatttttgcttgttatgttttgaaacttgacataggatattttccctctggctacacattcacctacccttgttctctatttagattattcaaataaagttagtttgcttttatagtaaaaaaatc

SEQ ID NO: 418448 - DNA, 2919 bp, Homo sapiens
  misc_feature (485)..(485): n is a, c, g, or t
  misc_feature (512)..(512): n is a, c, g, or t
  misc_feature (524)..(524): n is a, c, g, or t
gatagattcacttatgttatgaatctatattgtctgaaacttttttcttaaaaaaatgattttcttaggcttcttcactctctctgactttactagctctagtaattgacgtacttttcataacagttttaagtaatcaaacagttatatcacttcagaagtgaaaaactctttgtcttcaaagacatctctttgataatagacttaccagttgctgatcctgaacaactggctaggcctgttcatttgttttttgtttgtttgtgagatggagttgctcaggttggagagcagtggcacaatctcggctcactgccgcctccatctaccaggttcgggcaattctcatgcctcagcctcccgagtagcagggattgcaggcgcatgcaaccgtgcctgggctaatttttgtatttttagcagagatggggtttcaccgtgttggccaggctggtcttgaactcctgacttcaggtaatccgccngccctcagcctcccaaagtgctgggantcacacctgttncatttgttaaagcaatttgctaaaaactgacgaggtttattccattgctatacagcagtgtttgattcagataaatatccttaatagagtcacatttccttcatgtcatgcctttaaggttgttccccaaatagtcataaagaacagaggatactcaggtatgtaagatcttagagccaagagagagtatggaaatggatgttcagctggtatttactgtcataagtgggattaggaattgtgggtttagggaattaaaaacaaccaacaattctacttggcttttaatctcttcagttatgagtgaagcatatttgcttgtaagggaagagataaggtaaaggaaatgaaataaagaaaaaaaatttggtggttggtatggggaattcaagaaagataaaattttgtagaaataaaaggcttgatgagctggattagaaacccagcacagttggaaaaattgacagttttcaatcaccaggcatatctttaaagtgaataaactgagattcaattaggacagggaaggaagtgaacaggagagataatggtatagcaaaagggagtccaaggagaagaagtctcagtgggagttttggaaaaccaagagaggcagcaagataccggaaagagcgtagacggtacaatgaacggtaagcaaagcataatttcccaaaatagtcttgatcagtatttcctgtaaaatgtttgatttaagcattttgtccatctccataggcacattttattgtcctctttaaaatacagaatgtactttttaaagatggaaatacgtttgaggtcaggcgtggtggctcacgactgtcatcccaacactttgggaggcccaggagggcagattgcttgatgagctcagtagtttgaaaccagcctgggcaatgtggtgaaaccctgtctcttaagaaaaatacaaagattagccaggcatgatggcacgtgcctgtagtccaagctacttgggaggctgagttgggaggatcacttgagcccaggaggttgaggctgcagtgagccattatcatgttactgcactccagcctgggcgacagagtgagaccctgtttcaaaaaaagaaatacatttgaaattaatttaggcaattgttgttcaacctgtggttaaaagtatgacagttaacttaaaattattaggttgacttaaaaatattgttgacttaaaattatttcgtattcaaacaggaatgactgtgataaatatgtttttcgtatgcaaaaatatcataaaagtaatggtggtattgtctggggcaacatcaagaaaaaattagttgaaactgatttctcaactccaacaccaagaaggaaaaccccatttaacacagacttaggagaaaactctggtattggaaaacttttcactaatgctgtggaatctttagatgaagaagagaaagattattatttttcgaactctgattctgcatagtaaaatgagaaaatatgattcctgggatttttaccataaagcagacagtgtttgtattttcaactggagtacatgtattttctttgtaaagtagcttcctatgaaaatgtggacttttttgaaggtttcatatgtttgtgttcaaagtaaaatatcctcattgctgcagcttactaaaaatgtaaagaaaattgtttttgctcgtgtagatatctgtaaatttgtttttgcatattaaaatatatatagataattttttaataagcatccaagtctgtttactttaagaaaaccatttcccaaacagattttttttttatttcaagaaaattttgctaccatttaagtaagagaaggtgagaaggatgacagaggttgtattggtagctattgaattcatgaaaacttttaagttagcatttgttagcagttattatccaagccagagtaggatttgttaccagttgttatccaaacctaatgtttaaattacacattgttgaaattaaattacacattgttgacatgcttctctcctgattgtttttattttaaacttgtgataggcatatctatgaaacctttgtaaatttagtttattgctttaccattattttactaggtaaaattagagaacagattttgttctctaatttttaagccttatttacatatgcagaaacagcttaaatattttgactagattagacaaacagttaatagatccaccattaggaatcaatatattatgtcataataaacatcctttttctttcactgaaatttcttttagaaataaacttatttttgcttgttatgttttgaaacttgacataggatattttccctctggctacacattcacctacccttgttctctatttagattattcaaataaagttagtttgcttttatagtaaaaaaatc

SEQ ID NO: 418449 - DNA, 1523 bp, Homo sapiens
aataccttttatggggtgcctgctgataataaatacttgttttctagttgccaagtttccaggacagtgaagatgatgatgatattctgccaaatatggacaaaaatccaacaactccatcatcagttatctttccattggtaaaaactcctcaatgtcagcatgtcagtcctggcatgctaggttctataaataggtaaatattcatgcatatgatatgttaattctctgcatcagagtagtgaggaacatttaaacatttcatgaggaccatagatgccagtaatgggaagaggcattatttaaaaaatcaagaatgtgtagtttctagaagttaaggatggacaagttcatcaaatcggggtgctattcaataaacagcattgtgatataacccacatttacttctggatcaattcgaaatggatcaaggttttacttgtaaaaaactttaaaaaaaaaaaactaaagaaaccttggagaattattttataataccagattagtgatggtctttctaactatactataaaacctacaagccattaatgaaaagatgaataaagtcaactgtgtaaaaatgtttaacaaattttacctggtaccaaccactacaaacaaaagacaacctgagaaaagaatatatgcaacttgtcacaggcaaaaggctaatttccgtaatatatacagcattcctacaaactaacaaggaatgcattgttaatttttgtgcattgctagtgagaaggtaaagtagtgcgatctttgcagcaacaatttgtaagtatcaaaattataaatgcacatgccctttgacttaggaattttacttatagaattgtgaatgtacagcttattcattgtagcattgtttaaatggcagtacctcaaaaatctatcagtagggactaattaaatgaactctggtccattatatagtcatagaaattaatgaagagccaggcacagtggctgaagcctgtaatcccagcactttgggaggatcacttgagcccaggagttcaagaccagcatgggcaacataggaagaccccatttctacaaaaaaaacccaaaaatgttagcaggatgcagtggggcaagcctgtggccctagctactagggaggctgatgtagaaggattgcttgagtcccagaggtgtaggctgcagtgagctgtgattgcaacaattgcactccatcctgggcaacagagtgagaacagagtgagatcctgtctcaaaaaaaaaagaaattaatgaagatattttttattgctattatgataaaatgcctaagatatattaaatgaaacaaaggtagatgcagtgaataatatactactgtttgtgtaaatagaagctatatgtatgtatgcatatatgtatatacttgtgtgtgtgtgtgtgtgtataattgcttttattagattaagtctttataaaaggatgcataagaaaccaaaacattggtgatccttagggagaactaaggtagctggaggaaggagaggggggctttt

SEQ ID NO: 418450 - DNA, 2849 bp, Homo sapiens
  misc_feature (485)..(485): n is a, c, g, or t
  misc_feature (512)..(512): n is a, c, g, or t
  misc_feature (524)..(524): n is a, c, g, or t
gatagattcacttatgttatgaatctatattgtctgaaacttttttcttaaaaaaatgattttcttaggcttcttcactctctctgactttactagctctagtaattgacgtacttttcataacagttttaagtaatcaaacagttatatcacttcagaagtgaaaaactctttgtcttcaaagacatctctttgataatagacttaccagttgctgatcctgaacaactggctaggcctgttcatttgttttttgtttgtttgtgagatggagttgctcaggttggagagcagtggcacaatctcggctcactgccgcctccatctaccaggttcgggcaattctcatgcctcagcctcccgagtagcagggattgcaggcgcatgcaaccgtgcctgggctaatttttgtatttttagcagagatggggtttcaccgtgttggccaggctggtcttgaactcctgacttcaggtaatccgccngccctcagcctcccaaagtgctgggantcacacctgttncatttgttaaagcaatttgctaaaaactgacgaggtttattccattgctatacagcagtgtttgattcagataaatatccttaatagagtcacatttccttcatgtcatgcctttaaggttgttccccaaatagtcataaagaacagaggatactcaggtatgtaagatcttagagccaagagagagtatggaaatggatgttcagctggtatttactgtcataagtgggattaggaattgtgggtttagggaattaaaaacaaccaacaattctacttggcttttaatctcttcagttatgagtgaagcatatttgcttgtaagggaagagataaggtaaaggaaatgaaataaagaaaaaaaatttggtggttggtatggggaattcaagaaagataaaattttgtagaaataaaaggcttgatgagctggattagaaacccagcacagttggaaaaattgacagttttcaatcaccaggcatatctttaaagtgaataaactgagattcaattaggacagggaaggaagtgaacaggagagataatggtatagcaaaagggagtccaaggagaagaagtctcagtgggagttttggaaaaccaagagaggcagcaagataccggaaagagcgtagacggtacaatgaacggtaagcaaagcataatttcccaaaatagtcttgatcagtatttcctgtaaaatgtttgatttaagcattttgtccatctccataggcacattttattgtcctctttaaaatacagaatgtactttttaaagatggaaatacgtttgaggtcaggcgtggtggctcacgactgtcatcccaacactttgggaggcccaggagggcagattgcttgatgagctcagtagtttgaaaccagcctgggcaatgtggtgaaaccctgtctcttaagaaaaatacaaagattagccaggcatgatggcacgtgcctgtagtccaagctacttgggaggctgagttgggaggatcacttgagcccaggaggttgaggctgcagtgagccattatcatgttactgcactccagcctgggcgacagagtgagaccctgtttcaaaaaaagaaatacatttgaaattaatttaggcaattgttgttcaacctgtggttaaaagtatgacagttaacttaaaattattaggttgacttaaaaatattgttgacttaaaattatttcgtattcaaacaggaatgactgtgataaatatgtttttcgtatgcaaaaatatcataaaagtaatggtggtattgtctggggcaacatcaagaaaaaattagttgaaactgatttctcaactccaacaccaagaaggaaaaccccatttaacacagacttaggagaaaactctggtattggaaaacttttcactaatgctgtggaatctttagatgaagaagagaaagattattatttttcgaactctgattctgcatagtaaaatgagaaaatatgattcctgggatttttaccataaagcagacagtgtttgtattttcaactggagtacatgtattttctttgtaaagtagcttcctatgaaaatgtggacttttttgaaggtttcatatgtttgtgttcaaagtaaaatatcctcattgctgcagcttactaaaaatgtaaagaaaattgtttttgctcgtgtagatatctgtaaatttgtttttgcatattaaaatatatatagataatttaaacaaacaacacaccacctctacacacccctatctctttccctctaatccctccacacgggaatccaccacttcctccctatcaccataccacactctcacctgcaaatcttcccttcctaacaatctctactccgtggacctcccctcatattaaccaataaaacattgtgccctcctcgccaaactcttataccgtcgccttttattccgcgccgatatcggcacatttggcatattcccctatgggtgcgttaacaattgcgtcgctttaaaagcgcgctggggctcgggtcccccttatagtgtgggtacctctctgccgtggtgaatacgaagggcccactcggttcttctccaatgggctcctcttcgggacaaggaacgtggcgctaattttcatacacgcgcaatctttacaccgtctttacaacagcgccgcggcgatactctcatatacataacctctcataggtggttttccctctacacgcgtattattatctgccattcagtcgccctctcttgtcggtgcctcctctctcacccatcactttggcggggctctctccgctcccggcgccctctctgcgtctcgcctc

SEQ ID NO: 418451 - DNA, 290 bp, Homo sapiens
ctcctccctcggcctcccagagtgctgggattacaggcgtgagccaccacacctagcgtcaaagttaattcttcatgtagaaaagcagcttctcttttatataaccatttattgaaatctccatctttgtattcatagaactgaagagtaataagcacagtgagtcaccaggagctacagaattaaacatgtgccacagtaattgccaaaataaaccaacattaaggttcccagatgaccaagtaaataatactattcaaaatggaggaggagatgacttatctaatcag

SEQ ID NO: 418452 - DNA, 515 bp, Homo sapiens
ttttttcttttaatgtaagttaattttgtaatgcttgtgctgcaagtaatacaggaaatatgttctttgttttatacttgattaggtagttcagctacaggaatggatgattaaaagcatcaataataatactgctatatgtgtagaaggaaaattgatgtaagtatactatttcattattcttttaataaaactttagttatgtgtaagcacttaagagttaatgcatgagaaatagcatcctccacaaagcaaagacctaacaaggttatgaactgaaggcaaaaaagtaaaattactgtgcaggtcctagccatgttgattgctaccagctttcttgtttttgcatgtttactcaagtttttcttaaaataatgacagttcaaatttgtatagtggtttatttttttctgaggtgctaataagtggactggtattatctgcttaattatatatgatcagttaatatttactacatgcatttcagtccagattctcacatctaaattgggaca

SEQ ID NO: 418453 - DNA, 606 bp, Homo sapiens
aagtaattgatgatacaccattttttccctagatgcatgaagaagcagaggctgtgttggcaacaccaccaaagcaacctatagttgatacatctgctgaatcctgacctcatatttatgatggatatagatacatactatatatattcatatttgtggatttcctaaaagcctcagaaaatacgactgactaggcagcaaagacaggagtatcttctgtacactgttccgcagttactggtacatgaacagttggaactgctgactttcctaaccaaaacaacttccttctctcctttgttgagccttttgaggggttcatgattcattaccacagttttaagagtttcagttaccattgtatgcaagagccaagcactgaatacctacataggttttctattttctttcattttaaaagcgtaatgacagtggaacaataatgggatatgcagaagcacccttcacaagttatttctgaatgatttttagggtaaataatacagatgccttgtttgttaactaacttgtggaaaggaagggaggtcttaaggtgtgttctattacacaatggggggggatcggtgggttatagggccttggcct

SEQ ID NO: 418454 - DNA, 2019 bp, Homo sapiens
tatgcatcattagataaagaagatttattgagtcctattaatcaaaataccctgcaacgatcttcctcagtgcggtccatggtgtccagtgccacatatgggggttcagatgattacattggtcttgctctcccggtggatataaatgatatattccaggtaaaggatattccctattttcagacaaaaaacataccaccacatgatgatcgaggtgcaagagcatttgcccatgatgcaggaggtcttccatctggaactggaggtcttgtaaaaaattcttttcacttgctacgacagcagatgagtcttacggaaataatgaattcaatccattcagatgcctctctgtttttagaaagtacagaagacactggactacaggaacatacagatgataactgcctttattgtgtctgtattgaaattctgggtttccagcccagcaaccaactgagtgcaatatgtagtcattcagactttcaagatattccatattctgattggtgtgagcagactatccataatcctttagaagtggttccctctaagttttcggggatttctggatgcagtgatggggtgtctcaagaaggctcagctagcagcaccaaaagcacagaattgttactaggtgttaaaacaattccagatgatacaccaatgtgccgtatactccttcgcagagaagttctaagattagtcattaacttgagtagttcagtttcaactaaatgccatgagactgggcttttaacaattaaggagaagtatcctcaaacatttgatgacatatgcctttactctgaggtttcccatttgctgtcacactgcacattcagacttccgtgtcggaggttcatacaagaattatttcaagatgtacagtttctacaaatgcatgaagaagcagaggctgtgttggcaacaccaccaaagcaacctatagttgatacatctgctgaatcctgacctcatatttatgatggatatagatacatactatatatattcatatttgtggatttcctaaaagcctcagaaaatacgactgactaggcagcaaagacaggagtatcttctgtacactgttccgcagttactggtacatgaacagttggaactgctgactttcctaaccaaaacaacttccttctctcctttgttgagccttttgaggggttcatgattcattaccacagttttaagagtttcagttaccattgtatgcaagagccaagcactgaatacctacataggttttctattttctttcattttaaaagcgtaatgacagtggaacaataatgggatatgcagaagcacccttcacaagttatttctgaatgatttttagggtaaataatacagatgccttgtttgttaactaacttgtggaaagcaggaatcagtgtctctaaggctgcatcctattaccacaatggggtgtgctataactgctggtattagagagggaactttggccctttcacgtttttcttaatgtttgtaacactacttcagaggtttataacctcaaagcagaagaagagcctcaacaacccgggacttataagttatttttatgttactagacttgcataaagattcttgttttccaactcttcattttgttgcaatgtgttattacaggatatatgaaccaattaaggtttttcactacagttcttgaataaaatttaaaaatcattttttattttaattaaaaatatttcccatttatagaatgcatatatttgcaatggacttccactttcatcaactttccatctcatcgctttaaacaggaacttgaacaagcactgttagtttagacctaaaggataggaaagcattaaataatactttggatctcctgaggaaaagataagtttgcttgcaatttacacattccatggggaaagaagagccatatttccttaaaaaaaacattattaaagcttgttattgagaaaaattgtagtgaaaagccttaagtaccaaattttaaagcagcag

SEQ ID NO: 418455 - DNA, 712 bp, Homo sapiens
tatgcatcattagataaagaagatttattgagtcctattaatcaaaataccctgcaacgatcttcctcagtgcggtccatggtgtccagtgccacatatgggggttcagatgattacattggtcttgctctcccggtggatataaatgatatattccaggtaaaggatattccctattttcagacaaaaaacataccaccacatgatgatcgaggtgcaagagcatttgcccatgatgcaggaggtcttccatctggaactggaggtcttgtaaaaaattcttttcacttgctacgacagcagatgagtcttacggaaataatgaattcaatccattcagatgcctctctgtttttagaaagtacagaagacactggactacaggaacatacagatgataactgcctttattgtgtctgtattgaaattctgggtttccagcccagcaaccaactgagtgcaatatgtagtcattcagactttcaagatattccatattctgattggtgtgagcagactatccataatcctttagaagtggttccctctaagttttcggggatttctggatgcagtgatggggtgtctcaagaaggctcagctagcaggacaaagccagattggtcccaggggttaaacaatccaatggtcaccaggggcgggcttcgcaagaggcttagatagcctactggggcccaggacgggggggggc

SEQ ID NO: 418456 - DNA, 1744 bp, Homo sapiens
tatgcatcattagataaagaagatttattgagtcctattaatcaaaataccctgcaacgatcttcctcagtgcggtccatggtgtccagtgccacatatgggggttcagatgattacattggtcttgctctcccggtggatataaatgatatattccaggtaaaggatattccctattttcagacaaaaaacataccaccacatgatgatcgaggtgcaagagcatttgcccatgatgcaggaggtcttccatctggaactggaggtcttgtaaaaaattcttttcacttgctacgacagcagatgagtcttacggaaataatgaattcaatccattcagatgcctctctgtttttagaaagtacagaagacactggactacaggaacatacagatgataactgcctttattgtgtctgtattgaaattctgggtttccagcccagcaaccaactgagtgcaatatgtagtcattcagactttcaagatattccatattctgattggtgtgagcagactatccataatcctttagaagtggttccctctaagttttcggggatttctggatgcagtgatggggtgtctcaagaaggctcagctagcagcaccaaaagcacagaattgttactaggtgttaaaacaattccagatgatacaccaatgtgccgtatactccttcgcagagaagttctaagattagtcattaacttgagtagttcagtttcaactaaatgccatgagactgggcttttaacaattaaggagaagtatcctcaaacatttgatgacatatgcctttactctgaggtttcccatttgctgtcacactgcacattcagacttccgtgtcggaggttcatacaagaattatttcaagatgtacagtttctacaaatgcatgaagaagcagaggctgtgttggcaacaccaccaaagcaacctatagttgatacatctgctgaatcctgacctcatatttatgatggatatagatacatactatatatattcatatttgtggatttcctaaaagcctcagaaaatacgactgactaggcagcaaagacaggagtatcttctgtacactgttccgcagttactggtacatgaacagttggaactgctgactttcctaaccaaaacaacttccttctctcctttgttgagccttttgaggggttcatgattcattaccacagttttaagagtttcagttaccattgtatgcaagagccaagcactgaatacctacataggttttctattttctttcattttaaaagcgtaatgacagtggaacaataatgggatatgcagaagcacccttcacaagttatttctgaatgatttttagggtaaataatacagatgccttgtttgttaactaacttgtggaaagcaggaatcagtgtctctaaggctgcatcctattaccacaatggggtgtgctataactgctggtattagagagggaactttggccctttcacgtttttcttaatgtttgtaacactacttcagaggtttataacctcaaagcagaagaagagcctcaacaacccgggacttataagttatttttatgttactagacttgcataaagattcttaaaacacaactcctcatcttgtaaaactctactactacacgatataaacacaacttctggactttcaaaacacaacttctgtacaattaaaacacaacttcttaacttcaaaaacacaactccgtcacacg

SEQ ID NO: 418457 - DNA, 2939 bp, Homo sapiens
  misc_feature (115)..(115): n is a, c, g, or t
gactgcagagccggggctgggctaggcgcgcgcttggagagcattgcgcgcggctgggcccgcggccggcggctcctcctcccactctgctcctcctcttttttctcctcctccncctcctcctccgcctcctcctcctcctcttcctcctcctcttcaattctcccggtggctcgactcggctcgcaggcttcggagaaacccctactccagtcgccgactcagcgcccaagagggtcgccttgggctgggggcgcaccccagggaggggaggggtccaggcagctgggccgccgcggacacctagcggcttcagggtgaaccccgaccgcagccgtcgccgcctcgggcagagtttgcgcccttgctttgcgccccgggcgctgaagccgggcgggcgatgcccgcggcgtgaaagcgcccgcggcgggcgccgacctctgtcctagtctcctgctccccccgccccgcttgtcccgtgcccttgtgaccctggctttggcgccgtcgcccaggcgccccgcaatgtagctgcccctgcgcctcggcgggaggcgtcctgccccgcgagcgcccggggcccggagcccggcctgggggctcagccgagctcgggcggggccggggccgcggtggcgatgcaccgggcccgttagcgccaggagcgccaggcagctgaggcggggggcaagccctccctcggaggagccgcgcccccggccccgccggtcccgccgcgatgctgttccacagtctgtcgggccccgaggtgcacggggtcatcgacgagatggaccgcagggccaagagcgaggctcccgccatcagctccgccatcgaccgcggcgacaccgagacgaccatgccgtccatcagcagtgaccgcgccgcgctgtgcgccggctgcgggggcaagatctcggaccgctactacctgctggcggtggacaagcagtggcacatgcgctgcctcaagtgctgcgagtgcaagctcaacctggagtcggagctcacctgtttcagcaaggacggtagcatctactgcaaggaagactactacaggcgcttctctgtgcagcgctgcgcccgctgccacctgggcatctcggcctcggagatggtgatgcgcgctcgggacttggtttatcacctcaactgcttcacgtgcaccacgtgtaacaagatgctgaccacgggcgaccacttcggcatgaaggacagcctggtctactgccgcttgcacttcgaggcgctgctgcagggcgagtaccccgcacacttcaaccatgccgacgtggcagcggcggccgctgcagccgcggcggccaagagcgcggggctgggcgcagcaggggccaaccctctgggtcttccctactacaatggcgtgggcactgtgcagaaggggcggccgaggaaacgtaagagcccgggccccggtgcggatctggcggcctacaacgctgcgctaagctgcaacgaaaacgacgcagagcacctggaccgtgaccagccataccccagcagccagaagaccaagcgcatgcgcacgtccttcaagcaccaccagcttcggaccatgaagtcttactttgccattaaccacaaccccgacgccaaggacttgaagcagctcgcgcaaaagacgggcctcaccaagcgggtcctccaggtctggttccagaacgcccgagccaagttcaggcgcaacctcttacggcaggaaaacacgggcgtggacaagtcgacagacgcggcgctgcagacagggacgccatcgggcccggcctcggagctctccaacgcctcgctcagcccctccagcacgcccaccaccctgacagacttgactagccccaccctgccaactgtgacgtccgtcttaacttctgtgcctggcaacctggagggccatgagcctcacagcccctcacaaacgactcttaccaaccttttctaatgactcgcaacccctcaccccacaatttctttaaaaaagaaattatctttagttgaattccaagtgtattttaaaatagaggctttgagcaactaactaaccacattttaggatctcgcctggaaacagaggtaaaaaaaagaagtgtgcgcccggctaatgcagcggtgtggaccgaggaacaacttggaagatctacctgcaacacaacatttgtgtcactgtacagttttgtggactgagcgaggaaaaacaacaaataatttaagttggctagagcttctgtattttcaaagactgccacgtgccttaggaatactgttttatctccatactttggatgacttgttcatttttctctccctctttttctctgtatatttatgaccagagcaaaaatgtaaaaaacaaaaaaaacaacaaaaaaagtttgttactttgaatagtcctaaaaagaaaaaaagaaaaaaaaaaaaggaaaaatcaaaccccctccaacggtcgctttgttgttttagaattttaaggtggaagtctgttcgaatatcagaatttgtaaaatctaaccagtaataaaaccacttattgaaactaaaaaaaaaaaaaaaaaaaaaaaaaaaaaaaaaaacaaaaaaaaaaaaaaaaacaaaaaaaaaatcatttaaaaaaaaaaaaacaaaaaaaataaaactacgacacaactaaaataaaacaaacatataaacgaacaggaagaaaaaatagaaaagaagagcaaagaacaacaaaaagaagagtataaagagaaacaaaataattgaaacaaaaaagaagagcgagaataaacaacaaggagaaaaaccactgagatgaagaagaagacaacacaatatggagagaagcacacagagagaacaaccataaaaaaacaaaagcgcaaaaataaaatttatgtattgcgacaaacacgaactggggagaaaaaagaaggtgaataagc

SEQ ID NO: 418458 - DNA, 2988 bp, Homo sapiens
  misc_feature (115)..(115): n is a, c, g, or t
gactgcagagccggggctgggctaggcgcgcgcttggagagcattgcgcgcggctgggcccgcggccggcggctcctcctcccactctgctcctcctcttttttctcctcctccncctcctcctccgcctcctcctcctcctcttcctcctcctcttcaattctcccggtggctcgactcggctcgcaggcttcggagaaacccctactccagtcgccgactcagcgcccaagagggtcgccttgggctgggggcgcaccccagggaggggaggggtccaggcagctgggccgccgcggacacctagcggcttcagggtgaaccccgaccgcagccgtcgccgcctcgggcagagtttgcgcccttgctttgcgccccgggcgctgaagccgggcgggcgatgcccgcggcgtgaaagcgcccgcggcgggcgccgacctctgtcctagtctcctgctccccccgccccgcttgtcccgtgcccttgtgaccctggctttggcgccgtcgcccaggcgccccgcaatgtagctgcccctgcgcctcggcgggaggcgtcctgccccgcgagcgcccggggcccggagcccggcctgggggctcagccgagctcgggcggggccggggccgcggtggcgatgcaccgggcccgttagcgccaggagcgccaggcagctgaggcggggggcaagccctccctcggaggagccgcgcccccggccccgccggtcccgccgcgatgctgttccacagtctgtcgggccccgaggtgcacggggtcatcgacgagatggaccgcagggccaagagcgaggctcccgccatcagctccgccatcgaccgcggcgacaccgagacgaccatgccgtccatcagcagtgaccgcgccgcgctgtgcgccggctgcgggggcaagatctcggaccgctactacctgctggcggtggacaagcagtggcacatgcgctgcctcaagtgctgcgagtgcaagctcaacctggagtcggagctcacctgtttcagcaaggacggtagcatctactgcaaggaagactactacaggcgcttctctgtgcagcgctgcgcccgctgccacctgggcatctcggcctcggagatggtgatgcgcgctcgggacttggtttatcacctcaactgcttcacgtgcaccacgtgtaacaagatgctgaccacgggcgaccacttcggcatgaaggacagcctggtctactgccgcttgcacttcgaggcgctgctgcagggcgagtaccccgcacacttcaaccatgccgacgtggcagcggcggccgctgcagccgcggcggccaagagcgcggggctgggcgcagcaggggccaaccctctgggtcttccctactacaatggcgtgggcactgtgcagaaggggcggccgaggaaacgtaagagcccgggccccggtgcggatctggcggcctacaacgctgcgctaagctgcaacgaaaacgacgcagagcacctggaccgtgaccagccataccccagcagccagaagaccaagcgcatgcgcacgtccttcaagcaccaccagcttcggaccatgaagtcttactttgccattaaccacaaccccgacgccaaggacttgaagcagctcgcgcaaaagacgggcctcaccaagcgggtcctccaggcatctctctagatttatcttctgcctcccagactctcctggaagcaaggtctggttccagaacgcccgagccaagttcaggcgcaacctcttacggcaggaaaacacgggcgtggacaagtcgacagacgcggcgctgcagacagggacgccatcgggcccggcctcggagctctccaacgcctcgctcagcccctccagcacgcccaccaccctgacagacttgactagccccaccctgccaactgtgacgtccgtcttaacttctgtgcctggcaacctggagggccatgagcctcacagcccctcacaaacgactcttaccaaccttttctaatgactcgcaacccctcaccccacaatttctttaaaaaagaaattatctttagttgaattccaagtgtattttaaaatagaggctttgagcaactaactaaccacattttaggatctcgcctggaaacagaggtaaaaaaaagaagtgtgcgcccggctaatgcagcggtgtggaccgaggaacaacttggaagatctacctgcaacacaacatttgtgtcactgtacagttttgtggactgagcgaggaaaaacaacaaataatttaagttggctagagcttctgtattttcaaagactgccacgtgccttaggaatactgttttatctccatactttggatgacttgttcatttttctctccctctttttctctgtatatttatgaccagagcaaaaatgtaaaaaacaaaaaaaacaacaaaaaaagtttgttactttgaatagtcctaaaaagaaaaaaagaaaaaaaaaaaaggaaaaatcaaaccccctccaacggtcgctttgttgttttagaattttaaggtggaagtctgttcgaatatcagaatttgtaaaatctaaccagtaataaaaccacttattgaaactaaaaaaaaaaaaaaaaaaaaaaaaaaaaaaaaaaacaaaaaaaaaaaaaaaaacaaaaaaaaaatcatttaaaaaaaaaaaaacaaaaaaaataaaactacgacacaactaaaataaaacaaacatataaacgaacaggaagaaaaaatagaaaagaagagcaaagaacaacaaaaagaagagtataaagagaaacaaaataattgaaacaaaaaagaagagcgagaataaacaacaaggagaaaaaccactgagatgaagaagaagacaacacaatatggagagaagcacacagagagaacaaccataaaaaaacaaaagcgcaaaaataaaatttatgtattgcgacaaacacgaactggggagaaaaaagaaggtgaataagc

SEQ ID NO: 418459 - DNA, 2576 bp, Homo sapiens
ctatttaaaaacccatcaccacaacagacaaaggacatattcatcatacccaaaagtttcctcatgtagcccctccctcccagtcttccttacctctccaccccaccaggcaacccctgatatgctttatgtaactatacattaatttgtatttcctagaattttatataattggaatcacacattgtatattctgttttatctggcttctttcactcagcaaaattattacgagattcactgacgttgtagcatgtatcattagttcattccttttattactgagtagtattcaactgtagggatacaccagtgattttacccattcccttattgatgaacattttggttgtttctagattttggctattgcaaataaagctgctatgaacattcatgtacaaaaaaaaacggggtcatcgacgagatggaccgcagggccaagagcgaggctcccgccatcagctccgccatcgaccgcggcgacaccgagacgaccatgccgtccatcagcagtgaccgcgccgcgctgtgcgccggctgcgggggcaagatctcggaccgctactacctgctggcggtggacaagcagtggcacatgcgctgcctcaagtgctgcgagtgcaagctcaacctggagtcggagctcacctgtttcagcaaggacggtagcatctactgcaaggaagactactacaggcgcttctctgtgcagcgctgcgcccgctgccacctgggcatctcggcctcggagatggtgatgcgcgctcgggacttggtttatcacctcaactgcttcacgtgcaccacgtgtaacaagatgctgaccacgggcgaccacttcggcatgaaggacagcctggtctactgccgcttgcacttcgaggcgctgctgcagggcgagtaccccgcacacttcaaccatgccgacgtggcagcggcggccgctgcagccgcggcggccaagagcgcggggctgggcgcagcaggggccaaccctctgggtcttccctactacaatggcgtgggcactgtgcagaaggggcggccgaggaaacgtaagagcccgggccccggtgcggatctggcggcctacaacgctgcgctaagctgcaacgaaaacgacgcagagcacctggaccgtgaccagccataccccagcagccagaagaccaagcgcatgcgcacgtccttcaagcaccaccagcttcggaccatgaagtcttactttgccattaaccacaaccccgacgccaaggacttgaagcagctcgcgcaaaagacgggcctcaccaagcgggtcctccaggtctggttccagaacgcccgagccaagttcaggcgcaacctcttacggcaggaaaacacgggcgtggacaagtcgacagacgcggcgctgcagacagggacgccatcgggcccggcctcggagctctccaacgcctcgctcagcccctccagcacgcccaccaccctgacagacttgactagccccaccctgccaactgtgacgtccgtcttaacttctgtgcctggcaacctggagggccatgagcctcacagcccctcacaaacgactcttaccaaccttttctaatgactcgcaacccctcaccccacaatttctttaaaaaagaaattatctttagttgaattccaagtgtattttaaaatagaggctttgagcaactaactaaccacattttaggatctcgcctggaaacagaggtaaaaaaaagaagtgtgcgcccggctaatgcagcggtgtggaccgaggaacaacttggaagatctacctgcaacacaacatttgtgtcactgtacagttttgtggactgagcgaggaaaaacaacaaataatttaagttggctagagcttctgtattttcaaagactgccacgtgccttaggaatactgttttatctccatactttggatgacttgttcatttttctctccctctttttctctgtatatttatgaccagagcaaaaatgtaaaaaacaaaaaaaacaacaaaaaaagtttgttactttgaatagtcctaaaaagaaaaaaagaaaaaaaaaaaaggaaaaatcaaaccccctccaacggtcgctttgttgttttagaattttaaggtggaagtctgttcgaatatcagaatttgtaaaatctaaccagtaataaaaccacttattgaaactaaaaaaaaaaaaaaaaaaaaaaaaaaaaaaaaaaacaaaaaaaaaaaaaaaaacaaaaaaaaaatcatttaaaaaaaaaaaaacaaaaaaaataaaactacgacacaactaaaataaaacaaacatataaacgaacaggaagaaaaaatagaaaagaagagcaaagaacaacaaaaagaagagtataaagagaaacaaaataattgaaacaaaaaagaagagcgagaataaacaacaaggagaaaaaccactgagatgaagaagaagacaacacaatatggagagaagcacacagagagaacaaccataaaaaaacaaaagcgcaaaaataaaatttatgtattgcgacaaacacgaactggggagaaaaaagaaggtgaataagc

SEQ ID NO: 418460 - DNA, 537 bp, Homo sapiens
gggctgtctagaggatcaccttcgacggtgttctgcaagtgaaggccccctgaagtggaagacagcattggtactaatggccaactcaaggttagttttttttttttgttcatttacctggtcccttggttttctcttcccaattaacaacaggaccgtagagatgggtccccttgtcctccattgcctttccaaatgcccatttccctttcattgaatattcacatatgcattaggtaaatcattcaattctcccatgtgcttctttttttccaaaggatttttatggtatagaaatacaactcctggaggagaagttaaaacttttgttttagaatgtaatttgttaaggaggagacgagtgattaagtagaatggcacactagatacctttgatcttatttacagacttgatttgcaaacaaagcaagataggagatggtaggtattaatcagtaagtgacaaagttggctttggagacatttaggagtgggaatatgataggagttttatgcagagaggctatgtcaacaagg

SEQ ID NO: 418461 - DNA, 4453 bp, Homo sapiens
gggctgtctagaggatcaccttcgacggtgttctgcaagtgaaggccccctgaagtggaagacagcattggtactaatggccaactcaagtttcattggggatcatgtccatggagctcctcatgctgtcatgccagaagtggaattccctgaccaattctttacagttctaaccatggaccatgaactggtgacactcagggatgtggtcatcaacttctctcaggaggaatgggaatatctggattctgctcagaggaacttgtactgggatgtgatgatggagaactacagcaacttactctcactgggtctacattgagacagatatcggtacaatggtgaccaagaccaatacagaccctgctctcatggaattgacatactagttcttgagatgtataataaacaaatttggagtccaggaatgagactaagcatttatctgtaggaaaagatattattcaaaacactggttctcagtgggaggtaatggaaagtagcaagttatgtggccttgaaggttccattttcagaaatgactggcaaagcaaaagcaagattgacgtacaaggacctgaagtgggatatttcagtcaaatgaaaatcatctctgaaaatgtgcccagttacaaaactcatgaatctcttactttacctcggagaactcatgacagtgagaagccctatgaatacaaggaatatgagaaggtcttcagttgtgacttagagtttgatgaatatcagaaaatacatactggtggaaaaaactatgaatgtaatcaatgttggaaaacctttgggatagataactccagtatgttacaactgaatattcatactggtgtgaaaccttgtaaatatatggaatatgggaatacatgtagtttttataaagactttaatgtataccagaaaattcataatgagaagttctataaatgtaaggaatacagaaggacctttgaaagagttggaaaagttactccacttcaaagagttcatgatggtgagaaacactttgaatgctcattctgtgggaaatcctttagagtgcatgcacaacttactcgacatcagaaaatccatactgatgagaaaacttacaaatgtatggaatgtggcaaggacttcagatttcattcacagcttaccgaacatcagagaattcatactggtgagaaaccctacaaatgtatgcactgtgagaaggtttttagaattagttcacagctcattgaacatcagagaattcacactggtgagaaaccttatgcatgtaaggaatgtgggaaggcttttggagtatgtagagaacttgctcgtcatcagagaattcatactggtaagaaaccctatgaatgcaaagcatgtggaaaggtctttagaaatagttcatccctgactagacatcagaggattcatactggtgaaaaaccctataaatgtaaagaatgtgagaaagcatttggagtaggtagtgaacttactcgacatgaaagaattcacagtggtcaaaaaccttatgaatgtaaggagtgtggaaagttctttagacttacgtcagcccttattcaacatcaaagaattcatagtggtgagaaaccttatgaatgtaaggtatgtgggaaggcctttagacatagttcagcccttacagaacatcagagaattcatactggagaaaaaccctatgaatgcaaggcatgtgggaaggcctttagacatagttcatcctttaccaaacatcagcgcattcatactgatgataaaccctatgaatgtaaggagtgtgggaattcctttagtgttgttgggcatcttacttgccaaccgaaaatttacactggtgagaaatcatttgactgaaataaatgtataaagtggttttttatttctgattttcacaggaaaatactgtggatggatttaataggtaatcaaggcaattcagtatctccctctcttaaagtctgtttttagacttcatggtcattctgtatgtagacgtagaattgcttagtcatagctgatatatacttatagctttgttagatgttgccaaatatttctcctttttatgttaaaaagtttttttcatgagtttctcatcctggcatgttttgtttacaatagcttttgatgtttgtattattgctcttttgactattcagttttttaattgtaatattacttcaatatcttttctgcattgtaattctttgcttgtgatatctatacttacttattttcctccacagagttagcactcctagtcagatacaatgtatttttacagtcttacagctcatcattttgtgtaatgttcttgttttgttttgttttaaatgatagaagtgtgatctcctttccattttcatccaattgttgacttctctttaaatttctactttattttgatacaacatattccccccaaaaaaacacatacataggaactggttatattccaccataacacacacacacacacacacactatatacatatagtgtatatacacatatagtgtatatagtgtatgtgtgatgtatactatacatatcacatatactatatgtgtgtatatagtgtgtgatgtatatgtgtgtgatgtatactatatatgcccacacatgcactacataacacactatatatatatatatatatatacacacacacacacacaatatatgtatatatagtatatacactatatactgggcactatatatatatagtgtgtatgtgtgttatattggaatataaccagttcctttaagcagtctttttacctgcaggctataccaaccaggatccaaatgaagagaactcttttaaatatttgataaaactactcacccagtaagtctcttaaaatttatcattctcttaaagtatcactctaaaatttgtcaaacacctttaaaaggggagaaaaaatgaccactgaacttacattaagagaatttacaactatatattaacatggcttcaattgtttttttaatctattatcattatttttctttttattccctctcagagttgacttactaggtttgggcatttcaacaatcagcagaccttctttggtttaactaatctcatttaactccaaaatcatctctctcttaggactgctgacttggttatgcagtcaatgagatcacgagccactggttattggattttttttctttttttttagacagagttttgctcttgttgcctaggctggagtgcagtggcgcagtcttggctcacctcaacctctgcctcccaggttcaagctattctcctgctcagcctcctgattagctgggattacaggcatgcgccaccatgaccggctaattttatatttttagtagagacgggatatctccgtgttggtcagtctggtctcaaactcccgacctcaggtgatccacccgcctcagcctcccaaagtgctgggattacaggcatgagccaccgcacccagcctggttattggatttatttatttattttgagatagagccttgctctgtcaccaggccggagtgcagtggtgtcatctcagctcactgcaacctccacctcccaggttcaagcgattcccctgcctcagcctgccaagtagctgggattacaggcatgcgccaccatgcccagctaattgtattttagtagatatggagtttcaccacgttggccaagacagtctcgatttcctgaccttgtgatccccctgcctcggcctcccaaagtgctgggattacaggcatgagccaccacgcctgtccggttatttgatttttataagaaaattttactattattttcagataaatttatgtcactgtcattcattacattttaatttttgaaactgatgtctttcccagaatttatgtactctataacggtgtgaatgattaccagtattaagccattttctcatctgatatattgagctatgttttatgtaagtattgcttattcaagtagttttaaaagatatgtaattggttgttgtttcatgtcctacacagtaagaacaagagtatgttaacctttttgtcaggatatttgctatttcatatctttgaaatagagtagtagctctatttctaactaaattctatttatgtaacaacacagctaatttactcttggatctcattctccctttttatcctgagttaccatcagtgctaatgttcctcttttgggtatagttctccaggagaacttgtcctatatttctttgtgtgtgtttttttccttccagcttaaacaaattaaaactaaatatctaaaccttgtatacagacattaaaattagtgagagaaacaaaatatccttgtgtcttggcttttactttttgaagtcattaacaaataataaattaatgaataaaatgtgtccttattatgttttccttgtttgtagttacagcta

SEQ ID NO: 418462 - DNA, 1365 bp, Homo sapiens
gggctgtctagaggatcaccttcgacggtgttctgcaagtgaaggccccctgaagtggaagacagcattggtactaatggccaactcaagtttcattggggatcatgtccatggagctcctcatgctgtcatgccagaagtggaattccctgaccaattctttacagttctaaccatggaccatgaactggtgacactcagggatgtggtcatcaacttctctcaggaggaatgggaatatctggattctgctcagaggaacttgtactgggatgtgatgatggagaactacagcaacttactctcactgggtctacattgagacagatatcggtacaatggtgaccaagaccaatacagaccctgctctcatggaattgacatactagttcttgagatgtataataaacaaatttggagtccaggaatgagactaagcatttatctgtaggaaaagatattattcaaaacactggttctcagtgggaggtaatggaaagtagcaagttatgtggccttgaaggttccattttcagaaatgactggcaaagcaaaagcaagattgacgtacaaggacctgaagtgggatatttcagtcaaatgaaaatcatctctgaaaatgtgcccagttacaaaactcatgaatctcttactttacctcggagaactcatgacagtgagaagccctatgaatacaaggaatatgagaaggtcttcagttgtgacttagagtttgatgaatatcagaaaatacatactggtggaaaaaactatgaatgtaatcaatgttggaaaacctttgggatagataactccagtatgttacaactgaatattcatactggtgtgaaaccttgtaaatatatggaatatgggaatacatgtagtttttataaagactttaatgtataccagaaaattcataatgagaagttctataaatgtaaggaatacagaaggacctttgaaagagttggaaaagttactccacttcaaagagttcatgatggtgagaaacactttgaatgctcattctgtgggaaatcctttagagtgcatgcacaacttactcgacatcagaaaatccatactgatgagaaaacttacaaatgtatggaatgtggcaaggacttcagatttcattcacagcttaccgaacatcagagaattcatactgggaggctgaacaatctactgttggaggaagctgagaagaccatggaagggaaatggaagctgctcacatattccttccctcatgcaggtgtccatctttacctaagattcagttgtaggaagaagtcttaattttaaacagttcagagtactaattattgtaatataccaggtatttcatttagcaaa

SEQ ID NO: 418463 - DNA, 316 bp, Homo sapiens
caccgtgttagccaggatagtctcaatctcctgacctcgtgatctgcccgccttggcctcccaaagtggtgggattacaggtgtaagccactgcacccagcccagactgtgttttgtttgtttgttttaaaaaaagaaacaaaagcctggcacttggaggaaattaagatcttcagtgccaccaactgttttccagttcatcttgtatttagacttatgtatgtatatattgaccaaaaaaaatgctcattcatattctcaatatttattcaggtctacattgagacagatatcggtacaatggtgaccaagacca

SEQ ID NO: 418464 - DNA, 4466 bp, Homo sapiens
  misc_feature (1)..(1): n is a, c, g, or t
nttattgagttaagcctggcgagtcgaggtgacccgggccgggctgcgggaggagctcgcggtgaggtggccccgcgctgccgggcgaggtcggtccacgtggagccgggagcctgaggcctctgtacgcgggagctgcggacgatggtgttctgcaagtgaaggccccctgaagtggaagacagcattggtactaatggccaactcaagtttcattggggatcatgtccatggagctcctcatgctgtcatgccagaagtggaattccctgaccaattctttacagttctaaccatggaccatgaactggtgacactcagggatgtggtcatcaacttctctcaggaggaatgggaatatctggattctgctcagaggaacttgtactgggatgtgatgatggagaactacagcaacttactctcactgggtctacattgagacagatatcggtacaatggtgaccaagaccaatacagaccctgctctcatggaattgacatactagttcttgagatgtataataaacaaatttggagtccaggaatgagactaagcatttatctgtaggaaaagatattattcaaaacactggttctcagtgggaggtaatggaaagtagcaagttatgtggccttgaaggttccattttcagaaatgactggcaaagcaaaagcaagattgacgtacaaggacctgaagtgggatatttcagtcaaatgaaaatcatctctgaaaatgtgcccagttacaaaactcatgaatctcttactttacctcggagaactcatgacagtgagaagccctatgaatacaaggaatatgagaaggtcttcagttgtgacttagagtttgatgaatatcagaaaatacatactggtggaaaaaactatgaatgtaatcaatgttggaaaacctttgggatagataactccagtatgttacaactgaatattcatactggtgtgaaaccttgtaaatatatggaatatgggaatacatgtagtttttataaagactttaatgtataccagaaaattcataatgagaagttctataaatgtaaggaatacagaaggacctttgaaagagttggaaaagttactccacttcaaagagttcatgatggtgagaaacactttgaatgctcattctgtgggaaatcctttagagtgcatgcacaacttactcgacatcagaaaatccatactgatgagaaaacttacaaatgtatggaatgtggcaaggacttcagatttcattcacagcttaccgaacatcagagaattcatactggtgagaaaccctacaaatgtatgcactgtgagaaggtttttagaattagttcacagctcattgaacatcagagaattcacactggtgagaaaccttatgcatgtaaggaatgtgggaaggcttttggagtatgtagagaacttgctcgtcatcagagaattcatactggtaagaaaccctatgaatgcaaagcatgtggaaaggtctttagaaatagttcatccctgactagacatcagaggattcatactggtgaaaaaccctataaatgtaaagaatgtgagaaagcatttggagtaggtagtgaacttactcgacatgaaagaattcacagtggtcaaaaaccttatgaatgtaaggagtgtggaaagttctttagacttacgtcagcccttattcaacatcaaagaattcatagtggtgagaaaccttatgaatgtaaggtatgtgggaaggcctttagacatagttcagcccttacagaacatcagagaattcatactggagaaaaaccctatgaatgcaaggcatgtgggaaggcctttagacatagttcatcctttaccaaacatcagcgcattcatactgatgataaaccctatgaatgtaaggagtgtgggaattcctttagtgttgttgggcatcttacttgccaaccgaaaatttacactggtgagaaatcatttgactgaaataaatgtataaagtggttttttatttctgattttcacaggaaaatactgtggatggatttaataggtaatcaaggcaattcagtatctccctctcttaaagtctgtttttagacttcatggtcattctgtatgtagacgtagaattgcttagtcatagctgatatatacttatagctttgttagatgttgccaaatatttctcctttttatgttaaaaagtttttttcatgagtttctcatcctggcatgttttgtttacaatagcttttgatgtttgtattattgctcttttgactattcagttttttaattgtaatattacttcaatatcttttctgcattgtaattctttgcttgtgatatctatacttacttattttcctccacagagttagcactcctagtcagatacaatgtatttttacagtcttacagctcatcattttgtgtaatgttcttgttttgttttgttttaaatgatagaagtgtgatctcctttccattttcatccaattgttgacttctctttaaatttctactttattttgatacaacatattccccccaaaaaaacacatacataggaactggttatattccaccataacacacacacacacacacacactatatacatatagtgtatatacacatatagtgtatatagtgtatgtgtgatgtatactatacatatcacatatactatatgtgtgtatatagtgtgtgatgtatatgtgtgtgatgtatactatatatgcccacacatgcactacataacacactatatatatatatatatatatacacacacacacacacaatatatgtatatatagtatatacactatatactgggcactatatatatatagtgtgtatgtgtgttatattggaatataaccagttcctttaagcagtctttttacctgcaggctataccaaccaggatccaaatgaagagaactcttttaaatatttgataaaactactcacccagtaagtctcttaaaatttatcattctcttaaagtatcactctaaaatttgtcaaacacctttaaaaggggagaaaaaatgaccactgaacttacattaagagaatttacaactatatattaacatggcttcaattgtttttttaatctattatcattatttttctttttattccctctcagagttgacttactaggtttgggcatttcaacaatcagcagaccttctttggtttaactaatctcatttaactccaaaatcatctctctcttaggactgctgacttggttatgcagtcaatgagatcacgagccactggttattggattttttttctttttttttagacagagttttgctcttgttgcctaggctggagtgcagtggcgcagtcttggctcacctcaacctctgcctcccaggttcaagctattctcctgctcagcctcctgattagctgggattacaggcatgcgccaccatgaccggctaattttatatttttagtagagacgggatatctccgtgttggtcagtctggtctcaaactcccgacctcaggtgatccacccgcctcagcctcccaaagtgctgggattacaggcatgagccaccgcacccagcctggttattggatttatttatttattttgagatagagccttgctctgtcaccaggccggagtgcagtggtgtcatctcagctcactgcaacctccacctcccaggttcaagcgattcccctgcctcagcctgccaagtagctgggattacaggcatgcgccaccatgcccagctaattgtattttagtagatatggagtttcaccacgttggccaagacagtctcgatttcctgaccttgtgatccccctgcctcggcctcccaaagtgctgggattacaggcatgagccaccacgcctgtccggttatttgatttttataagaaaattttactattattttcagataaatttatgtcactgtcattcattacattttaatttttgaaactgatgtctttcccagaatttatgtactctataacggtgtgaatgattaccagtattaagccattttctcatctgatatattgagctatgttttatgtaagtattgcttattcaagtagttttaaaagatatgtaattggttgttgtttcatgtcctacacagtaagaacaagagtatgttaacctttttgtcaggatatttgctatttcatatctttgaaatagagtagtagctctatttctaactaaattctatttatgtaacaacacagctaatttactcttggatctcattctccctttttatcctgagttaccatcagtgctaatgttcctcttttgggtatagttctccaggagaacttgtcctatatttctttgtgtgtgtttttttccttccagcttaaacaaattaaaactaaatatctaaaccttgtatacagacattaaaattagtgagagaaac

SEQ ID NO: 418465 - DNA, 517 bp, Homo sapiens
cttgggaggctgagcccggagaatcgcttgaacctgggaggctgaggttgcagtgagccaaggtcgcgcccttgcactccagcctgggccacgagagcgaaactctgtcttaaaccaaccaaataaaaaataaaaaaataaaaaaaaaataagactttaactgcagttccaaagcttctctaacccaaaaattacagtaccaaatgattgactcaggattgtttttcccatattgatatgctggcaatataggatggtatgtaatggacagaactgatgcagatggttgaatgcgcttgtactatatgctaaaatatggaaaaggaaaaaaaaatctcacaagttcttttggaacttgtttcaagccaaaaactctcaagaaagcaaattgcacctcagctggattgatttccaaatgctagcatgtactgtatgggaggatgatccagatgtttcaaagagaatttctcttagtttagttaggtgtaattcagtagctttaaattctcaggtcaga

SEQ ID NO: 418466 - DNA, 2978 bp, Homo sapiens
ttttaagcccttcttcttttaaagcagagtgttctgaggatgtagagaatttaaatgcccctcctgctgaggctgggtatgatcaaaataaaaccgattttgatgagacttcatcgattaatacggcaatcagtgacgccaccaccggagacgagggaaacactgaaatggaaagcaccacaggaagttccggagatgtgaaaccggctttgtctcccaaagagccaaaaactctggatactctgccaaaacctgcaaccacacctaccacggaggtctgcgatgacaaatttctcttttctctcacaagcccatccatccatttcaatgacaaagatggcgaccacgaccaaagcttttacatcacagatgacccggatgacaacgccgaccgcagcgaaacgtccagcatagcggacccgagctccccaaatccattcggatccagcaatccctttaaatccaaaagtaatgatcggccgggtcacaagcgttttcgaacgcaaatgagcaatcttcaactcaaggttctcaaggcttgctttagtgactaccgaactccaaccatgcaagaatgtgaaatgttagggaatgagattggtctgcccaaacgcgtagtccaggtgtggttccaaaatgcaagggcaaaggaaaagaaatttaaaattaacatagggaagcctttcatgatcaatcaaggcggaacggaaggcaccaaaccagagtgtaccctctgcggggtgaagtactctgcccgcttgtccatcagagatcacattttctccaaacagcacatttcaaaagtgagggagaccgttggcagtcagctcgatcgggagaaagattacttggctccgaccacggttcggcagctgatggcacagcaagaacttgatcgtataaagaaagcttcagacgtgctgggcttgacggtacagcagccaggcatgatggacagcagttctctccacggcatcagcctgccaacagcctaccccggactccccggccttcctccagtccttctccccggaatgaacggtccatcctccttgccgggatttccacaaaattcaaacactttaacacctcccggtgcaggcatgcttgggtttcctacttcagctacttcgtctcctgccctgtctctcagcagtgcccccaccaaacctttgctgcagactccaccacctccaccacctcctcctcctcctcctccttcatcctctctgtcaggacagcagaccgagcaacagaacaaagaatctgagaaaaagcaaactaagccaaacaaggtgaaaaaaaatcaaagaggaggaattagaggccaccaaacccgaaaaacaccccaaaaaagaggaaaaaatctcatctgctctttcagtggtgggcaaagttgtaggtgaaacacatgtcgatcctattcagttgcaggcattacagaatgcaattgctggtgacccagcttcctttataggcggacagttcttgccatactttatccctgggtttgcttcttattttacacctcagctccctggaacagtgcaggggggatacttcccacctgtctgtggcatggagagcctctttccttatggccctacaatgccccagacactggcaggtctgtccccaggtgcactgttgcagcagtaccaacagtatcagcagaacctgcaggagtccctgcaaaagcagcaaaagcaacagcaagaacagcagcagaaaccagttcaggcaaagacatccaaagtagaaagtgaccagccgcaaaactccaacgatgcttcagaaacaaaggaagacaaaagtactgctacagaaagcacaaaagaagaaccccagttagaatccaaaagtgcagacttttcagacacttacgttgttccattcgtcaagtatgagtttatatgcagaaagtgccagatgatgtttactgatgaagacgccgcagtaaatcatcaaaagtccttctgttatttcggtcagcctttgattgacccacaagagacagtgcttcgtgtcccagtcagcaaatatcagtgtcttgcctgtgatgtggctatcagtgggaatgaagcacttagccaacacctccagtcaagcttgcacaaagagaaaacaatcaaacaagcaatgagaaatgccaaagagcatgttagattattacctcactcagtctgctcccctaatcctaacaccacatctacctcgcagtctgcagcttcttctaataacacctatcctcatctttcttgcttctccatgaagtcctggcctaatatccttttccaagcgtctgccaggagagctgcttctcccccttcttctcctccttccctttccttgccttcaacggttacctcaagtttgtgcagcacctcaggggttcaaacctcactacccacagaaagttgttcagatgagtctgacagtgagctgagccagaagctagaagacttagataattctttggaagtgaaggctaagcctgcttctggcctagatggtaatttcaatagcatccgaatggatatgttcagtgtgtaggagtgaagacaggatcccgtgcttaaaaaaataaaaaataaaaaaataaaaaaaaaataagactttaactgcagttccaaagcttctctaacccaaaaattacagtaccaaatgattgactcaggattgtttttcccatattgatatgctggcaatataggatggtatgtaatggacagaactgatgcagatggttgaatgcgcttgtactatatgctaaaatatggaaaaggaaaaaaaaatctcacaagttcttttggaacttgtttcaagccaaaaactctcaagaaagcaaattgcacctcagctggattgatttccaaatgctagcatgtactgtatgggaggatgatccagatgtttcaaagagaatttctcttagtttagttaggtgtaattcagtagctttaaattctcaggtcaga

SEQ ID NO: 418467 - DNA, 1753 bp, Homo sapiens
ctgctctcatcacctatatactcttctctctgcccgtctctgcttccccccccttccccccccccttttctcccggccgacggagctgaaggggcgggggttccttccttggagtgtttctagagctcggaggctgctggtaggggggcaccactttcagataaaaacatagacctgaatggcatcatccagtatccaaggaaaccattgtgtctgtaaccagctaatgagctgcaacagagcctggccttcattttcagcaaattaagttcatccctcataggaattgtggtctggctgtggcaccgctcctaggttctctaaacatgaatatgcctttgggggaagacagaagaacatggaagccatgtgaaaaaaacggatcctaaggtataaacaaagtgcagatgattgtcggccatgctgcagggatttcttgtttgtcttctcagtagtgttagctaattttgtcttccaatccgcaattccttataggacttggacgctttgaacctctcaggacccctcagattctagtacataaactcggagccaaattcacagccagctctccttcaaactgccttatctgtttttgagttaattagaagggccttttaacaactttgcatttgagtcctaagaaaagtctagttcattaggcaataaagccactgtgctggcccctaatcaaggtcagtacatatcattatacgactgatccaaatttgagttggttcagttatttcatttgttcattgtccacaatgttccagtcacagtaccaggtgctcagagtgtggtgttagagacaagattcaaagtaagtaattttagaccaatgtcatatgcgccattatagaagtacggctgaaaatggaatttatataaataagcatgtgagtggttcactaaacagggatgggcaagaaagaccttacagaagagatgaatatcttagcgaataacttagcaggatttcaaagaatggacgagagttttgcaggcagatgagataggaagggtgccagagagaaaggaaagcatgggcaagggctcaggaggtggggaaaaatgtgatatagtttgaggtactggagtatgaagttaacaaggggagaatatttagaaggaaggatggagaagtaggcagagagcagattatcaggttaaaatattagaaattagtattgaagtttactagaagccagcagcacgttcaatgcaagcaggtgccatggtcatattagttttagtttagtaatcagtgtagaaggtggatgagagggggtgagtctggaggcaataagcatagttggtagtagcagtctaggtgtcacctgacaggggcctttactagcccagtggtggacatttttaatgcattagtctttcttctagtctgtgaatttcttataacgagggtgtggtcttcctcacacttgtttcttcacacttgttgcctactatcatacctgacatgcagtaaattaccatagcaagacaaaaaatctcttaaacgtgtactctttattactctgttggaccatgatgagagcaacttattgtatggctatttaaaattatttatgaagataatattttttgtgttggaaatgctacaataatttaattgtgagatttataactaagacttattgttcacatttgttttatgttttcatatatgtgatgaaatagacaatttactctgtaagtcttaaatataaaaatgattcattatttctttctg

SEQ ID NO: 418468 - DNA, 742 bp, Homo sapiens
tgcgtccaggaaggaagtgacagaagacgaatgggaaaaggagaacagctcacagcgtttgaaacatcgcggcaccactttcagataaaaacatagacctgaatggcatcatccagtatccaaggaaaccatgcagttttgaacatctggaggcctgatttattggagattgcaaatgtacagtgtaacatagctgtggagagcgagaagatcaggattgtcaatgctgtcattgcttttactggaatccccagcacgaattgaaggtttgaccagagacaaagaagcaaatgctatcaattaacattcacatgtggtaggaattctactagtgcatgtggagagaaacatggctgctgcatggagtcataaacctcagaggaagctgagaatgagatgaaatgtatatgtaacccttgtgtatggcaagtttggcaagaaagaaaaagcatacttggcagattaagataaggtttctctctgtttactgatatagtctcaggtttgcattgtgtgatgaataataggttgggggaagatatcctttgtttattcattcatttcatcaacaaatatttaatgagtacctactatatgccatgccacaaagagtataaacctagagacagaatgttgagtcacatagacagtgctcctgatacaattatttgaactgagttaacaatacttcaaggttccatgtctaatttactggctaggttctcaacaaaatttctggata

SEQ ID NO: 418469 - DNA, 1230 bp, Homo sapiens
ctgctctcatcacctatatactcttctctctgcccgtctctgcttccccccccttccccccccccttttctcccggccgacggagctgaaggggcgggggttccttccttggagtgtttctagagctcggaggctgctggtagggggaagttgtacccgtcagcacctgctgagggctttgttgtccaaaccctgacaggtaaaaaaattcctgcagaataaagccagaccagctggctttgaagagaaaccccccagtttgggctgcgtttgcctcctctccttttctatgaagaccgaggctttgcccccttgatcgtcaagccgtgagatgcgtgatctctctgcacaagtgtctggcaggccgaggtgcacctgtttctgtcactctggagtaaatttagctgtaaagggcaccactttcagataaaaacatagacctgaatggcatcatccagtatccaaggaaaccattgtgtctgtaaccagctaatgagctgcaacagagcctggccttcattttcagcaaattaagttcatccctcataggaattgtggtctggctgtggcaccgctcctaggttctctaaacatgaatatgcctttgggggaagacagaagaacatggaagccatgtgaaaaaaacggatcctaaggcagttttgaacatctggaggcctgatttattggagattgcaaatgtacagtgtaacatagctgtggagagcgagaagatcaggattgtcaatgctgtcattgcttttactggaatccccagcacgaattgaaggtctcactttgccacctaggctggatgcaatgcaacggtatgttgatcttggttcactgcagcctcaacctcctgagctcatgtgatcctcccacctcagtcccccacgtcgcttggattacaggcctgtgccaccacacctggctaactttttttgtaatttttgtagagacagggtctcactatgtttcccatgctggtctttaatgcctgagctcaagccatccgcctgcctcggcctcccaaattgctgggattacaggcatgagccaccatgcccagcctaattcttctaaatcttatcctagtaattaagccagaatttttctctgccaagaccaatagatggaccaagaagtactcatccttgtaaactttctttggataaattgcttacatataataaattcagagttaagtaataaaaataatgaactact

SEQ ID NO: 418470 - DNA, 961 bp, Homo sapiens
ctcaccagtgcctttctgcttctccaggaagttgtacccgtcagcacctgctgagggctttgttgtccaaaccctgacaggtaaaaaaattcctgcagaataaagccagaccagctggctttgaagagaaaccccccagtttgggctgcgtttgcctcctctccttttctatgaagaccgaggctttgcccccttgatcgtcaagccgtgagatgcgtgatctctctgcacaagtgtctggcaggccgagggcaccactttcagataaaaacatagacctgaatggcatcatccagtatccaaggaaaccatgttctctaaacatgaatatgcctttgggggaagacagaagaacatggaagccatgtgaaaaaaacggatcctaaggcagttttgaacatctggaggcctgatttattggagattgcaaatgtacagtgtaacatagctgtggagagcgagaagatcaggattgtcaatgctgtcattgcttttactggaatccccagcacgaattgaaggtctcactttgccacctaggctggatgcaatgcaacggtatgttgatcttggttcactgcagcctcaacctcctgagctcatgtgatcctcccacctcagtcccccacgtcgcttggattacaggcctgtgccaccacacctggctaactttttttgtaatttttgtagagacagggtctcactatgtttcccatgctggtctttaatgcctgagctcaagccatccgcctgcctcggcctcccaaattgctgggattacaggcatgagccaccatgcccagcctaattcttctaaatcttatcctagtaattaagccagaatttttctctgccaagaccaatagatggaccaagaagtactcatccttgtaaactttctttggataaattgcttacatataataaattcagagttaagtaataaaaataatgaactact

SEQ ID NO: 418471 - DNA, 972 bp, Homo sapiens
ctgctctcatcacctatatactcttctctctgcccgtctctgcttccccccccttccccccccccttttctcccggccgacggagctgaaggggcgggggttccttccttggagtgtttctagagctcggaggctgctggtagggggaagttgtacccgtcagcacctgctgagggctttgttgtccaaaccctgacaggtaaaaaaattcctgcagaataaagccagaccagctggctttgaagagaaaccccccagtttgggctgcgtttgcctcctctccttttctatgaagaccgaggctttgcccccttgatcgtcaagccgtgagatgcgtgatctctctgcacaagtgtctggcaggccgaggtgcacctgtttctgtcactctggagtaaatttagctgtaaagggcaccactttcagataaaaacatagacctgaatggcatcatccagtatccaaggaaaccattgtgtctgtaaccagctaatgagctgcaacagagcctggccttcattttcagcaaattaagttcatccctcataggaattgtggtctggctgtggcaccgctcctagacatgacaaactccaaaaggaaacccaagcagctatttggctcccttaattaatgaagtcgcccagtatggataattcaggttctctaaacatgaatatgcctttgggggaagacagaagaacatggaagccatgtgaaaaaaacggatcctaaggctttttacctgtctgttgaactgagtgaaggacccagaggccctatgatgtggtgtagcttcgagagaaggaagcctagatccctgaatcattgtgcagaacatacttatcctacagccatataggactgttatatgagtaagcgctgaagttatttcttaggttattgaactttccaagcatatctattacattaattagtgttacctcaataaaagcatgtacttcacagaac

SEQ ID NO: 418472 - DNA, 96 bp, Homo sapiens
ctctgcacaagtgtctggcaggccgaggtgcacctgtttctgtcactctggagtaaatttagctgtaaaggtatcactgacaaccagacctttgtc

SEQ ID NO: 418473 - DNA, 1874 bp, Homo sapiens
tagctatcttgatttcactacagctcagtagcagttcagtgctttggctttggagtcacagccaagttcaagtcatggttgtgtgactttggattttattaactatatatttctgttttccatctgctgctaaggtgatgccatctggtataatgagaatgaaatgagatgtttattaaacactgaggatcagtgcctagcatatacaagcacttagtaattatatttttatcattagtctaattctggtctcttgatctttctttagttcctaaagtccttactatggtttctattcatgtggctcttacatgaacaatacatgacacaaatatgatagtgtttgaatgtctgtcatgcacataatagtctgctagaaatttcgaaaatgaataagactggctgggcacggtggctcatgcctgtaatcccagcactgttagaggtcaaggcgggcagatcacctgaggtccggcattcaagaccagcctggccaacatggtgaaaccctgtctctactaaaaatacaaaaaatagtggggcatggtggcgcattcctgtaatctcagctactcgggaggctgagacaggagaatcacttgaacccgggaggcagaggttgcagtgagccgagactgcaccactgcagtccagcctgggcaatagagcgggactcggtctcaaataggatagctgtatgagcaactaatgttacacaggtaatgaagcagagtggactctaagggtctaagatatttacagggtgctagaggaagaagagaatatataggtccaaagacttatttcttagggagttttacatcatctccccacagcagaagccctggttatgtgactatgccagtaattgagtggtttaatctccagtttagggatatgggtattaaccagtccctgttgctacagattgaaagacatattctttaattttgctaacaataaaggtgatgtttgatctcctgagtaacttctccatctcaggagtttccaaattctggaggaaaatacaaggatgttatcctatttttatcattaggaatcagcttccttgctgaaatttagatacaaaagtgacactggtctggcatactctgtttttagtgctggatgattcctaatgatcactactattttgaaaaggcaacagcataagaatttgattaataatgaatggttcaaagaacaaagtctacccagaatttcatcattcgttttggtgtatttcagttatttttatagatatttgtgtattgtttaaagaaattggtattgtactgtctataacaaatttttacacttttacatttgtgaaatctatcatatagaagagagcattcagcatgtacaatttaatgagaaataaagttataaaacagatactcatatacccaatgctcaggttaagaaatgtacattgccaataccttagtaagctcctatgtatcctttcctggtcagtttcctgaatcaccccaagagagagaaccaatattctgcttgtaatgcaaataatcttttctttgtatttttaccaattaagtatactggttgtcacactttttaaaacataatttctaaaccatcataaaatgatacttttgtaaatacaaaatcatgtacttgaatgcattggcactgtcagtttactatcagcatttctaaatgtttatgcatgtttgctcactttatgtgcttatctctccatcagccaatgacagttgatcaatatgggatcaatatgggaccacacttcgagtagtactgatgtctacattccttaaaaatagtctaaacaggtagaagtaaacattaataaaatttaataaagtattaaattctatttaataaataga

SEQ ID NO: 418474 - DNA, 1936 bp, Homo sapiens
tagctatcttgatttcactacagctcagtagcagttcagtgctttggctttggagtcacagccaagttcaagtcatggttgtgtgactttggattttattaactatatatttctgttttccatctgctgctaaggtgatgccatctggtataatgagaatgaaatgagatgtttattaaacactgaggatcagtgcctagcatatacaagcacttagtaattatatttttatcattagtctaattctggtctcttgatctttctttagttcctaaagtccttactatggtttctattcatgtggctcttacatgaacaatacatgacacaaatatgatagtgtttgaatgtctgtcatgcacataatagtctgctagaaatttcgaaaatgaataagactggctgggcacggtggctcatgcctgtaatcccagcactgttagaggtcaaggcgggcagatcacctgaggtccggcattcaagaccagcctggccaacatggtgaaaccctgtctctactaaaaatacaaaaaatagtggggcatggtggcgcattcctgtaatctcagctactcgggaggctgagacaggagaatcacttgaacccgggaggcagaggttgcagtgagccgagactgcaccactgcagtccagcctgggcaatagagcgggactcggtctcaaaaaaaaaaaaaaatgaataagacagtagtctcacctccaggaacataacctagatggtgtagataggatagctgtatgagcaactaatgttacacaggtaatgaagcagagtggactctaagggtctaagatatttacagggtgctagaggaagaagagaatatataggtccaaagacttatttcttagggagttttacatcatctccccacagcagaagccctggttatgtgactatgccagtaattgagtggtttaatctccagtttagggatatgggtattaaccagtccctgttgctacagattgaaagacatattctttaattttgctaacaataaaggtgatgtttgatctcctgagtaacttctccatctcaggagtttccaaattctggaggaaaatacaaggatgttatcctatttttatcattaggaatcagcttccttgctgaaatttagatacaaaagtgacactggtctggcatactctgtttttagtgctggatgattcctaatgatcactactattttgaaaaggcaacagcataagaatttgattaataatgaatggttcaaagaacaaagtctacccagaatttcatcattcgttttggtgtatttcagttatttttatagatatttgtgtattgtttaaagaaattggtattgtactgtctataacaaatttttacacttttacatttgtgaaatctatcatatagaagagagcattcagcatgtacaatttaatgagaaataaagttataaaacagatactcatatacccaatgctcaggttaagaaatgtacattgccaataccttagtaagctcctatgtatcctttcctggtcagtttcctgaatcaccccaagagagagaaccaatattctgcttgtaatgcaaataatcttttctttgtatttttaccaattaagtatactggttgtcacactttttaaaacataatttctaaaccatcataaaatgatacttttgtaaatacaaaatcatgtacttgaatgcattggcactgtcagtttactatcagcatttctaaatgtttatgcatgtttgctcactttatgtgcttatctctccatcagccaatgacagttgatcaatatgggatcaatatgggaccacacttcgagtagtactgatgtctacattccttaaaaatagtctaaacaggtagaagtaaacattaataaaatttaataaagtattaaattctatttaataaataga

SEQ ID NO: 418475 - DNA, 474 bp, Homo sapiens
gagccgaagtgacccggagtcgaagaaagaacaggaatattcttcaggtttccttcaaacaactgcggatgagttttgcttttactatgcaagaaaagatggtgggttgtgctttccagattttccaagaaaacaagtcagaggaccagcatctaactacttggaccagatggaagaatatgacaaagtggaagagatcagcagcacaaacacaactgcttctgtattcaggaggttgtgagtgggctgcggcagcccgttggtgccctgcatagtggggatggctcgcaacgtctcttcattctggaaaaagaaggttatgtgaagatacttacccctgaaggagaaattttcaaggagccttacttggacattcacaaacttgttcaaagtggaataaaggaccttctcatccttttcatcatcaagaaaatcacgtggctgtcactatagacaacaaacaactaccaataa

SEQ ID NO: 418476 - DNA, 341 bp, Homo sapiens
cggcacgaggtgttggagggggacttctgcagaactgcaaaatgtgagccagcatgtcgtcatggaggtgtctgtgttagaccgaacaagtgcctctgtaaaaaaggatatcttggtcctcaatgtgaacaagtggacagaaacatccgcagagtgaccagggcagacatcacctagatgaaacacctttaccctgtcctgtaaaacactaaagttacatttttcaccaacttaattggaaagaaggggagtgagaaagcaaacagtctttaatgtgctgtggatctaatctagcaaggtatccttgtgccaacatgtaatcattaacgacgaaaaaaaaa

SEQ ID NO: 418477 - DNA, 874 bp, Homo sapiens
caactgatgtagatgcctccagggtaaagcaaaggtttacatattacacaagcaatttaactgttttctaaacatattgccaagacagtgggagttggcagcccacactgtgttttaggttttggagacttggattagaagtgactgttgattatgaacctttttatttgtcttctatgaactacaagcaacctagtaacccgggaaagaattcttcacagcacttaaacttgtcctcctagcggcccaagattacatacacaaatcacttgacaaaagtggtgtaagactcttgtacatagataaccacacaagacaattgtcttgttctaacccttaaagagttccacaaagtgaaatgttttataatccttttttgtgcagtaggcaaggaagaaaagaaaggaggttgggcaaagattatccaaaagaaagaaagagactcttttggggttccagttgaaacacaataaagaacataattaactttacaattctttgtgtttttcatttgactgcagggaggagatgaaagaggactgctaagcctcgcattccatcccaattacaagaaaaatggaaagttgtatgtgtcctataccaccaaccaagaacggtgggctatcgggcctcatgaccacattcttagggttgtggaatacacagtatccaggtatcactaaaaggcatcgaagcatagaaatttctcatcttattttctcatcatcttttcataagtttttttatttagaagttgcaaataagtaaccataaggtggcaataattaaatcattacctccatcttgctgaaaactccatatgtgtctttaagagaaatggagaacaacaatggttttgacatttttcctcaat

SEQ ID NO: 418478 - DNA, 640 bp, Homo sapiens
agcagggaggccgccggggcccgggggacgcgctcgcgcgggggccgccccctccccttccctccaccctgggcgggggcgcgcgagaagcggtgacgtcaaggggcgcgctgtggcagcacctccccgcgcgctagttaaaaagaagaagaaaagagggaacgaaacatgagaggctgtgtgagaagctgcagccgccggcagaggagacctcagcatcatctagagcccagcgctggccctgcctccgcctgccccgccgccgccgtcgccgtttctgttcctgctactgtcccacctaaacaactcccgttacacggacaagtgaacatctgtggctgtcctctccttttcttcctcctcttccaactccttctcctcctcccacttcccagccgcagcagaaagcccccaacccaactgacactggcacaactgcaaacggtgtcatccgcacaactttatctcgctcctcgggctcccctaaggcattggacccatcgccgcgtcagtatagataggtcagtatagataagtagtatagataggtcagtatagataagtcggtatagataggtagtatagatagcgtcagtatagataagtagtatagatagcgtcagtatagataggtcagtat

SEQ ID NO: 418479 - DNA, 3723 bp, Homo sapiens
agcagggaggccgccggggcccgggggacgcgctcgcgcgggggccgccccctccccttccctccaccctgggcgggggcgcgcgagaagcggtgacgtcaaggggcgcgctgtggcagcacctccccgcgcgctagttaaaaagaagaagaaaagagggaacgaaacatgagaggctgtgtgagaagctgcagccgccggcagaggagacctcagcatcatctagagcccagcgctggccctgcctccgcctgccccgccgccgccgtcgccgtttctgttcctgctactgtcccacctaaacaactcccgttacacggacaagtgaacatctgtggctgtcctctccttttcttcctcctcttccaactccttctcctcctcccacttcccagccgcagcagaaagcccccaacccaactgacactggcacaactgcaaacggtgtcatccgcacaactttatctcgctcctcgggctcccctaaggcattggacccatcgccgcgtcttttattttttgcaaagttgcatcgctgtacatatttttgtccccgccacctccctctgtctctggagtgccctacagccccgcaaactcctcctggagctgcgccctagtgcccctgctgggcagtggcgttcccccccatcctcccgcgcccagcccctgctgctctgggcagacgatgctgaagatgctctcctttaagctgctgctgctggccgtggctctgggcttctttgaaggagatgctaagtttggggaaagaaacgaagggagcggagcaaggaggagaaggtgcctgaatgggaaccccccgaagcgcctgaaaaggagagacaggaggatgatgtcccagctggagctgctgagtgggggagagatgctgtgcggtggcttctaccctcggctgtcctgctgcctgcggagtgacagcccggggctagggcgcctggagaataagatattttctgttaccaacaacacagaatgtgggaagttactggaggaaatcaaatgtgcactttgctctccacattctcaaagcctgttccactcacctgagagagaagtcttggaaagagacctagtacttcctctgctctgcaaagactattgcaaagaattcttttacacttgccgaggccatattccaggtttccttcaaacaactgcggatgagttttgcttttactatgcaagaaaagatggtgggttgtgctttccagattttccaagaaaacaagtcagaggaccagcatctaactacttggaccagatggaagaatatgacaaagtggaagagatcagcagcacaaacacaactgcttctgtattcaggaggttgtgagtgggctgcggcagcccgttggtgccctgcatagtggggatggctcgcaacgtctcttcattctggaaaaagaaggttatgtgaagatacttacccctgaaggagaaattttcaaggagccttacttggacattcacaaacttgttcaaagtggaataaagggaggagatgaaagaggactgctaagcctcgcattccatcccaattacaagaaaaatggaaagttgtatgtgtcctataccaccaaccaagaacggtgggctatcgggcctcatgaccacattcttagggttgtggaatacacagtatccagaaaaaatccacaccaagttgatttgagaacagccagagtctttcttgaagttgcagaactccacagaaagcatctgggaggacaactgctctttggccctgacggctttttgtacatcattcttggtgatgggatgattacactggatgatatggaagaaatggatgggttaagtgatttcacaggctcagtgctacggctggatgtggacacagacatgtgcaacgtgccttattccataccaaggagcaacccacacttcaacagcaccaaccagccccccgaagtgtttgctcatgggctccacgatccaggcagatgtgctgtggatagacatcccactgatataaacatcaatttaacgatactgtgttcagactccaatggaaaaaacagatcatcagccagaattctacagataataaaggggaaagattatgaaagtgagccatcacttttagaattcaagccattcagtaatggtcctttggttggtggatttgtataccggggctgccagtcagaaagattgtatggaagctacgtgtttggagatcgtaatgggaatttcctaactctccagcaaagtcctgtgacaaagcagtggcaagaaaaaccactctgtctcggcactagtgggtcctgtagaggctacttttccggtcacatcttgggatttggagaagatgaactaggtgaagtttacattttatcaagcagtaaaagtatgacccagactcacaatggaaaactctacaaaattgtagatcccaaaagacctttaatgcctgaggaatgcagagccacggtacaacctgcacagacactgacttcagagtgctccaggctctgtcgaaacggctactgcacccccacgggaaagtgctgctgcagtccaggctgggagggggacttctgcagaactgcaaaatgtgagccagcatgtcgtcatggaggtgtctgtgttagaccgaacaagtgcctctgtaaaaaaggatatcttggtcctcaatgtgaacaagtggacagaaacatccgcagagtgaccagggcaggtattcttgatcagatcattgacatgacatcttacttgctggatctaacaagttacattgtatagtttctgggactgtttgaatattctattccaatgggcatttattttttatcctgtcattaaaaaaaaaagactgttatcctgctacacactcctgtgatttcattctcttttattaatttaaaaataatttccagaaatgtgcagatcctctgtgtgtatgtcagcatgtttgttcacatatgcacatacacatactcataacccctatatgcgttgttgcataacagatgattttttaaaatatatacttccttatgcaaagtaatttacacagaaattccattgtaaattgataatggattttttatgttactagaagagattatttgacttcccaggaattttctgtctgtaatcactaaagtcaactttaatagagttttgaaacagtactgtgcaatccgatggatctaattaaaaaaaaggcaatatttttatattaaagtactatactaggagagaatgtttcagaactccctgatgaatttctaagtgagcaacttgatataaaattgtaatcttcatttttgtcagtgtatccagttacagaatgctacacacttacctttttattggctgagaaatctggttatttcatcttaatctcaagattgttttcaagtgttttataattaaatcataatagcatattttaaaatcaatcttcctaaaaggtctgcttttattgtatattttatttaacaataggcactgggtttgtgttacatatttatatattttattttatttttataatatagacatcacctagatgaaacacctttaccctgtcctgtaaaacactaaagttacatttttcaccaacttaattggaaagaaggggagtgagaaagcaaacagtctttaatgtgctgtggatctaatctagcaaggtatccttgtgccaacatgtaatcattaacgacgaaaaaaaaa

SEQ ID NO: 418480 - DNA, 2870 bp, Homo sapiens
agcagggaggccgccggggcccgggggacgcgctcgcgcgggggccgccccctccccttccctccaccctgggcgggggcgcgcgagaagcggtgacgtcaaggggcgcgctgtggcagcacctccccgcgcgctagttaaaaagaagaagaaaagagggaacgaaacatgagaggctgtgtgagaagctgcagccgccggcagaggagacctcagcatcatctagagcccagcgctggccctgcctccgcctgccccgccgccgccgtcgccgtttctgttcctgctactgtcccacctaaacaactcccgttacacggacaagtgaacatctgtggctgtcctctccttttcttcctcctcttccaactccttctcctcctcccacttcccagccgcagcagaaagcccccaacccaactgacactggcacaactgcaaacggtgtcatccgcacaactttatctcgctcctcgggctcccctaaggcattggacccatcgccgcgtcttttattttttgcaaagttgcatcgctgtacatatttttgtccccgccacctccctctgtctctggagtgccctacagccccgcaaactcctcctggagctgcgccctagtgcccctgctgggcagtggcgttcccccccatcctcccgcgcccagcccctgctgctctgggcagacgatgctgaagatgctctcctttaagctgctgctgctggccgtggctctgggcttctttgaaggagatgctaagtttggggaaagaaacgaagggagcggagcaaggaggagaaggtgcctgaatgggaaccccccgaagcgcctgaaaaggagagacaggaggatgatgtcccagctggagctgctgagtgggggagagatgctgtgcggtggcttctaccctcggctgtcctgctgcctgcggagtgacagcccggggctagggcgcctggagaataagatattttctgttaccaacaacacagaatgtgggaagttactggaggaaatcaaatgtgcactttgctctccacattctcaaagcctgttccactcacctgagagagaagtcttggaaagagacctagtacttcctctgctctgcaaagactattgcaaagaattcttttacacttgccgaggccatattccaggtttccttcaaacaactgcggatgagttttgcttttactatgcaagaaaagatggtgggttgtgctttccagattttccaagaaaacaagtcagaggaccagcatctaactacttggaccagatggaagaatatgacaaagtggaagagatcagcagcacaaacacaactgcttctgtattcaggaggttgtgagtgggctgcggcagcccgttggtgccctgcatagtggggatggctcgcaacgtctcttcattctggaaaaagaaggttatgtgaagatacttacccctgaaggagaaattttcaaggagccttacttggacattcacaaacttgttcaaagtggaataaagggaggagatgaaagaggactgctaagcctcgcattccatcccaattacaagaaaaatggaaagttgtatgtgtcctataccaccaaccaagaacggtgggctatcgggcctcatgaccacattcttagggttgtggaatacacagtatccagaaaaaatccacaccaagttgatttgagaacagccagagtctttcttgaagttgcagaactccacagaaagcatctgggaggacaactgctctttggccctgacggctttttgtacatcattcttggtgatgggatgattacactggatgatatggaagaaatggatgggttaagtgatttcacaggctcagtgctacggctggatgtggacacagacatgtgcaacgtgccttattccataccaaggagcaacccacacttcaacagcaccaaccagccccccgaagtgtttgctcatgggctccacgatccaggcagatgtgctgtggatagacatcccactgatataaacatcaatttaacgatactgtgttcagactccaatggaaaaaacagatcatcagccagaattctacagataataaaggggaaagattatgaaagtgagccatcacttttagaattcaagccattcagtaatggtcctttggttggtggatttgtataccggggctgccagtcagaaagattgtatggaagctacgtgtttggagatcgtaatgggaatttcctaactctccagcaaagtcctgtgacaaagcagtggcaagaaaaaccactctgtctcggcactagtgggtcctgtagaggctacttttccggtcacatcttgggatttggagaagatgaactaggtgaagtttacattttatcaagcagtaaaagtatgacccagactcacaatggaaaactctacaaaattgtagatcccaaaagacctttaatgcctgaggaatgcagagccacggtacaacctgcacagacactgacttcagagtgctccaggctctgtcgaaacggctactgcacccccacgggaaagtgctgctgcagtccaggctgggagggggacttctgcagaactgcaaaatgtgagccagcatgtcgtcatggaggtgtctgtgttagaccgaacaagtgcctctgtaaaaaaggatatcttggtcctcaatgtgaacaagtggacagaaacatccgcagagtgaccagggcaggtattcttgatcagatcattgacatgacatcttacttgctggatctaacaagttacattgtatagtttctgggactgtttgaatattctattccaatgggcatttattttttatcctgtcattaaaaaaaaaagactgttatcctgct

SEQ ID NO: 418481 - DNA, 2897 bp, Homo sapiens
agcagggaggccgccggggcccgggggacgcgctcgcgcgggggccgccccctccccttccctccaccctgggcgggggcgcgcgagaagcggtgacgtcaaggggcgcgctgtggcagcacctccccgcgcgctagttaaaaagaagaagaaaagagggaacgaaacatgagaggctgtgtgagaagctgcagccgccggcagaggagacctcagcatcatctagagcccagcgctggccctgcctccgcctgccccgccgccgccgtcgccgtttctgttcctgctactgtcccacctaaacaactcccgttacacggacaagtgaacatctgtggctgtcctctccttttcttcctcctcttccaactccttctcctcctcccacttcccagccgcagcagaaagcccccaacccaactgacactggcacaactgcaaacggtgtcatccgcacaactttatctcgctcctcgggctcccctaaggcattggacccatcgccgcgtcttttattttttgcaaagttgcatcgctgtacatatttttgtccccgccacctccctctgtctctggagtgccctacagccccgcaaactcctcctggagctgcgccctagtgcccctgctgggcagtggcgttcccccccatcctcccgcgcccagcccctgctgctctgggcagacgatgctgaagatgctctcctttaagctgctgctgctggccgtggctctgggcttctttgaaggagatgctaagtttggggaaagaaacgaagggagcggagcaaggaggagaaggtgcctgaatgggaaccccccgaagcgcctgaaaaggagagacaggaggatgatgtcccagctggagctgctgagtgggggagagatgctgtgcggtggcttctaccctcggctgtcctgctgcctgcggagtgacagcccggggctagggcgcctggagaataagatattttctgttaccaacaacacagaatgtgggaagttactggaggaaatcaaatgtgcactttgctctccacattctcaaagcctgttccactcacctgagagagaagtcttggaaagagacctagtacttcctctgctctgcaaagactattgcaaagaattcttttacacttgccgaggccatattccaggtttccttcaaacaactgcggatgagttttgcttttactatgcaagaaaagatggtgggttgtgctttccagattttccaagaaaacaagtcagaggaccagcatctaactacttggaccagatggaagaatatgacaaagtggaagagatcagcagcacaaacacaactgcttctgtattcaggaggttgtgagtgggctgcggcagcccgttggtgccctgcatagtggggatggctcgcaacgtctcttcattctggaaaaagaaggttatgtgaagatacttacccctgaaggagaaattttcaaggagccttacttggacattcacaaacttgttcaaagtggaataaagggaggagatgaaagaggactgctaagcctcgcattccatcccaattacaagaaaaatggaaagttgtatgtgtcctataccaccaaccaagaacggtgggctatcgggcctcatgaccacattcttagggttgtggaatacacagtatccagaaaaaatccacaccaagttgatttgagaacagccagagtctttcttgaagttgcagaactccacagaaagcatctgggaggacaactgctctttggccctgacggctttttgtacatcattcttggtgatgggatgattacactggatgatatggaagaaatggatgggttaagtgatttcacaggctcagtgctacggctggatgtggacacagacatgtgcaacgtgccttattccataccaaggagcaacccacacttcaacagcaccaaccagccccccgaagtgtttgctcatgggctccacgatccaggcagatgtgctgtggatagacatcccactgatataaacatcaatttaacgatactgtgttcagactccaatggaaaaaacagatcatcagccagaattctacagataataaaggggaaagattatgaaagtgagccatcacttttagaattcaagccattcagtaatggtcctttggttggtggatttgtataccggggctgccagtcagaaagattgtatggaagctacgtgtttggagatcgtaatgggaatttcctaactctccagcaaagtcctgtgacaaagcagtggcaagaaaaaccactctgtctcggcactagtgggtcctgtagaggctacttttccggtcacatcttgggatttggagaagatgaactaggtgaagtttacattttatcaagcagtaaaagtatgacccagactcacaatggaaaactctacaaaattgtagatcccaaaagacctttaatgcctgaggaatgcagagccacggtacaacctgcacagacactgacttcagagtgctccaggctctgtcgaaacggctactgcacccccacgggaaagtgctgctgcagtccaggctgggagggggacttctgcagaactgcaaaatgtgagccagcatgtcgtcatggaggtgtctgtgttagaccgaacaagtgcctctgtaaaaaaggatatcttggtcctcaatgtgaacaagtggacagaaacatccgcagagtgaccagggcagacatcacctagatgaaacacctttaccctgtcctgtaaaacactaaagttacatttttcaccaacttaattggaaagaaggggagtgagaaagcaaacagtctttaatgtgctgtggatctaatctagcaaggtatccttgtgccaacatgtaatcattaacgacgaaaaaaaaa

SEQ ID NO: 418482 - DNA, 2215 bp, Homo sapiens
agcagggaggccgccggggcccgggggacgcgctcgcgcgggggccgccccctccccttccctccaccctgggcgggggcgcgcgagaagcggtgacgtcaaggggcgcgctgtggcagcacctccccgcgcgctagttaaaaagaagaagaaaagagggaacgaaacatgagaggctgtgtgagaagctgcagccgccggcagaggagacctcagcatcatctagagcccagcgctggccctgcctccgcctgccccgccgccgccgtcgccgtttctgttcctgctactgtcccacctaaacaactcccgttacacggacaagtgaacatctgtggctgtcctctccttttcttcctcctcttccaactccttctcctcctcccacttcccagccgcagcagaaagcccccaacccaactgacactggcacaactgcaaacggtgtcatccgcacaactttatctcgctcctcgggctcccctaaggcattggacccatcgccgcgtcttttattttttgcaaagttgcatcgctgtacatatttttgtccccgccacctccctctgtctctggagtgccctacagccccgcaaactcctcctggagctgcgccctagtgcccctgctgggcagtggcgttcccccccatcctcccgcgcccagcccctgctgctctgggcagacgatgctgaagatgctctcctttaagctgctgctgctggccgtggctctgggcttctttgaaggagatgctaagtttggggaaagaaacgaagggagcggagcaaggaggagaaggtgcctgaatgggaaccccccgaagcgcctgaaaaggagagacaggaggatgatgtcccagctggagctgctgagtgggggagagatgctgtgcggtggcttctaccctcggctgtcctgctgcctgcggagtgacagcccggggctagggcgcctggagaataagatattttctgttaccaacaacacagaatgtgggaagttactggaggaaatcaaatgtgcactttgctctccacattctcaaagcctgttccactcacctgagagagaagtcttggaaagagacctagtacttcctctgctctgcaaagactattgcaaagaattcttttacacttgccgaggccatattccaggtttccttcaaacaactgcggatgagttttgcttttactatgcaagaaaagatggtgggttgtgctttccagattttccaagaaaacaagtcagaggaccagcatctaactacttggaccagatggaagaatatgacaaagtggaagagatcagcagcacaaacacaactgcttctgtattcaggaggttgtgagtgggctgcggcagcccgttggtgccctgcatagtggggatggctcgcaacgtctcttcattctggaaaaagaaggttatgtgaagatacttacccctgaaggagaaattttcaaggagccttacttggacattcacaaacttgttcaaagtggaataaagggaggagatgaaagaggactgctaagcctcgcattccatcccaattacaagaaaaatggaaagttgtatgtgtcctataccaccaaccaagaacggtgggctatcgggcctcatgaccacattcttagggttgtggaatacacagtatccagaaaaaatccacaccaagttgatttgagaacagccagagtctttcttgaagttgcagaactccacagaaagcatctgggaggacaactgctctttggccctgacggctttttgtacatcattcttggtgatgggatgattacactggatgatatggaagaaatggatgggttaaggtaaaaggctgatcacagatgggttcctctcaaggttaaaatagtttaagtgccagaagaaaaggtgggcaccagcgaattaagaaccatctttgaatggtcaccttggttaaatacttaacttttgtcatcagtgtctgcatttatgaaatgaagaggaattcactaatatgctacgtgatcttttgtttgtcatgaaaagagttactgttgtgtagttctctgttccagggctgcctctgctccacaaagcactgagaagcagtggccctgtacaaccatactgcctctcaacactgtgtaataggctaacaccgcccagcgaaccttcctgggagatatagaatacataggtttaggctgacaaaaattaa

SEQ ID NO: 418483 - DNA, 1868 bp, Homo sapiens
agcagggaggccgccggggcccgggggacgcgctcgcgcgggggccgccccctccccttccctccaccctgggcgggggcgcgcgagaagcggtgacgtcaaggggcgcgctgtggcagcacctccccgcgcgctagttaaaaagaagaagaaaagagggaacgaaacatgagaggctgtgtgagaagctgcagccgccggcagaggagacctcagcatcatctagagcccagcgctggccctgcctccgcctgccccgccgccgccgtcgccgtttctgttcctgctactgtcccacctaaacaactcccgttacacggacaagtgaacatctgtggctgtcctctccttttcttcctcctcttccaactccttctcctcctcccacttcccagccgcagcagaaagcccccaacccaactgacactggcacaactgcaaacggtgtcatccgcacaactttatctcgctcctcgggctcccctaaggcattggacccatcgccgcgtcttttattttttgcaaagttgcatcgctgtacatatttttgtccccgccacctccctctgtctctggagtgccctacagccccgcaaactcctcctggagctgcgccctagtgcccctgctgggcagtggcgttcccccccatcctcccgcgcccagcccctgctgctctgggcagacgatgctgaagatgctctcctttaagctgctgctgctggccgtggctctgggcttctttgaaggagatgctaagtttggggaaagaaacgaagggagcggagcaaggaggagaaggtgcctgaatgggaaccccccgaagcgcctgaaaaggagagacaggaggatgatgtcccagctggagctgctgagtgggggagagatgctgtgcggtggcttctaccctcggctgtcctgctgcctgcggagtgacagcccggggctagggcgcctggagaataagatattttctgttaccaacaacacagaatgtgggaagttactggaggaaatcaaatgtgcactttgctctccacattctcaaagcctgttccactcacctgagagagaagtcttggaaagagacctagtacttcctctgctctgcaaagactattgcaaagaattcttttacacttgccgaggccatattccaggtttccttcaaacaactgcggatgagttttgcttttactatgcaagaaaagatggtgggttgtgctttccagattttccaagaaaacaagtcagaggaccagcatctaactacttggaccagatggaagaatatgacaaagtggaagagatcagcagcacaaacacaactgcttctgtattcaggaggttgtgagtgggctgcggcagcccgttggtgccctgcatagtggggatggctcgcaacgtctcttcattctggaaaaagaaggttatgtgaagatacttacccctgaaggagaaattttcaaggagccttacttggacattcacaaacttgttcaaagtggaataaagggaggagatgaaagaggactgctaagcctcgcattccatcccaattacaagaaaaatggaaagttgtatgtgtcctataccaccaaccaagaacggtgggctatcgggcctcatgaccacattcttagggttgtggaatacacagtatccaggtatcactaaaaggcatcgaagcatagaaatttctcatcttattttctcatcatcttttcataagtttttttatttagaagttgcaaataagtaaccataaggtggcaataattaaatcattacctccatcttgctgaaaactccatatgtgtctttaagagaaatggagaacaacaatggttttgacatttttcctcaat

SEQ ID NO: 418484 - DNA, 1544 bp, Homo sapiens
agcagggaggccgccggggcccgggggacgcgctcgcgcgggggccgccccctccccttccctccaccctgggcgggggcgcgcgagaagcggtgacgtcaaggggcgcgctgtggcagcacctccccgcgcgctagttaaaaagaagaagaaaagagggaacgaaacatgagaggctgtgtgagaagctgcagccgccggcagaggagacctcagcatcatctagagcccagcgctggccctgcctccgcctgccccgccgccgccgtcgccgtttctgttcctgctactgtcccacctaaacaactcccgttacacggacaagtgaacatctgtggctgtcctctccttttcttcctcctcttccaactccttctcctcctcccacttcccagccgcagcagaaagcccccaacccaactgacactggcacaactgcaaacggtgtcatccgcacaactttatctcgctcctcgggctcccctaaggcattggacccatcgccgcgtcttttattttttgcaaagttgcatcgctgtacatatttttgtccccgccacctccctctgtctctggagtgccctacagccccgcaaactcctcctggagctgcgccctagtgcccctgctgggcagtggcgttcccccccatcctcccgcgcccagcccctgctgctctgggcagacgatgctgaagatgctctcctttaagctgctgctgctggccgtggctctgggcttctttgaaggagatgctaagtttggggaaagaaacgaagggagcggagcaaggaggagaaggtgcctgaatgggaaccccccgaagcgcctgaaaaggagagacaggaggatgatgtcccagctggagctgctgagtgggggagagatgctgtgcggtggcttctaccctcggctgtcctgctgcctgcggagtgacagcccggggctagggcgcctggagaataagatattttctgttaccaacaacacagaatgtgggaagttactggaggaaatcaaatgtgcactttgctctccacattctcaaagcctgttccactcacctgagagagaagtcttggaaagagacctagtacttcctctgctctgcaaagactattgcaaagaattcttttacacttgccgaggccatattccaggtttccttcaaacaactgcggatgagttttgcttttactatgcaagaaaagatggtgggttgtgctttccagattttccaagaaaacaagtcagaggaccagcatctaactacttggaccagatggaagaatatgacaaagtggaagagatcagcagcacaaacacaactgcttctgtattcaggaggttgtgagtgggctgcggcagcccgttggtgccctgcatagtggggatggctcgcaacgtctcttcattctggaaaaagaaggttatgtgaagatacttacccctgaaggagaaattttcaaggagccttacttggacattcacaaacttgttcaaagtggaataaaggttggctttttaaattttaaaaaaaaaag

SEQ ID NO: 418485 - DNA, 1188 bp, Homo sapiens
agcagggaggccgccggggcccgggggacgcgctcgcgcgggggccgccccctccccttccctccaccctgggcgggggcgcgcgagaagcggtgacgtcaaggggcgcgctgtggcagcacctccccgcgcgctagttaaaaagaagaagaaaagagggaacgaaacatgagaggctgtgtgagaagctgcagccgccggcagaggagacctcagcatcatctagagcccagcgctggccctgcctccgcctgccccgccgccgccgtcgccgtttctgttcctgctactgtcccacctaaacaactcccgttacacggacaagtgaacatctgtggctgtcctctccttttcttcctcctcttccaactccttctcctcctcccacttcccagccgcagcagaaagcccccaacccaactgacactggcacaactgcaaacggtgtcatccgcacaactttatctcgctcctcgggctcccctaaggcattggacccatcgccgcgtcttttattttttgcaaagttgcatcgctgtacatatttttgtccccgccacctccctctgtctctggatgacagcccggggctagggcgcctggagaataagatattttctgttaccaacaacacagaatgtgggaagttactggaggaaatcaaatgtgcactttgctctccacattctcaaagcctgttccactcacctgagagagaagtcttggaaagagacctagtacttcctctgctctgcaaagactattgcaaagaattcttttacacttgccgaggccatattccaggtttccttcaaacaactgcggatgagttttgcttttactatgcaagaaaagatggtgggttgtgctttccagattttccaagaaaacaagtcagaggaccagcatctaactacttggaccagatggaagaatatgacaaagtggaagagatcagcagcacaaacacaactgcttctgtattcaggaggttgtgagtgggctgcggcagcccgttggtgccctgcatagtggggatggctcgcaacgtctcttcattctggaaaaagaaggttatgtgaagatacttacccctgaaggagaaattttcaaggagccttacttggacattcacaaacttgttcaaagtggaataaaggttggctttttaaattttaaaaaaaaaag

SEQ ID NO: 418486 - DNA, 1587 bp, Homo sapiens
agcagggaggccgccggggcccgggggacgcgctcgcgcgggggccgccccctccccttccctccaccctgggcgggggcgcgcgagaagcggtgacgtcaaggggcgcgctgtggcagcacctccccgcgcgctagttaaaaagaagaagaaaagagggaacgaaacatgagaggctgtgtgagaagctgcagccgccggcagaggagacctcagcatcatctagagcccagcgctggccctgcctccgcctgccccgccgccgccgtcgccgtttctgttcctgctactgtcccacctaaacaactcccgttacacggacaagtgaacatctgtggctgtcctctccttttcttcctcctcttccaactccttctcctcctcccacttcccagccgcagcagaaagcccccaacccaactgacactggcacaactgcaaacggtgtcatccgcacaactttatctcgctcctcgggctcccctaaggcattggacccatcgccgcgtcttttattttttgcaaagttgcatcgctgtacatatttttgtccccgccacctccctctgtctctggagtgccctacagccccgcaaactcctcctggagctgcgccctagtgcccctgctgggcagtggcgttcccccccatcctcccgcgcccagcccctgctgctctgggcagacgatgctgaagatgctctcctttaagctgctgctgctggccgtggctctgggcttctttgaaggagatgctaagtttggggaaagaaacgaagggagcggagcaaggaggagaaggtgcctgaatgggaaccccccgaagcgcctgaaaaggagagacaggaggatgatgtcccagctggagctgctgagtgggggagagatgctgtgcggtggcttctaccctcggctgtcctgctgcctgcggagtgacagcccggggctagggcgcctggagaataagatattttctgttaccaacaacacagaatgtgggaagttactggaggaaatcaaatgtgcactttgctctccacattctcaaagcctgttccactcacctgagagagaagtcttggaaagagacctagtacttcctctgctctgcaaagactattgcaaagaattcttttacacttgccgaggccatattccaggtttccttcaaacaactgcggatgagttttgcttttactatgcaagaaaagatggtgggttgtgctttccagattttccaagaaaacaagtcagaggaccagcatctaactacttggaccagatggaagaatatgacaaagtggaagagatcagcagcacaaacacaactgcttctgtattcaggaggttgtgagtgggctgcggcagcccgttggtgccctgcatagtggggatggctcgcaacgtctcttcattctggaaaaagaaggttatgtgaagatacttacccctgaaggagaaattttcaaggagccttacttggacattcacaaacttgttcaaagtggaataaaggaccttctcatccttttcatcatcaagaaaatcacgtggctgtcactatagacaacaaacaactaccaataa

SEQ ID NO: 418487 - DNA, 430 bp, Homo sapiens
cgggtttctcaccaccatgtatttatcaagacagagacagtactaggtttccttcaaacaactgcggatgagttttgcttttactatgcaagaaaagatggtgggttgtgctttccagattttccaagaaaacaagtcagaggaccagcatctaactacttggaccagatggaagaatatgacaaagtggaagagatcagcagcacaaacacaactgcttctgtattcaggaggttgtgagtgggctgcggcagcccgttggtgccctgcatagtggggatggctcgcaacgtctcttcattctggaaaaagaaggttatgtgaagatacttacccctgaaggagaaattttcaaggagccttacttggacattcacaaacttgttcaaagtggaataaaggttggctttttaaattttaaaaaaaaaag

SEQ ID NO: 418488 - DNA, 431 bp, Homo sapiens
tagtgatctaaatgtttttattgccacttgaaaaaaagaggattctggtttccttcaaacaactgcggatgagttttgcttttactatgcaagaaaagatggtgggttgtgctttccagattttccaagaaaacaagtcagaggaccagcatctaactacttggaccagatggaagaatatgacaaagtggaagagatcagcagcacaaacacaactgcttctgtattcaggaggttgtgagtgggctgcggcagcccgttggtgccctgcatagtggggatggctcgcaacgtctcttcattctggaaaaagaaggttatgtgaagatacttacccctgaaggagaaattttcaaggagccttacttggacattcacaaacttgttcaaagtggaataaaggttggctttttaaattttaaaaaaaaaag

SEQ ID NO: 418489 - DNA, 428 bp, Homo sapiens
cttatatttttaattctcacccccttgaaaagagaagaatttcagtttccttcaaacaactgcggatgagttttgcttttactatgcaagaaaagatggtgggttgtgctttccagattttccaagaaaacaagtcagaggaccagcatctaactacttggaccagatggaagaatatgacaaagtggaagagatcagcagcacaaacacaactgcttctgtattcaggaggttgtgagtgggctgcggcagcccgttggtgccctgcatagtggggatggctcgcaacgtctcttcattctggaaaaagaaggttatgtgaagatacttacccctgaaggagaaattttcaaggagccttacttggacattcacaaacttgttcaaagtggaataaaggttggctttttaaattttaaaaaaaaaag

SEQ ID NO: 418490 - DNA, 430 bp, Homo sapiens
cccgccccagacactaaccccaaacgaaaacccgcggaaagctcgggtttccttcaaacaactgcggatgagttttgcttttactatgcaagaaaagatggtgggttgtgctttccagattttccaagaaaacaagtcagaggaccagcatctaactacttggaccagatggaagaatatgacaaagtggaagagatcagcagcacaaacacaactgcttctgtattcaggaggttgtgagtgggctgcggcagcccgttggtgccctgcatagtggggatggctcgcaacgtctcttcattctggaaaaagaaggttatgtgaagatacttacccctgaaggagaaattttcaaggagccttacttggacattcacaaacttgttcaaagtggaataaaggttggctttttaaattttaaaaaaaaaag

SEQ ID NO: 418491 - DNA, 2373 bp, Homo sapiens
ggatgagtcaacttaggtagagtcaggtggagaggagtgttccaggcagaggttagtgagtttgagaccactgtgctgggagcaagggggtggtatctggtaaggctggtaggggatgagcctctttccgggactatcttggacctggggagtgtagggctcctttgccttgcattgagaagtagtagttgcaaaactggaggttatcttcgtacgtgttgaggtggtgtctgccatcccctttgcaccattccagagccagatgaagtcagagctggcagcggtggcctcggagtttgggcgactgacacggtttctggctgaagagcaggcagggctggaacggcgtctcagagagatgcatgaagcccagctggggcgtgcgggagccgcggctagtcgccttgcagaacaggccgcccagctcagccgcctgctggcagaggcccaggagcggagccagcaggggggtctccggctgctccaggtgagcaatgtcccctccctgttcccccagcattctgtgttggctgtcaggcagtgcttaccaaacgcctgtccagagctgcctcttttctccctgggaggaacccacagtgattgaacctgaagaccaaaaacatgttttaaagctggaaacagagttaatgtcgaatgtggtatgtgtggcgattatacccagtgaaaagcatgaagattcggttgtaggagaggtttaaatgacagttgaggaaagtctttttgacagtgacatcctgaaaaaggtgagcaagtcgtattgtggaaatgacagtatccctgggctcacagcaggatgaggcgagttaggtatggcgaggcatggggtggttgaaatggatgtgtgttcattgagggccgtgagggtgctgcttctcccttcctgctcaggttcagtctctgactggagatcggggaacgctgtccctgtgcagctgacactctctttatctctttctccctctccctctttttgtttctcttattcccaggacatcaaggagactttcaataggtgtgttcccagtctttgcccatcgtgaggaaaatgagccggatgttctgtcaggctgcgagagtggacctgacgctggaccctgacacggctcacccggccctgatgctgtcccctgaccgccggggggtccgcctggcagagcggcggcaggaggttgctgaccatcccaagcgcttctcggccgactgctgcgtactgggggcccagggcttccgctccggccggcactactgggaggtagaggtgggcgggcggcggggctgggcggtgggtgctgcccgtgaatcaacccatcataaggaaaaggtgggccctgggggttcctccgtgggcagcggggatgccagctcctcgcgccatcaccatcgccgccgccggctccacctgccccagcagcccctgctccagcgggaagtgtggtgcgtgggcaccaacggcaaacgctatcaggcccagagctccacagaacagacgctgctgagccccagtgagaaaccaaggcgctttggtgtgtacctggactatgaagctgggcgcctgggcttctacaacgcagagactctagcccacgtgcacaccttctcggctgccttcctgggcgagcgtgtctttcctttcttccgggtgctctccaagggcacccgcatcaagctctgcccttgattatcctgccacccgcaggggcccctctgtcagcacttggggggtgggtggtggagggtggcccgtaagtttgagggctcaaaggctcttcccactgcttgttactgtgttgcttcccactcccccttgaccccaggcccctgcttctccctctaggagcctaaagaaccctcctggcctccagctcagccttctctcacctactatgtctgtccaacagaccggccagaatttagcttcacttgagagagatctggaatggtcgccatgattgaaaccacgcaccattacatcatcattacattaattacatcaacataaattatttcttcccccttcccttttccagcactcaaccaaggagcaaagctcatcccaccccacacccctcccaggtctgctcactgccaggctcctctcccctttgttcagtggagctggcttttctcccagcccctttccatgcctttcactccatttggcaagctctgagggggagcctggggacgggtttgggtccccaggaggagagccttgggtataatctatttttctaggagcctcttgccttgtcacttgcagctttcgccctctgctttgatggctgaggtgaactcatgttctttgggaaaagggaaggcgtgctgtggaaataaaatgtttatttgcttctc

SEQ ID NO: 418492 - DNA, 1323 bp, Homo sapiens
  misc_feature (70)..(70): n is a, c, g, or t
  misc_feature (455)..(455): n is a, c, g, or t
atcggctgtggggagtaccggctgcagtcggctgtgccgggagggtaggatggcgtctggccgatgcggngatagcaccgaaagcagacggccgccaggcgctccccctaccccccgaagtttctccccagcggcgggggatgggggtaggcggttcctctgttctttctgcgttccccgcggcctcttaccacagagacgcgggcctccaccgtcctagccctcccgccctgttctctagtgcggactagagcgtctcctcgccatttcctgtcgccctggggccccgcggggaaaaagggggagtagcaggacagcggagggaagtcgcgagcttaggtggtgtgtagacgccggaagtgttgggaaggaggccggaagctaggggcggggccaggaagtgaggaggggcgggggtttatgaggagtccaagggagcattggggcagacttgnactcagagccacctgagggacttggcggtggcgcccagcactgtcccctcccctcgtagagacacggttgtcgtttgggagtagggaacactgtgttggggtgggttgtcggcaggacatctctctggctgctcttggggcgaggtgtggaggggcagggctgggggtggagccgggtcgccagggcgtcggtagggaagacccccgcccctcgcccccccaccgaacctctacactggctggctggacactaagatggctgccgttgccatgacacccaagtctgctcactgccaggctcctctcccctttgttcagtggagctggcttttctcccagcccctttccatgcctttcactccatttggcaagctctgagggggagcctggggacgggtttgggtccccaggaggagagccttgggtataatctatttttctaggagcctcttgccttgtcacttgcagctttcgccctctgctttgatggctgaggtgaactcatgttctttgggaaaagggaaggcgtgctgtggaaataaaatgtttatttgcttctcaaacaaagaaaaacaaaaaacaaacaaaacacacccaaccggaacccaaacaacaacaaacaacaaccctacaacacacaaccaaagacgcgggagatggcgctggctacaactcttgccccatccgaggccacagcagcacaacccgcacccacgcgtctagagttccgacagaccggactgggccactagccgggtggccgccgccaccccccgcgccgcgccagcgctaagcaacatgccaacacacgccagagacaaacacccagcgcgcccgcccctcgcagagccccaccaccccgagagca

SEQ ID NO: 418493 - DNA, 3635 bp, Homo sapiens
  misc_feature (70)..(70): n is a, c, g, or t
  misc_feature (455)..(455): n is a, c, g, or t
atcggctgtggggagtaccggctgcagtcggctgtgccgggagggtaggatggcgtctggccgatgcggngatagcaccgaaagcagacggccgccaggcgctccccctaccccccgaagtttctccccagcggcgggggatgggggtaggcggttcctctgttctttctgcgttccccgcggcctcttaccacagagacgcgggcctccaccgtcctagccctcccgccctgttctctagtgcggactagagcgtctcctcgccatttcctgtcgccctggggccccgcggggaaaaagggggagtagcaggacagcggagggaagtcgcgagcttaggtggtgtgtagacgccggaagtgttgggaaggaggccggaagctaggggcggggccaggaagtgaggaggggcgggggtttatgaggagtccaagggagcattggggcagacttgnactcagagccacctgagggacttggcggtggcgcccagcactgtcccctcccctcgtagagacacggttgtcgtttgggagtagggaacactgtgttggggtgggttgtcggcaggacatctctctggctgctcttggggcgaggtgtggaggggcagggctgggggtggagccgggtcgccagggcgtcggtagggaagacccccgcccctcgcccccccaccgaacctctacactggctggctggacactaagatggctgccgttgccatgacacccaaccctgtgcagacccttcaggaggaggcggtgtgcgccatctgcctcgattacttcacggaccccgtgtccatcggctgcgggcacaacttctgccgagtttgtgtaacccagttgtggggtggggaggatgaggaggacagagatgagttagatcgggaggaggaggaggaggacggagaggaggaggaagtggaggctgtgggggctggcgcggggtgggacacccccatgcgggatgaagactacgagggtgacatggaggaggaggtcgaggaggaagaagagggtgtgttctggaccagtggcatgagcaggtccagctgggacaacatggactatgtgtgggaggaggaggacgaggaggaagacctggactactacttgggggacatggaggaggaggacctgaggggggaggatgaggaggacgaggaggaagtgctggaggaggttgaggaagaggatctagaccccgtcaccccactgcccccgcctccagcccctcggaggtgcttcacatgccctcagtgccgaaagagctttcctcggcggagcttccgccccaacctgcagctggccaatatggtccaggtgattcggcagatgcacccaacccctggtcgagggagccgcgtgaccgatcagggcatctgtcccaaacaccaagaagccctgaagctcttctgcgaggtagacgaagaggccatctgtgtggtgtgccgagaatccaggagccacaaacagcacagcgtggtgccattggaggaggtggtgcaggagtacaaggccaaactgcaggggcacgtggaaccactgaggaagcacctggaggcagtgcagaagatgaaagccaaggaggagaggcgagtgacagaactgaagagccagatgaagtcagagctggcagcggtggcctcggagtttgggcgactgacacggtttctggctgaagagcaggcagggctggaacggcgtctcagagagatgcatgaagcccagctggggcgtgcgggagccgcggctagtcgccttgcagaacaggccgcccagctcagccgcctgctggcagaggcccaggagcggagccagcaggggggtctccggctgctccaggacatcaaggagactttcaataggtgtgaagaggtacagctgcagcccccagaggtctggtcccctgacccgtgccaaccccatagccatgacttcctgacagatgccatcgtgaggaaaatgagccggatgttctgtcaggctgcgagagtggacctgacgctggaccctgacacggctcacccggccctgatgctgtcccctgaccgccggggggtccgcctggcagagcggcggcaggaggttgctgaccatcccaagcgcttctcggccgactgctgcgtactgggggcccagggcttccgctccggccggcactactgggaggtagaggtgggcgggcggcggggctgggcggtgggtgctgcccgtgaatcaacccatcataaggaaaaggtgggccctgggggttcctccgtgggcagcggggatgccagctcctcgcgccatcaccatcgccgccgccggctccacctgccccagcagcccctgctccagcgggaagtgtggtgcgtgggcaccaacggcaaacgctatcaggcccagagctccacagaacagacgctgctgagccccagtgagaaaccaaggcgctttggtgtgtacctggactatgaagctgggcgcctgggcttctacaacgcagagactctagcccacgtgcacaccttctcggctgccttcctgggcgagcgtgtctttcctttcttccgggtgctctccaagggcacccgcatcaagctctgcccttgattatcctgccacccgcaggggcccctctgtcagcacttggggggtgggtggtggagggtggcccgtaagtttgagggctcaaaggctcttcccactgcttgttactgtgttgcttcccactcccccttgaccccaggcccctgcttctccctctaggagcctaaagaaccctcctggcctccagctcagccttctctcacctactatgtctgtccaacaggtctgcatgggtccctgataatgagaacagctgcctggtcttctctcccagtctgcctagcccagccctgggactggaatttgagtaggggatgaggggaaattgtaatttcattccttaacttccttttccccacccctgctcttcaacctctttatcagttctgaggctggagggtttgggcaaggcaacatccccattccaattccattttctgatgcagattttagctgagggatttggaagccatttggggaggcaggctgggccaaagggtagagctgggtaataaatgtctattctcctggggaggagggattctaaactttccttccgtcctcaatttctacctccatagaccggccagaatttagcttcacttgagagagatctggaatggtcgccatgattgaaaccacgcaccattacatcatcattacattaattacatcaacataaattatttcttcccccttcccttttccagcactcaaccaaggagcaaagctcatcccaccccacacccctcccaggtctgctcactgccaggctcctctcccctttgttcagtggagctggcttttctcccagcccctttccatgcctttcactccatttggcaagctctgagggggagcctggggacgggtttgggtccccaggaggagagccttgggtataatctatttttctaggagcctcttgccttgtcacttgcagctttcgccctctgctttgatggctgaggtgaactcatgttctttgggaaaagggaaggcgtgctgtggaaataaaatgtttatttgcttctc

SEQ ID NO: 418494 - DNA, 1812 bp, Homo sapiens
ccctctgggaatatcgtggtcccaccccctgcccggtccccttcctccaggtgtgaagaggtacagctgcagcccccagaggtctggtcccctgacccgtgccaaccccatagccatgacttcctgacagatgccatcgtgaggaaaatgagccggatgttctgtcaggctgcgagagtggacctgacgctggaccctgacacggctcacccggccctgatgctgtcccctgaccgccggggggtccgcctggcagagcggcggcaggaggttgctgaccatcccaagcgcttctcggccgactgctgcgtactgggggcccagggcttccgctccggccggcactactgggaggtagaggtgggcgggcggcggggctgggcggtgggtgctgcccgtgaatcaacccatcataaggaaaaggtgggccctgggggttcctccgtgggcagcggggatgccagctcctcgcgccatcaccatcgccgccgccggctccacctgccccagcagcccctgctccagcgggaagtgtggtgcgtgggcaccaacggcaaacgctatcaggcccagagctccacagaacagacgctgctgagccccagtgagaaaccaaggcgctttggtgtgtacctggactatgaagctgggcgcctgggcttctacaacgcagagactctagcccacgtgcacaccttctcggctgccttcctgggcgagcgtgtctttcctttcttccgggtgctctccaagggcacccgcatcaagctctgcccttgattatcctgccacccgcaggggcccctctgtcagcacttggggggtgggtggtggagggtggcccgtaagtttgagggctcaaaggctcttcccactgcttgttactgtgttgcttcccactcccccttgaccccaggcccctgcttctccctctaggagcctaaagaaccctcctggcctccagctcagccttctctcacctactatgtctgtccaacaggtctgcatgggtccctgataatgagaacagctgcctggtcttctctcccagtctgcctagcccagccctgggactggaatttgagtaggggatgaggggaaattgtaatttcattccttaacttccttttccccacccctgctcttcaacctctttatcagttctgaggctggagggtttgggcaaggcaacatccccattccaattccattttctgatgcagattttagctgagggatttggaagccatttggggaggcaggctgggccaaagggtagagctgggtaataaatgtctattctcctggggaggagggattctaaactttccttccgtcctcaatttctacctccatagaccggccagaatttagcttcacttgagagagatctggaatggtcgccatgattgaaaccacgcaccattacatcatcattacattaattacatcaacataaattatttcttcccccttcccttttccagcactcaaccaaggagcaaagctcatcccaccccacacccctcccaggtctgctcactgccaggctcctctcccctttgttcagtggagctggcttttctcccagcccctttccatgcctttcactccatttggcaagctctgagggggagcctggggacgggtttgggtccccaggaggagagccttgggtataatctatttttctaggagcctcttgccttgtcacttgcagctttcgccctctgctttgatggctgaggtgaactcatgttctttgggaaaagggaaggcgtgctgtggaaataaaatgtttatttgcttctc

SEQ ID NO: 418495 - DNA, 2661 bp, Homo sapiens
  misc_feature (70)..(70): n is a, c, g, or t
  misc_feature (455)..(455): n is a, c, g, or t
atcggctgtggggagtaccggctgcagtcggctgtgccgggagggtaggatggcgtctggccgatgcggngatagcaccgaaagcagacggccgccaggcgctccccctaccccccgaagtttctccccagcggcgggggatgggggtaggcggttcctctgttctttctgcgttccccgcggcctcttaccacagagacgcgggcctccaccgtcctagccctcccgccctgttctctagtgcggactagagcgtctcctcgccatttcctgtcgccctggggccccgcggggaaaaagggggagtagcaggacagcggagggaagtcgcgagcttaggtggtgtgtagacgccggaagtgttgggaaggaggccggaagctaggggcggggccaggaagtgaggaggggcgggggtttatgaggagtccaagggagcattggggcagacttgnactcagagccacctgagggacttggcggtggcgcccagcactgtcccctcccctcgtagagacacggttgtcgtttgggagtagggaacactgtgttggggtgggttgtcggcaggacatctctctggctgctcttggggcgaggtgtggaggggcagggctgggggtggagccgggtcgccagggcgtcggtagggaagacccccgcccctcgcccccccaccgaacctctacactggctggctggacactaagatggctgccgttgccatgacacccaaccctgtgcagacccttcaggaggaggcggtgtgcgccatctgcctcgattacttcacggaccccgtgtccatcggctgcgggcacaacttctgccgagtttgtgtaacccagttgtggggtggggaggatgaggaggacagagatgagttagatcgggaggaggaggaggaggacggagaggaggaggaagtggaggctgtgggggctggcgcggggtgggacacccccatgcgggatgaagactacgagggtgacatggaggaggaggtcgaggaggaagaagagggtgtgttctggaccagtggcatgagcaggtccagctgggacaacatggactatgtgtgggaggaggaggacgaggaggaagacctggactactacttgggggacatggaggaggaggacctgaggggggaggatgaggaggacgaggaggaagtgctggaggaggttgaggaagaggatctagaccccgtcaccccactgcccccgcctccagcccctcggaggtgcttcacatgccctcagtgccgaaagagctttcctcggcggagcttccgccccaacctgcagctggccaatatggtccaggtgattcggcagatgcacccaacccctggtcgagggagccgcgtgaccgatcagggcatctgtcccaaacaccaagaagccctgaagctcttctgcgaggtagacgaagaggccatctgtgtggtgtgccgagaatccaggagccacaaacagcacagcgtggtgccattggaggaggtggtgcaggagtacaaggccaaactgcaggggcacgtggaaccactgaggaagcacctggaggcagtgcagaagatgaaagccaaggaggagaggcgagtgacagaactgaagagccagatgaagtcagagctggcagcggtggcctcggagtttgggcgactgacacggtttctggctgaagagcaggcagggctggaacggcgtctcagagagatgcatgaagcccagctggggcgtgcgggagccgcggctagtcgccttgcagaacaggccgcccagctcagccgcctgctggcagaggcccaggagcggagccagcaggggggtctccggctgctccaggtgtgaagaggtacagctgcagcccccagaggtctggtcccctgacccgtgccaaccccatagccatgacttcctgacagatgccatcgtgaggaaaatgagccggatgttctgtcaggctgcgagagtggacctgacgctggaccctgacacggctcacccggccctgatgctgtcccctgaccgccggggggtccgcctggcagagcggcggcaggaggttgctgaccatcccaagcgcttctcggccgactgctgcgtactgggggcccagggcttccgctccggccggcactactgggagaccctcctggcctccagctcagccttctctcacctactatgtctgtccaacagaccggccagaatttagcttcacttgagagagatctggaatggtcgccatgattgaaaccacgcaccattacatcatcattacattaattacatcaacataaattatttcttcccccttcccttttccagcactcaaccaaggagcaaagctcatcccaccccacacccctcccaggtctgctcactgccaggctcctctcccctttgttcagtggagctggcttttctcccagcccctttccatgcctttcactccatttggcaagctctgagggggagcctggggacgggtttgggtccccaggaggagagccttgggtataatctatttttctaggagcctcttgccttgtcacttgcagctttcgccctctgctttgatggctgaggtgaactcatgttctttgggaaaagggaaggcgtgctgtggaaataaaatgtttatttgcttctc

SEQ ID NO: 418496 - DNA, 3531 bp, Homo sapiens
  misc_feature (70)..(70): n is a, c, g, or t
  misc_feature (455)..(455): n is a, c, g, or t
atcggctgtggggagtaccggctgcagtcggctgtgccgggagggtaggatggcgtctggccgatgcggngatagcaccgaaagcagacggccgccaggcgctccccctaccccccgaagtttctccccagcggcgggggatgggggtaggcggttcctctgttctttctgcgttccccgcggcctcttaccacagagacgcgggcctccaccgtcctagccctcccgccctgttctctagtgcggactagagcgtctcctcgccatttcctgtcgccctggggccccgcggggaaaaagggggagtagcaggacagcggagggaagtcgcgagcttaggtggtgtgtagacgccggaagtgttgggaaggaggccggaagctaggggcggggccaggaagtgaggaggggcgggggtttatgaggagtccaagggagcattggggcagacttgnactcagagccacctgagggacttggcggtggcgcccagcactgtcccctcccctcgtagagacacggttgtcgtttgggagtagggaacactgtgttggggtgggttgtcggcaggacatctctctggctgctcttggggcgaggtgtggaggggcagggctgggggtggagccgggtcgccagggcgtcggtagggaagacccccgcccctcgcccccccaccgaacctctacactggctggctggacactaagatggctgccgttgccatgacacccaaccctgtgcagacccttcaggaggaggcggtgtgcgccatctgcctcgattacttcacggaccccgtgtccatcggctgcgggcacaacttctgccgagtttgtgtaacccagttgtggggtggggaggatgaggaggacagagatgagttagatcgggaggaggaggaggaggacggagaggaggaggaagtggaggctgtgggggctggcgcggggtgggacacccccatgcgggatgaagactacgagggtgacatggaggaggaggtcgaggaggaagaagagggtgtgttctggaccagtggcatgagcaggtccagctgggacaacatggactatgtgtgggaggaggaggacgaggaggaagacctggactactacttgggggacatggaggaggaggacctgaggggggaggatgaggaggacgaggaggaagtgctggaggaggttgaggaagaggatctagaccccgtcaccccactgcccccgcctccagcccctcggaggtgcttcacatgccctcagtgccgaaagagctttcctcggcggagcttccgccccaacctgcagctggccaatatggtccaggtgattcggcagatgcacccaacccctggtcgagggagccgcgtgaccgatcagggcatctgtcccaaacaccaagaagccctgaagctcttctgcgaggtagacgaagaggccatctgtgtggtgtgccgagaatccaggagccacaaacagcacagcgtggtgccattggaggaggtggtgcaggagtacaaggccaaactgcaggggcacgtggaaccactgaggaagcacctggaggcagtgcagaagatgaaagccaaggaggagaggcgagtgacagaactgaagagccagatgaagtcagagctggcagcggtggcctcggagtttgggcgactgacacggtttctggctgaagagcaggcagggctggaacggcgtctcagagagatgcatgaagcccagctggggcgtgcgggagccgcggctagtcgccttgcagaacaggccgcccagctcagccgcctgctggcagaggcccaggagcggagccagcaggggggtctccggctgctccaggacatcaaggagactttcaataggtgtgaagaggtacagctgcagcccccagaggtctggtcccctgacccgtgccaaccccatagccatgacttcctgacagatgccatcgtgaggaaaatgagccggatgttctgtcaggctgcgagagtggacctgacgctggaccctgacacggctcacccggccctgatgctgtcccctgaccgccggggggtccgcctggcagagcggcggcaggaggttgctgaccatcccaagcgcttctcggccgactgctgcgtactgggggcccagggcttccgctccggccggcactactgggaggtagaggtgggcgggcggcggggctgggcggtgggtgctgcccgtgaatcaacccatcataaggaaaaggtgggccctgggggttcctccgtgggcagcggggatgccagctcctcgcgccatcaccatcgccgccgccggctccacctgccccagcagcccctgctccagcgggaagtgtggtgcgtgggcaccaacggcaaacgctatcaggcccagagctccacagaacagacgctgctgagccccagtgagaaaccaaggcgctttggtgtgtacctggactatgaagctgggcgcctgggcttctacaacgcagagactctagcccacgtgcacaccttctcggctgccttcctgggcgagcgtgtctttcctttcttccgggtgctctccaagggcacccgcatcaagctctgcccttgattatcctgccacccgcaggggcccctctgtcagcacttggggggtgggtggtggagggtggcccgtaagtttgagggctcaaaggctcttcccactgcttgttactgtgttgcttcccactcccccttgaccccaggcccctgcttctccctctaggagcctaaagaaccctcctggcctccagctcagccttctctcacctactatgtctgtccaacaggtctgcatgggtccctgataatgagaacagctgcctggtcttctctcccagtctgcctagcccagccctgggactggaatttgagtaggggatgaggggaaattgtaatttcattccttaacttccttttccccacccctgctcttcaacctctttatcagttctgaggctggagggtttgggcaaggcaacatccccattccaattccattttctgatgcagattttagctgagggatttggaagccatttggggaggcaggctgggccaaagggtagagctgggtaataaatgtctattctcctggggaggagggattctaaactttccttccgtcctcaatttctacctccatagaccggccagaatttagcttcacttgagagagatctggaatggtcgccatgattgaaaccacgcaccattacatcatcattacattaattacatcaacataaattatttcttcccccttcttttcagccctttcatggctttacatcaattggaagctctgagggagctgggacggttggtcccagaggagagctgggtatactatttcagggccctgctgtcttgggttgcccgcttgaggaggacacgtttggagaggagggcgggacaggttgtcacacaaacaaagaaggggcccaaataaagtggggccaaataccagcgtgttaaagggaaagagtcacagcaac

SEQ ID NO: 418497 - DNA, 2074 bp, Homo sapiens
  misc_feature (70)..(70): n is a, c, g, or t
  misc_feature (455)..(455): n is a, c, g, or t
atcggctgtggggagtaccggctgcagtcggctgtgccgggagggtaggatggcgtctggccgatgcggngatagcaccgaaagcagacggccgccaggcgctccccctaccccccgaagtttctccccagcggcgggggatgggggtaggcggttcctctgttctttctgcgttccccgcggcctcttaccacagagacgcgggcctccaccgtcctagccctcccgccctgttctctagtgcggactagagcgtctcctcgccatttcctgtcgccctggggccccgcggggaaaaagggggagtagcaggacagcggagggaagtcgcgagcttaggtggtgtgtagacgccggaagtgttgggaaggaggccggaagctaggggcggggccaggaagtgaggaggggcgggggtttatgaggagtccaagggagcattggggcagacttgnactcagagccacctgagggacttggcggtggcgcccagcactgtcccctcccctcgtagagacacggttgtcgtttgggagtagggaacactgtgttggggtgggttgtcggcaggacatctctctggctgctcttggggcgaggtgtggaggggcagggctgggggtggagccgggtcgccagggcgtcggtagggaagacccccgcccctcgcccccccaccgaacctctacactggctggctggacactaagatggctgccgttgccatgacacccaaccctgtgcagacccttcaggaggaggcggtgtgcgccatctgcctcgattacttcacggaccccgtgtccatcggctgcgggcacaacttctgccgagtttgtgtaacccagttgtggggtggggaggatgaggaggacagagatgagttagatcgggaggaggaggaggaggacggagaggaggaggaagtggaggctgtgggggctggcgcggggtgggacacccccatgcgggatgaagactacgagggtgacatggaggaggaggtcgaggaggaagaagagggtgtgttctggaccagtggcatgagcaggtccagctgggacaacatggactatgtgtgggaggaggaggacgaggaggaagacctggactactacttgggggacatggaggaggaggacctgaggggggaggatgaggaggacgaggaggaagtgctggaggaggttgaggaagaggatctagaccccgtcaccccactgcccccgcctccagcccctcggaggtgcttcacatgccctcagtgccgaaagagctttcctcggcggagcttccgccccaacctgcagctggccaatatggtccaggtgattcggcagatgcacccaacccctggtcgagggagccgcgtgaccgatcagggcatctgtcccaaacaccaagaagccctgaagctcttctgcgaggtagacgaagaggccatctgtgtggtgtgccgagaatccaggagccacaaacagcacagcgtggtgccattggaggaggtggtgcaggagtacaaggccaaactgcaggggcacgtggaaccactgaggaagcacctggaggcagtgcagaagatgaaagccaaggaggagaggcgagtgacagaactgaagagccagatgaagtcagagctggcagcggtggcctcggagtttgggcgactgacacggtttctggctgaagagcaggcagggctggaacggcgtctcagagagatgcatgaagcccagctggggcgtgcgggagccgcggctagtcgccttgcagaacaggccgcccagctcagccgcctgctggcagaggcccaggagcggagccagcaggggggtctccggctgctccaggacatcaaggagactttcaataggtgtgaagaggtacagctgcagcccccagaggtctggtcccctgacccgtgccaaccccatagccatgacttcctgacagatgccatcgtgaggaaaatgagccggatgttctgtcaggctgcgagagtggctgaggtgaactcatgttctttgggaaaagggaaggcgtgctgtggaaataaaatgtttatttgcttctc

SEQ ID NO: 418498 - DNA, 2684 bp, Homo sapiens
  misc_feature (70)..(70): n is a, c, g, or t
  misc_feature (455)..(455): n is a, c, g, or t
atcggctgtggggagtaccggctgcagtcggctgtgccgggagggtaggatggcgtctggccgatgcggngatagcaccgaaagcagacggccgccaggcgctccccctaccccccgaagtttctccccagcggcgggggatgggggtaggcggttcctctgttctttctgcgttccccgcggcctcttaccacagagacgcgggcctccaccgtcctagccctcccgccctgttctctagtgcggactagagcgtctcctcgccatttcctgtcgccctggggccccgcggggaaaaagggggagtagcaggacagcggagggaagtcgcgagcttaggtggtgtgtagacgccggaagtgttgggaaggaggccggaagctaggggcggggccaggaagtgaggaggggcgggggtttatgaggagtccaagggagcattggggcagacttgnactcagagccacctgagggacttggcggtggcgcccagcactgtcccctcccctcgtagagacacggttgtcgtttgggagtagggaacactgtgttggggtgggttgtcggcaggacatctctctggctgctcttggggcgaggtgtggaggggcagggctgggggtggagccgggtcgccagggcgtcggtagggaagacccccgcccctcgcccccccaccgaacctctacactggctggctggacactaagatggctgccgttgccatgacacccaaccctgtgcagacccttcaggaggaggcggtgtgcgccatctgcctcgattacttcacggaccccgtgtccatcggctgcgggcacaacttctgccgagtttgtgtaacccagttgtggggtggggaggatgaggaggacagagatgagttagatcgggaggaggaggaggaggacggagaggaggaggaagtggaggctgtgggggctggcgcggggtgggacacccccatgcgggatgaagactacgagggtgacatggaggaggaggtcgaggaggaagaagagggtgtgttctggaccagtggcatgagcaggtccagctgggacaacatggactatgtgtgggaggaggaggacgaggaggaagacctggactactacttgggggacatggaggaggaggacctgaggggggaggatgaggaggacgaggaggaagtgctggaggaggttgaggaagaggatctagaccccgtcaccccactgcccccgcctccagcccctcggaggtgcttcacatgccctcagtgccgaaagagctttcctcggcggagcttccgccccaacctgcagctggccaatatggtccaggtgattcggcagatgcacccaacccctggtcgagggagccgcgtgaccgatcagggcatctgtcccaaacaccaagaagccctgaagctcttctgcgaggtagacgaagaggccatctgtgtggtgtgccgagaatccaggagccacaaacagcacagcgtggtgccattggaggaggtggtgcaggagtacaaggccaaactgcaggggcacgtggaaccactgaggaagcacctggaggcagtgcagaagatgaaagccaaggaggagaggcgagtgacagaactgaagagccagatgaagtcagagctggcagcggtggcctcggagtttgggcgactgacacggtttctggctgaagagcaggcagggctggaacggcgtctcagagagatgcatgaagcccagctggggcgtgcgggagccgcggctagtcgccttgcagaacaggccgcccagctcagccgcctgctggcagaggcccaggagcggagccagcaggggggtctccggctgctccaggacatcaaggagactttcaataggtgtgaagaggtacagctgcagcccccagaggtctggtcccctgacccgtgccaaccccatagccatgacttcctgacagatgccatcgtgaggaaaatgagccggatgttctgtcaggctgcgagagtggacctgacgctggaccctgacacggctcacccggccctgatgctgtcccctgaccgccggggggtccgcctggcagagcggcggcaggaggttgctgaccatcccaagcgcttctcggccgactgctgcgtactgggggcccagggcttccgctccggccggcactactgggagaccctcctggcctccagctcagccttctctcacctactatgtctgtccaacagaccggccagaatttagcttcacttgagagagatctggaatggtcgccatgattgaaaccacgcaccattacatcatcattacattaattacatcaacataaattatttcttcccccttcccttttccagcactcaaccaaggagcaaagctcatcccaccccacacccctcccaggtctgctcactgccaggctcctctcccctttgttcagtggagctggcttttctcccagcccctttccatgcctttcactccatttggcaagctctgagggggagcctggggacgggtttgggtccccaggaggagagccttgggtataatctatttttctaggagcctcttgccttgtcacttgcagctttcgccctctgctttgatggctgaggtgaactcatgttctttgggaaaagggaaggcgtgctgtggaaataaaatgtttatttgcttctc

SEQ ID NO: 418499 - DNA, 3421 bp, Homo sapiens
  misc_feature (70)..(70): n is a, c, g, or t
  misc_feature (455)..(455): n is a, c, g, or t
atcggctgtggggagtaccggctgcagtcggctgtgccgggagggtaggatggcgtctggccgatgcggngatagcaccgaaagcagacggccgccaggcgctccccctaccccccgaagtttctccccagcggcgggggatgggggtaggcggttcctctgttctttctgcgttccccgcggcctcttaccacagagacgcgggcctccaccgtcctagccctcccgccctgttctctagtgcggactagagcgtctcctcgccatttcctgtcgccctggggccccgcggggaaaaagggggagtagcaggacagcggagggaagtcgcgagcttaggtggtgtgtagacgccggaagtgttgggaaggaggccggaagctaggggcggggccaggaagtgaggaggggcgggggtttatgaggagtccaagggagcattggggcagacttgnactcagagccacctgagggacttggcggtggcgcccagcactgtcccctcccctcgtagagacacggttgtcgtttgggagtagggaacactgtgttggggtgggttgtcggcaggacatctctctggctgctcttggggcgaggtgtggaggggcagggctgggggtggagccgggtcgccagggcgtcggtagggaagacccccgcccctcgcccccccaccgaacctctacactggctggctggacactaagatggctgccgttgccatgacacccaaccctgtgcagacccttcaggaggaggcggtgtgcgccatctgcctcgattacttcacggaccccgtgtccatcggctgcgggcacaacttctgccgagtttgtgtaacccagttgtggggtggggaggatgaggaggacagagatgagttagatcgggaggaggaggaggaggacggagaggaggaggaagtggaggctgtgggggctggcgcggggtgggacacccccatgcgggatgaagactacgagggtgacatggaggaggaggtcgaggaggaagaagagggtgtgttctggaccagtggcatgagcaggtccagctgggacaacatggactatgtgtgggaggaggaggacgaggaggaagacctggactactacttgggggacatggaggaggaggacctgaggggggaggatgaggaggacgaggaggaagtgctggaggaggttgaggaagaggatctagaccccgtcaccccactgcccccgcctccagcccctcggaggtgcttcacatgccctcagtgccgaaagagctttcctcggcggagcttccgccccaacctgcagctggccaatatggtccaggtgattcggcagatgcacccaacccctggtcgagggagccgcgtgaccgatcagggcatctgtcccaaacaccaagaagccctgaagctcttctgcgaggtagacgaagaggccatctgtgtggtgtgccgagaatccaggagccacaaacagcacagcgtggtgccattggaggaggtggtgcaggagtacaaggccaaactgcaggggcacgtggaaccactgaggaagcacctggaggcagtgcagaagatgaaagccaaggaggagaggcgagtgacagaactgaagagccagatgaagtcagagctggcagcggtggcctcggagtttgggcgactgacacggtttctggctgaagagcaggcagggctggaacggcgtctcagagagatgcatgaagcccagctggggcgtgcgggagccgcggctagtcgccttgcagaacaggccgcccagctcagccgcctgctggcagaggcccaggagcggagccagcaggggggtctccggctgctccaggacatcaaggagactttcaataggtgtgaagaggtacagctgcagcccccagaggtctggtcccctgacccgtgccaaccccatagccatgacttcctgacagatgccatcgtgaggaaaatgagccggatgttctgtcaggctgcgagagtggacctgacgctggaccctgacacggctcacccggccctgatgctgtcccctgaccgccggggggtccgcctggcagagcggcggcaggaggttgctgaccatcccaagcgcttctcggccgactgctgcgtactgggggcccagggcttccgctccggccggcactactgggaggtagaggtgggcgggcggcggggctgggcggtgggtgctgcccgtgaatcaacccatcataaggaaaaggtgggccctgggggttcctccgtgggcagcggggatgccagctcctcgcgccatcaccatcgccgccgccggctccacctgccccagcagcccctgctccagcgggaagtgtggtgcgtgggcaccaacggcaaacgctatcaggcccagagctccacagaacagacgctgctgagccccagtgagaaaccaaggcgctttggtgtgtacctggactatgaagctgggcgcctgggcttctacaacgcagagactctagcccacgtgcacaccttctcggctgccttcctgggcgagcgtgtctttcctttcttccgggtgctctccaagggcacccgcatcaagctctgcccttgattatcctgccacccgcaggggcccctctgtcagcacttggggggtgggtggtggagggtggcccgtaagtttgagggctcaaaggctcttcccactgcttgttactgtgttgcttcccactcccccttgaccccaggcccctgcttctccctctaggagcctaaagaaccctcctggcctccagctcagccttctctcacctactatgtctgtccaacaggtctgcatgggtccctgataatgagaacagctgcctggtcttctctcccagtctgcctagcccagccctgggactggaatttgagtaggggatgaggggaaattgtaatttcattccttccgtcctcaatttctacctccatagaccggccagaatttagcttcacttgagagagatctggaatggtcgccatgattgaaaccacgcaccattacatcatcattacattaattacatcaacataaattatttcttcccccttcccttttccagcactcaaccaaggagcaaagctcatcccaccccacacccctcccaggtctgctcactgccaggctcctctcccctttgttcagtggagctggcttttctcccagcccctttccatgcctttcactccatttggcaagctctgagggggagcctggggacgggtttgggtccccaggaggagagccttgggtataatctatttttctaggagcctcttgccttgtcacttgcagctttcgccctctgctttgatggctgaggtgaactcatgttctttgggaaaagggaaggcgtgctgtggaaataaaatgtttatttgcttctc

SEQ ID NO: 418500 - DNA, 2715 bp, Homo sapiens
  misc_feature (70)..(70): n is a, c, g, or t
  misc_feature (455)..(455): n is a, c, g, or t
atcggctgtggggagtaccggctgcagtcggctgtgccgggagggtaggatggcgtctggccgatgcggngatagcaccgaaagcagacggccgccaggcgctccccctaccccccgaagtttctccccagcggcgggggatgggggtaggcggttcctctgttctttctgcgttccccgcggcctcttaccacagagacgcgggcctccaccgtcctagccctcccgccctgttctctagtgcggactagagcgtctcctcgccatttcctgtcgccctggggccccgcggggaaaaagggggagtagcaggacagcggagggaagtcgcgagcttaggtggtgtgtagacgccggaagtgttgggaaggaggccggaagctaggggcggggccaggaagtgaggaggggcgggggtttatgaggagtccaagggagcattggggcagacttgnactcagagccacctgagggacttggcggtggcgcccagcactgtcccctcccctcgtagagacacggttgtcgtttgggagtagggaacactgtgttggggtgggttgtcggcaggacatctctctggctgctcttggggcgaggtgtggaggggcagggctgggggtggagccgggtcgccagggcgtcggtagggaagacccccgcccctcgcccccccaccgaacctctacactggctggctggacactaagatggctgccgttgccatgacacccaaccctgtgcagacccttcaggaggaggcggtgtgcgccatctgcctcgattacttcacggaccccgtgtccatcggctgcgggcacaacttctgccgagtttgtgtaacccagttgtggggtggggaggatgaggaggacagagatgagttagatcgggaggaggaggaggaggacggagaggaggaggaagtggaggctgtgggggctggcgcggggtgggacacccccatgcgggatgaagactacgagggtgacatggaggaggaggtcgaggaggaagaagagggtgtgttctggaccagtggcatgagcaggtccagctgggacaacatggactatgtgtgggaggaggaggacgaggaggaagacctggactactacttgggggacatggaggaggaggacctgaggggggaggatgaggaggacgaggaggaagtgctggaggaggttgaggaagaggatctagaccccgtcaccccactgcccccgcctccagcccctcggaggtgcttcacatgccctcagtgccgaaagagctttcctcggcggagcttccgccccaacctgcagctggccaatatggtccaggtgattcggcagatgcacccaacccctggtcgagggagccgcgtgaccgatcagggcatctgtcccaaacaccaagaagccctgaagctcttctgcgaggtagacgaagaggccatctgtgtggtgtgccgagaatccaggagccacaaacagcacagcgtggtgccattggaggaggtggtgcaggagtacaaggccaaactgcaggggcacgtggaaccactgaggaagcacctggaggcagtgcagaagatgaaagccaaggaggagaggcgagtgacagaactgaagagccagatgaagtcagagctggcagcggtggcctcggagtttgggcgactgacacggtttctggctgaagagcaggcagggctggaacggcgtctcagagagatgcatgaagcccagctggggcgtgcgggagccgcggctagtcgccttgcagaacaggccgcccagctcagccgcctgctggcagaggcccaggagcggagccagcaggggggtctccggctgctccaggacatcaaggagactttcaataggtgtgaagaggtacagctgcagcccccagaggtctggtcccctgacccgtgccaaccccatagccatgacttcctgacagatgccatcgtgaggaaaatgagccggatgttctgtcaggctgcgagagtggacctgacgctggaccctgacacggctcacccggccctgatgctgtcccctgaccgccggggggtccgcctggcagagcggcggcaggaggttgctgaccatcccaagcgcttctcggccgactgctgcgtactgggggcccagggcttccgctccggccggcactactgggaggtctgcatgggtccctgataatgagaacagctgcctggtcttctctcccagtctgcctagcccagccctgggactggaatttgaaccggccagaatttagcttcacttgagagagatctggaatggtcgccatgattgaaaccacgcaccattacatcatcattacattaattacatcaacataaattatttcttcccccttcccttttccagcactcaaccaaggagcaaagctcatcccaccccacacccctcccaggtctgctcactgccaggctcctctcccctttgttcagtggagctggcttttctcccagcccctttccatgcctttcactccatttggcaagctctgagggggagcctggggacgggtttgggtccccaggaggagagccttgggtataatctatttttctaggagcctcttgccttgtcacttgcagctttcgccctctgctttgatggctgaggtgaactcatgttctttgggaaaagggaaggcgtgctgtggaaataaaatgtttatttgcttctc

SEQ ID NO: 418501 - DNA, 404 bp, Homo sapiens
aaacacctctgtttaatcctgaagttgcaaaataccttaaggtccctcaagacccattgaaattttataagaagatttacttttgccacagttgccagctttatttgccttctacagaattttctgtatcatccacctcacgccgcatataccggtgtcgtaactgcattaaccttcagaatgaggctcaaaaacgagaatcatttttgaagtacaaatgtttacttcaacagctctactatacagaagctgattatgaagatgattctaaaattgctttcttgatgcagctacaagacattcagtacctgacagagaacatctgggcgtcccagtcagtcctcagtgcttgcgacaatctcagtgatctggtcatggtcagatggaataaatccctggagtgg

SEQ ID NO: 418502 - DNA, 925 bp, Homo sapiens
ggatttcgggatggaaagggggagaggctgcccttctaggaaccccccagtacaagcctcctttcccagattggtgtaactaggcccagatatggacgaagagcaggctcggggtccgctagaaatgaggagcacccaggagcagcttatgtgctggcagggggcttctaagctggttaacactgtgtgagggctccccggacctgcccgtcagcttctctccgaccctgctgtcactctcactcgtcaggacgggagtcacccagctgaaggccggcagcttcctgagaattccgtctctgcacctgctcctcttcacctccaactccttctccgtgattgaggacgatgcatttgcgggcctgtcccacctgcagtacctcttcatcgaggacaatgagattggctccatctctaagaatgccctcagaggacttcgctcgcttacacacctaagcctggccaataaccatctggagaccctccccagattcctgttccgaggcctggacacccttactcacgtggacctccgcgggaacccgttccagtgtgactgccgcgtcctctggctcctgcagtggatgcccaccgtgaatgccagcgtggggaccggcgcctgtgcgggccccgcctccctgagccacatgcagctccaccacctcgaccccaagactttcaagtgcagagccatagagctgtcctggttccagacggtgggggagtcggcactgagcgtagagcccttctcctaccaaggggagcctcacattgtgctggcacagcccttcgccggccgctgcctgattctctcctgggactacagcctgcagcgcttccggcccgaggaagagctgcccgcgggctccgtggtgtcctgcaagccactggtgctgggccccagcctcttcgtgctggctgcccg

SEQ ID NO: 418503 - DNA, 1455 bp, Homo sapiens
gccgggtgtccagcgaacccctttcccaaaccttcggggagaagggaggtgggaggaggcaaagaaactacaggcaggagctgcaaggggggtggggggggcaggagacaagaaatcaagacaccaggcagcaggacacacacacactcacatacactcacacacatagagaccaacagatagacagctacctaaagcctgaaagactgacagcaacacagaaaaaaagaaacaggcagaaagagagacaaagacagaaatagaaacagactaacacacagagtcaaaaatacagagacagaaagacagggagaaagagaaacagaaaattagacaccaaagacatacgaacagggaggaaggccgactgaaagaaagacggagaagaggagagagaagccagggccgagcgtgccagcaggcggatggagggcggcctggtggaggaggagacgtagtggcctgggctgagctgggtgggccgggagaacgcgggtgcctcagagtgggggtgggaggcatgggaggggcaggcattctgctgctgctgctggctggggcgggggtggtggtggcctggagacccccaaagggaaagtgtcccctgcgctgctcctgctctaaagacagcgccctgtgtgagggctccccggacctgcccgtcagcttctctccgaccctgctgtcactctcactcgtcaggacgggagtcacccagctgaaggccggcagcttcctgagaattccgtctctgcacctgctcctcttcacctccaactccttctccgtgattgaggacgatgcatttgcgggcctgtcccacctgcagtacctcttcatcgaggacaatgagattggctccatctctaagaatgccctcagaggacttcgctcgcttacacacctaagcctggccaataaccatctggagaccctccccagattcctgttccgaggcctggacacccttactcacgtggacctccgcgggaacccgttccagtgtgactgccgcgtcctctggctcctgcagtggatgcccaccgtgaatgccagcgtggggaccggcgcctgtgcgggccccgcctccctgagccacatgcagctccaccacctcgaccccaagactttcaagtgcagagccataggtggggggctttcccgatggggtgggaggcgggagatctgggggaaaggctgccagggccaagaggctcgtctcactccctgccctgccatttcccggagtgggaagaccctgagcaagcagcactgccttcctgagccccagttttctcatctgtaaagtgggggtaataaacagtgatataggagtgccatgggaattcaatgatacatcttcacgtgttcggcatttggcgccgggcctgggacaggaggtccttataaacgttcacccttgttaacataaaagcaaccaatttaaaaattctt

SEQ ID NO: 418504 - DNA, 1377 bp, Homo sapiens
gccgggtgtccagcgaacccctttcccaaaccttcggggagaagggaggtgggaggaggcaaagaaactacaggcaggagctgcaaggggggtggggggggcaggagacaagaaatcaagacaccaggcagcaggacacacacacactcacatacactcacacacatagagaccaacagatagacagctacctaaagcctgaaagactgacagcaacacagaaaaaaagaaacaggcagaaagagagacaaagacagaaatagaaacagactaacacacagagtcaaaaatacagagacagaaagacagggagaaagagaaacagaaaattagacaccaaagacatacgaacagggaggaaggccgactgaaagaaagacggagaagaggagagagaagccagggccgagcgtgccagcaggcggatggagggcggcctggtggaggaggagacgtagtggcctgggctgagctgggtgggccgggagaacgcgggtgcctcagagtgggggtgggaggcatgggaggggcaggcattctgctgctgctgctggctggggcgggggtggtggtggcctggagacccccaaagggaaagtgtcccctgcgctgctcctgctctaaagacagcgccctgtgtgagggctccccggacctgcccgtcagcttctctccgaccctgctgtcactctcactcgtcaggacgggagtcacccagctgaaggccggcagcttcctgagaattccgtctctgcacctgctcctcttcacctccaactccttctccgtgattgaggacgatgcatttgcgggcctgtcccacctgcagtacctcttcatcgaggacaatgagattggctccatctctaagaatgccctcagaggacttcgctcgcttacacacctaagcctggccaataaccatctggagaccctccccagattcctgttccgaggcctggacacccttactcacgtggacctccgcgggaacccgttccagtgtgactgccgcgtcctctggctcctgcagtggatgcccaccgtgaatgccagcgtggggaccggcgcctgtgcgggccccgcctccctgagccacatgcagctccaccacctcgaccccaagactttcaagtgcagagccatagagctgtcctggttccagacggtgggggagtcggcactgagcgtagagcccttctcctaccaaggggagcctcacattgtgctggcacagcccttcgccggccgctgcctgattctctcctgggactacagcctgcagcgcttccggcccgaggaagagctgcccgcgggctccgtggtgtcctgcaagccactggtgctgggccccagcctcttcgtgctggctgcccg

SEQ ID NO: 418505 - DNA, 907 bp, Homo sapiens
ggatgcccaggatgaagaggatcccggcgatgacgaggcctccgatctgcagggactggtagtctgtgagcagcagagcagggaagctgtgtgagggctccccggacctgcccgtcagcttctctccgaccctgctgtcactctcactcgtcaggacgggagtcacccagctgaaggccggcagcttcctgagaattccgtctctgcacctgctcctcttcacctccaactccttctccgtgattgaggacgatgcatttgcgggcctgtcccacctgcagtacctcttcatcgaggacaatgagattggctccatctctaagaatgccctcagaggacttcgctcgcttacacacctaagcctggccaataaccatctggagaccctccccagattcctgttccgaggcctggacacccttactcacgtggacctccgcgggaacccgttccagtgtgactgccgcgtcctctggctcctgcagtggatgcccaccgtgaatgccagcgtggggaccggcgcctgtgcgggccccgcctccctgagccacatgcagctccaccacctcgaccccaagactttcaagtgcagagccataggtggggggctttcccgatggggtgggaggcgggagatctgggggaaaggctgccagggccaagaggctcgtctcactccctgccctgccatttcccggagtgggaagaccctgagcaagcagcactgccttcctgagccccagttttctcatctgtaaagtgggggtaataaacagtgatataggagtgccatgggaattcaatgatacatcttcacgtgttcggcatttggcgccgggcctgggacaggaggtccttataaacgttcacccttgttaacataaaagcaaccaatttaaaaattctt

SEQ ID NO: 418506 - DNA, 675 bp, Homo sapiens
acagaagtcagagacaagaaacgtttcaaatgaccaggaaacaactctgaattacttcatcgaggacaatgagattggctccatctctaagaatgccctcagaggacttcgctcgcttacacacctaagcctggccaataaccatctggagaccctccccagattcctgttccgaggcctggacacccttactcacgtggacctccgcgggaacccgttccagtgtgactgccgcgtcctctggctcctgcagtggatgcccaccgtgaatgccagcgtggggaccggcgcctgtgcgggccccgcctccctgagccacatgcagctccaccacctcgaccccaagactttcaagtgcagagccataggtggggggctttcccgatggggtgggaggcgggagatctgggggaaaggctgccagggccaagaggctcgtctcactccctgccctgccatttcccggagtgggaagaccctgagcaagcagcactgccttcctgagccccagttttctcatctgtaaagtgggggtaataaacagtgatataggagtgccatgggaattcaatgatacatcttcacgtgttcggcatttggcgccgggcctgggacaggaggtccttataaacgttcacccttgttaacataaaagcaaccaatttaaaaattctt

SEQ ID NO: 418507 - DNA, 3522 bp, Homo sapiens
cgcccgggcaggtcagcctgtctcaaggcacgccagtctcagctccgaccttgcagcggcgcagcgcgggtgggaggcggggaggagcagcgggaagagcggagcgaggaccgcggtccggcgcagtcttcaatgagcagcgcggaaactgcaccccagacccgagcctgctgcgcgccccctcccagagctcacctggtgccaggtaacaggcctggcctcgccctgtggatgatgatggccttgcccccgtgagctacaacctggccttcagcacccgcccacctccaaccagcaggatgcggctgtggaaggcggtggtggtgactttggccttcatgagtgtggacatctgcgtgaccacggccatctatgtcttcagccacctggaccgcagcctcctggaggacatccgccacttcaacatctttgactcggtgctggatctctgggcagcctgcctgtaccgcagctgcctgctgctgggagccaccattggtgtggccaagaacagtgcgctggggccccggcggctgcgggcctcgtggctggtcatcaccctcgtgtgcctcttcgtgggcatctatgccatggtgaagctgctgctcttctcagaggtgcgcaggcccatccgggacccctggttttgggccctgttcgtgtggacgtacatttcactcggcgcatccttcctgctctggtggctgctgtccaccgtgcggccaggcacccaggccctggagccaggggcggccaccgaggctgagggcttccctgggagcggccggccaccgcccgagcaggcgtctggggccacgctgcagaagctgctctcctacaccaagcccgacgtggccttcctcgtggccgcctccttcttcctcatcgtggcagctctgggagagaccttcctgccctactacacgggccgcgccattgatggcatcgtcatccagaaaagcatggatcagttcagcacggctgtcgtcatcgtgtgcctgctggccattggcagctcatttgccgcaggtattcggggcggcatttttaccctcatatttgccagactgaacattcgccttcgaaactgtctcttccgctcactggtgtcccaggagacaagcttctttgatgagaaccgcacaggggacctcatctcccgcctgacctcggacaccaccatggtcagcgacctggtctcccagaacatcaatgtcttcctgcggaacacagtcaaggtcacgggcgtggtggtcttcatgttcagcctctcatggcagctctccttggtcaccttcatgggcttccccatcatcatgatggtgtccaacatctacggcaagtactacaagaggctctccaaagaggtccagaatgccctggccagagcgagcaacacggcggaggagaccatcagtgccatgaagactgtccggagcttcgccaatgaggaggaggaggcagaggtgtacctgcggaagctgcagcaggtgtacaagctgaacaggaaggaggcagctgcctacatgtactacgtctggggcagcgggctcacactgctggtggtccaggtcagcatcctctactacgggggccaccttgtcatctcaggccagatgaccagcggcaacctcatcgccttcatcatctacgagtttgtcctgggagattgtatggagtccgtgggctccgtctacagtggcctgatgcagggagtgggggctgctgagaaggtgttcgagttcatcgaccggcagccgaccatggtgcacgatggcagcttggcccccgaccacctggagggccgggtggactttgagaatgtgaccttcacctaccgcactcggccccacacccaggtcctgcagaatgtctccttcagcctgtcccccggcaaggtgacggccctggtggggccctcgggcagtgggaagagctcctgtgtcaacatcctggagaacttctaccccctggaggggggccgggtgctgctggacggcaagcccatcagcgcctacgaccacaagtacttgcaccgtgtgatctccctggtgagccaggagcccgtgctgttcgcccgctccatcacggataacatctcctacggcctgcccactgtgcctttcgagatggtggtggaggccgcacagaaggccaatgcccacggcttcatcatggaactccaggacggctacagcacagagacaggggagaagggcgcccagctgtcaggtggccagaagcagcgggtggccatggcccgggctctggtgcggaaccccccagtcctcatcctggatgaagccaccagcgctttggatgccgagagcgagtatctgatccagcaggccatccatggcaacctgcagaagcacacggtactcatcatcgcgcaccggctgagcaccgtggagcacgcgcacctcattgtggtgctggacaagggccgcgtagtgcagcagggcacccaccagcagctgctggcccagggcggcctctacgccaagctggtgcagcggcagatgctggggcttcagcccgccgcagacttcacagctggccacaacgagcctgtagccaacggcagtcacaaggcctgatggggggcccctgcttctcccggtggggcagaggacccggtgcctgcctggcagatgtgcccacggaggcccccagctgccctccgagcccaggcctgcagcactgaaagacgacctgccatgtcccatggatcaccgcttcctgcatcttgcccctggtccctgccccattcccagggcactccttacccctgctgccctgagccaacgccttcacggacctccctagcctcctaagcaaaggtagagctgcctttttaaacctaggtcttaccagggtttttactgtttggtttgaggcaccccagtcaactcctagatttcaaaaacctttttctaattgggagtaatggcgggcactttcaccaagatgttctagaaacttctgagccaggagtgaatggcccttccttagtagcctgggggatgtccagagactaggcctctcccctttacccctccagagaaggggcttccctgtcccggagggagacacggggaacgggattttccgtctctccctcttgccagctctgtgagtctggccagggcgggtagggagcgtggagggcatctgtctgccatcgcccgctgccaatctaagccagtctcactgtgaaccacacgaaacctcaactgggggagtgaggggctggccaggtctggaggggcctcaggggtgcccccagcccggcacccagcgctttcgcccctcgtccacccacccctggctggcagcctccctccccacacccgcccctgtgctctgctgtctggaggccacgtggatgttcatgagatgcattctcttctgtctttggtggatgggatggtggcaaagcccaggatctggctttgccagaggttgcaacatgttgagagaacccggtcaataaagtgtactacctcttacccctaaact

SEQ ID NO: 418508 - DNA, 3393 bp, Homo sapiens
cgcccgggcaggtcagcctgtctcaaggcacgccagtctcagctccgaccttgcagcggcgcagcgcgggtgggaggcggggaggagcagcgggaagagcggagcgaggaccgcggtccggcgcagtcttcaatgagcagcgcggaaactgcaccccagacccgagcctgctgcgcgccccctcccagagctcacctggtgccaggtaacaggcctggcctcgccctgtggatgatgatggccttgcccccgtgagctacaacctggccttcagcacccgcccacctccaaccagcaggatgcggctgtggaaggcggtggtggtgactttggccttcatgagtgtggacatctgcgtgaccacggccatctatgtcttcagccacctggaccgcagcctcctggaggacatccgccacttcaacatctttgactcggtgctggatctctgggcagcctgcctgtaccgcagctgcctgctgctgggagccaccattggtgtggccaagaacagtgcgctggggccccggcggctgcgggcctcgtggctggtcatcaccctcgtgtgcctcttcgtgggcatctatgccatggtgaagctgctgctcttctcagaggtgcgcaggcccatccgggacccctggttttgggccctgttcgtgtggacgtacatttcactcggcgcatccttcctgctctggtggctgctgtccaccgtgcggccaggcacccaggccctggagccaggggcggccaccgaggctgagggcttccctgggagcggccggccaccgcccgagcaggcgtctggggccacgctgcagaagctgctctcctacaccaagcccgacgtggccttcctcgtggccgcctccttcttcctcatcgtggcagctctgggagagaccttcctgccctactacacgggccgcgccattgatggcatcgtcatccagaaaagcatggatcagttcagcacggctgtcgtcatcgtgtgcctgctggccattggcagctcatttgccgcaggtattcggggcggcatttttaccctcatatttgccagactgaacattcgccttcgaaactgtctcttccgctcactggtgtcccaggagacaagcttctttgatgagaaccgcacaggggacctcatctcccgcctgacctcggacaccaccatggtcagcgacctggtctcccagaacatcaatgtcttcctgcggaacacagtcaaggtcacgggcgtggtggtcttcatgttcagcctctcatggcagctctccttggtcaccttcatgggcttccccatcatcatgatggtgtccaacatctacggcaagtactacaagaggctctccaaagaggtccagaatgccctggccagagcgagcaacacggcggaggagaccatcagtgccatgaagactgtccggagcttcgccaatgaggaggaggaggcagaggtgtacctgcggaagctgcagcaggtgtacaagctgaacaggaaggaggcagctgcctacatgtactacgtctggggcagcgggtccgtgggctccgtctacagtggcctgatgcagggagtgggggctgctgagaaggtgttcgagttcatcgaccggcagccgaccatggtgcacgatggcagcttggcccccgaccacctggagggccgggtggactttgagaatgtgaccttcacctaccgcactcggccccacacccaggtcctgcagaatgtctccttcagcctgtcccccggcaaggtgacggccctggtggggccctcgggcagtgggaagagctcctgtgtcaacatcctggagaacttctaccccctggaggggggccgggtgctgctggacggcaagcccatcagcgcctacgaccacaagtacttgcaccgtgtgatctccctggtgagccaggagcccgtgctgttcgcccgctccatcacggataacatctcctacggcctgcccactgtgcctttcgagatggtggtggaggccgcacagaaggccaatgcccacggcttcatcatggaactccaggacggctacagcacagagacaggggagaagggcgcccagctgtcaggtggccagaagcagcgggtggccatggcccgggctctggtgcggaaccccccagtcctcatcctggatgaagccaccagcgctttggatgccgagagcgagtatctgatccagcaggccatccatggcaacctgcagaagcacacggtactcatcatcgcgcaccggctgagcaccgtggagcacgcgcacctcattgtggtgctggacaagggccgcgtagtgcagcagggcacccaccagcagctgctggcccagggcggcctctacgccaagctggtgcagcggcagatgctggggcttcagcccgccgcagacttcacagctggccacaacgagcctgtagccaacggcagtcacaaggcctgatggggggcccctgcttctcccggtggggcagaggacccggtgcctgcctggcagatgtgcccacggaggcccccagctgccctccgagcccaggcctgcagcactgaaagacgacctgccatgtcccatggatcaccgcttcctgcatcttgcccctggtccctgccccattcccagggcactccttacccctgctgccctgagccaacgccttcacggacctccctagcctcctaagcaaaggtagagctgcctttttaaacctaggtcttaccagggtttttactgtttggtttgaggcaccccagtcaactcctagatttcaaaaacctttttctaattgggagtaatggcgggcactttcaccaagatgttctagaaacttctgagccaggagtgaatggcccttccttagtagcctgggggatgtccagagactaggcctctcccctttacccctccagagaaggggcttccctgtcccggagggagacacggggaacgggattttccgtctctccctcttgccagctctgtgagtctggccagggcgggtagggagcgtggagggcatctgtctgccatcgcccgctgccaatctaagccagtctcactgtgaaccacacgaaacctcaactgggggagtgaggggctggccaggtctggaggggcctcaggggtgcccccagcccggcacccagcgctttcgcccctcgtccacccacccctggctggcagcctccctccccacacccgcccctgtgctctgctgtctggaggccacgtggatgttcatgagatgcattctcttctgtctttggtggatgggatggtggcaaagcccaggatctggctttgccagaggttgcaacatgttgagagaacccggtcaataaagtgtactacctcttacccctaaact

SEQ ID NO: 418509 - DNA, 3000 bp, Homo sapiens
  misc_feature (2902)..(2902): n is a, c, g, or t
cgcccgggcaggtcagcctgtctcaaggcacgccagtctcagctccgaccttgcagcggcgcagcgcgggtgggaggcggggaggagcagcgggaagagcggagcgaggaccgcggtccggcgcagtcttcaatgagcagcgcggaaactgcaccccagacccgagcctgctgcgcgccccctcccagagctcacctggtgccaggtaacaggcctggcctcgccctgtggatgatgatggccttgcccccgtgagctacaacctggccttcagcacccgcccacctccaaccagcaggatgcggctgtggaaggcggtggtggtgactttggccttcatgagtgtggacatctgcgtgaccacggccatctatgtcttcagccacctggaccgcagcctcctggaggacatccgccacttcaacatctttgactcggtgctggatctctgggcagcctgcctgtaccgcagctgcctgctgctgggagccaccattggtgtggccaagaacagtgcgctggggccccggcggctgcgggcctcgtggctggtcatcaccctcgtgtgcctcttcgtgggcatctatgccatggtgaagctgctgctcttctcagaggtgcgcaggcccatccgggacccctggttttgggccctgttcgtgtggacgtacatttcactcggcgcatccttcctgctctggtggctgctgtccaccgtgcggccaggcacccaggccctggagccaggggcggccaccgaggctgagggcttccctgggagcggccggccaccgcccgagcaggcgtctggggccacgctgcagaagctgctctcctacaccaagcccgacgtggccttcctcgtggccgcctccttcttcctcatcgtggcagctctgggagagaccttcctgccctactacacgggccgcgccattgatggcatcgtcatccagaaaagcatggatcagttcagcacggctgtcgtcatcgtgtgcctgctggccattggcagctcatttgccgcaggtattcggggcggcatttttaccctcatatttgccagactgaacattcgccttcgaaactgtctcttccgctcactggtgtcccaggagacaagcttctttgatgagaaccgcacaggggacctcatctcccgcctgacctcggacaccaccatggtcagcgacctggtctcccagaacatcaatgtcttcctgcggaacacagtcaaggtcacgggcgtggtggtcttcatgttcagcctctcatggcagctctccttggtcaccttcatgggcttccccatcatcatgatggtgtccaacatctacggcaagtactacaagaggctctccaaagaggtccagaatgccctggccagagcgagcaacacggcggaggagaccatcagtgccatgaagactgtccggagcttcgccaatgaggaggaggaggcagaggtgtacctgcggaagctgcagcaggtgtacaagctgaacaggaaggaggcagctgcctacatgtactacgtctggggcagcgggctcacactgctggtggtccaggtcagcatcctctactacgggggccaccttgtcatctcaggccagatgaccagcggcaacctcatcgccttcatcatctacgagtttgtcctgggagattgtatggagaatgtctccttcagcctgtcccccggcaaggtgacggccctggtggggccctcgggcagtgggaagagctcctgtgtcaacatcctggagaacttctaccccctggaggggggccgggtgctgctggacggcaagcccatcagcgcctacgaccacaagtacttgcaccgtgtgatctccctggtgagccaggagcccgtgctgttcgcccgctccatcacggataacatctcctacggcctgcccactgtgcctttcgagatggtggtggaggccgcacagaaggccaatgcccacggcttcatcatggaactccaggacggctacagcacagagacaggggagaagggcgcccagctgtcaggtggccagaagcagcgggtggccatggcccgggctctggtgcggaaccccccagtcctcatcctggatgaagccaccagcgctttggatgccgagagcgagtatctggtgagtcacagggtggtgggcaatgcgggggcaggagcggctccaggtggccagagcccccatcgcccagcagatggatgctgagaagagacgggccccaggagctctcccagactatcagcctcctgggctggtgaattcctggtgttgagagtggggagccaggagccactctggacccagcctccaggctccaggcagagctgtatggtgtggggcaagagaaggcatcagaatggggagacctgggtcatgagtggtggcttacacctgtaatcccagcactttgggaggccgaagcaggtggatcacctgaggtcaggagttgcagaccagcctggccaacatggtgaaaccccatctctactagaaatacaaaaactagccaggtgtggtagcacatgcctataatcccagctacttgggaggctgaggcaggagaattgcttgaacctgggaagtggaggttgcagtcagccgagattgtgccactgcactccagcctgggcgacagagccagactccatctggctcaaacaaacagacaaaacaaaacaaaataaaataggcccagtatgatggctcatgcctataatcccagcactttgggaggccaaggcaggtggatcacttgaggtccggagttcgagacaagcctggtcaatacagtgaaaccctgtctctactaaaaatacaaaaattagctgggcatggtggtgcatgcctgtaaccccagctactcgggaggctgnggcaggagactcacttgaacccgggagatggaggttgcagtgagctgagattgtgccactgcactctagcctgggcgacagagtgagactccatctac

SEQ ID NO: 418510 - DNA, 398 bp, Homo sapiens
cgcccgggcaggtcagcctgtctcaaggcacgccagtctcagctccgaccttgcagcggcgcagcgcgggtgggaggcggggaggagcagcgggaagagcggagcgaggaccgcggtccggcgcagtcttcaatgagcagcgcggaaactgcaccccagacccgagcctgctgcgcgccccctcccagagctcacctggtgccaggtaacaggcctggcctcgccctgtggatgatgatggccttgcccccgtgagccacgtggatgttcatgagatgcattctcttctgtctttggtggatgggatggtggcaaagcccaggatctggctttgccagaggttgcaacatgttgagagaacccggtcaataaagtgtactacctcttacccctaaact

SEQ ID NO: 418511 - DNA, 3485 bp, Homo sapiens
ggaaacggtctgcggagaaagatgctcctgggccgggttgggaccggcggcctcctcgttccgcctcccagttttcccactacgaggcagggactaatggctccactttacagacagctgaactgggtcgtgccttcacaggacggggagaggaagggactcggagccccaaggcctttgacttaaacgccgacccaccccccgccgtctgcccggagctcgtggagaaccagccgagctgaggacagtttaaagagctcggaggtccgactagttcccgctggtgcttcaatcatccagccctgtacgtttcagtttggatttagcatctaccccgggtccctgcctggcgcttccggtccctccgccacagtctgttggattacctcagattgccccagcctggcctcgccctgtggatgatgatggccttgcccccgtgagctacaacctggccttcagcacccgcccacctccaaccagcaggatgcggctgtggaaggcggtggtggtgactttggccttcatgagtgtggacatctgcgtgaccacggccatctatgtcttcagccacctggaccgcagcctcctggaggacatccgccacttcaacatctttgactcggtgctggatctctgggcagcctgcctgtaccgcagctgcctgctgctgggagccaccattggtgtggccaagaacagtgcgctggggccccggcggctgcgggcctcgtggctggtcatcaccctcgtgtgcctcttcgtgggcatctatgccatggtgaagctgctgctcttctcagaggtgcgcaggcccatccgggacccctggttttgggccctgttcgtgtggacgtacatttcactcggcgcatccttcctgctctggtggctgctgtccaccgtgcggccaggcacccaggccctggagccaggggcggccaccgaggctgagggcttccctgggagcggccggccaccgcccgagcaggcgtctggggccacgctgcagaagctgctctcctacaccaagcccgacgtggccttcctcgtggccgcctccttcttcctcatcgtggcagctctgggagagaccttcctgccctactacacgggccgcgccattgatggcatcgtcatccagaaaagcatggatcagttcagcacggctgtcgtcatcgtgtgcctgctggccattggcagctcatttgccgcaggtattcggggcggcatttttaccctcatatttgccagactgaacattcgccttcgaaactgtctcttccgctcactggtgtcccaggagacaagcttctttgatgagaaccgcacaggggacctcatctcccgcctgacctcggacaccaccatggtcagcgacctggtctcccagaacatcaatgtcttcctgcggaacacagtcaaggtcacgggcgtggtggtcttcatgttcagcctctcatggcagctctccttggtcaccttcatgggcttccccatcatcatgatggtgtccaacatctacggcaagtactacaagaggctctccaaagaggtccagaatgccctggccagagcgagcaacacggcggaggagaccatcagtgccatgaagactgtccggagcttcgccaatgaggaggaggaggcagaggtgtacctgcggaagctgcagcaggtgtacaagctgaacaggaaggaggcagctgcctacatgtactacgtctggggcagcgggctcacactgctggtggtccaggtcagcatcctctactacgggggccaccttgtcatctcaggccagatgaccagcggcaacctcatcgccttcatcatctacgagtttgtcctgggagattgtatggagtccgtgggctccgtctacagtggcctgatgcagggagtgggggctgctgagaaggtgttcgagttcatcgaccggcagccgaccatggtgcacgatggcagcttggcccccgaccacctggagggccgggtggactttgagaatgtgaccttcacctaccgcactcggccccacacccaggtcctgcagaatgtctccttcagcctgtcccccggcaaggtgacggccctggtggggccctcgggcagtgggaagagctcctgtgtcaacatcctggagaacttctaccccctggaggggggccgggtgctgctggacggcaagcccatcagcgcctacgaccacaagtacttgcaccgtgtgatctccctggtgagccaggagcccgtgctgttcgcccgctccatcacggataacatctcctacggcctgcccactgtgcctttcgagatggtggtggaggccgcacagaaggccaatgcccacggcttcatcatggaactccaggacggctacagcacagagacaggggagaagggcgcccagctgtcaggtggccagaagcagcgggtggccatggcccgggctctggtgcggaaccccccagtcctcatcctggatgaagccaccagcgctttggatgccgagagcgagtatctgatccagcaggccatccatggcaacctgcagaagcacacggtactcatcatcgcgcaccggctgagcaccgtggagcacgcgcacctcattgtggtgctggacaagggccgcgtagtgcagcagggcacccaccagcagctgctggcccagggcggcctctacgccaagctggtgcagcggcagatgctggggcttcagcccgccgcagacttcacagctggccacaacgagcctgtagccaacggcagtcacaaggcctgatggggggcccctgcttctcccggtggggcagaggacccggtgcctgcctggcagatgtgcccacggaggcccccagctgccctccgagcccaggcctgcagcactgaaagacgacctgccatgtcccatggatcaccgcttcctgcatcttgcccctggtccctgccccattcccagggcactccttacccctcctgggggatgtccagagactaggcctctcccctttacccctccagagaaggggcttccctgtcccggagggagacacggggaacgggattttccgtctctccctcttgccagctctgtgagtctggccagggcgggtagggagcgtggagggcatctgtctgccatcgcccgctgccaatctaagccagtctcactgtgaaccacacgaaacctcaactgggggagtgaggggctggccaggtctggaggggcctcaggggtgcccccagcccggcacccagcgctttcgcccctcgtccacccacccctggctggcagcctccctccccacacccgcccctgtgctctgctgtctggaggccacgtggatgttcatgagatgcattctcttctgtctttggtggatgggatggtggcaaagcccaggatctggctttgccagaggttgcaacatgttgagagaacccggtcaataaagtgtactacctcttacccctaaact

SEQ ID NO: 418512 - DNA, 3245 bp, Homo sapiens
ggaaacggtctgcggagaaagatgctcctgggccgggttgggaccggcggcctcctcgttccgcctcccagttttcccactacgaggcagggactaatggctccactttacagacagctgaactgggtcgtgccttcacaggacggggagaggaagggactcggagccccaaggcctttgacttaaacgccgacccaccccccgccgtctgcccggagctcgtggagaaccagccgagctgaggacagtttaaagagctcggaggtccgactagttcccgctggtgcttcaatcatccagccctgtacgtttcagtttggatttagcatctaccccgggtccctgcctggcgcttccggtccctccgccacagtctgttggattacctcagattgccccagcctggcctcgccctgtggatgatgatggccttgcccccgtgagctacaacctggccttcagcacccgcccacctccaaccagcaggatgcggctgtggaaggcggtggtggtgactttggccttcatgagtgtggacatctgcgtgaccacggccatctatgtcttcagccacctggaccgcagcctcctggaggacatccgccacttcaacatctttgactcggtgctggatctctgggcagcctgcctgtaccgcagctgcctgctgctgggagccaccattggtgtggccaagaacagtgcgctggggccccggcggctgcgggcctcgtggctggtcatcaccctcgtgtgcctcttcgtgggcatctatgccatggtgaagctgctgctcttctcagaggtgcgcaggcccatccgggacccctggttttgggccctgttcgtgtggacgtacatttcactcggcgcatccttcctgctctggtggctgctgtccaccgtgcggccaggcacccaggccctggagccaggggcggccaccgaggctgagggcttccctgggagcggccggccaccgcccgagcaggcgtctggggccacgctgcagaagctgctctcctacaccaagcccgacgtggccttcctcgtggccgcctccttcttcctcatcgtggcagctctgggagagaccttcctgccctactacacgggccgcgccattgatggcatcgtcatccagaaaagcatggatcagttcagcacggctgtcgtcatcgtgtgcctgctggccattggcagactgaacattcgccttcgaaactgtctcttccgctcactggtgtcccaggagacaagcttctttgatgagaaccgcacaggggacctcatctcccgcctgacctcggacaccaccatggtcagcgacctggtctcccagaacatcaatgtcttcctgcggaacacagtcaaggtcacgggcgtggtggtcttcatgttcagcctctcatggcagctctccttggtcaccttcatgggcttccccatcatcatgatggtgtccaacatctacggcaagtactacaagaggctctccaaagaggtccagaatgccctggccagagcgagcaacacggcggaggagaccatcagtgccatgaagactgtccggagcttcgccaatgaggaggaggaggcagaggtgtacctgcggaagctgcagcaggtgtacaagctgaacaggaaggaggcagctgcctacatgtactacgtctggggcagcgggctcacactgctggtggtccaggtcagcatcctctactacgggggccaccttgtcatctcaggccagatgaccagcggcaacctcatcgccttcatcatctacgagtttgtcctgggagattgtatggagaatgtctccttcagcctgtcccccggcaaggtgacggccctggtggggccctcgggcagtgggaagagctcctgtgtcaacatcctggagaacttctaccccctggaggggggccgggtgctgctggacggcaagcccatcagcgcctacgaccacaagtacttgcaccgtgtgatctccctggtgagccaggagcccgtgctgttcgcccgctccatcacggataacatctcctacggcctgcccactgtgcctttcgagatggtggtggaggccgcacagaaggccaatgcccacggcttcatcatggaactccaggacggctacagcacagagacaggggagaagggcgcccagctgtcaggtggccagaagcagcgggtggccatggcccgggctctggtgcggaaccccccagtcctcatcctggatgaagccaccagcgctttggatgccgagagcgagtatctgatccagcaggccatccatggcaacctgcagaagcacacggtactcatcatcgcgcaccggctgagcaccgtggagcacgcgcacctcattgtggtgctggacaagggccgcgtagtgcagcagggcacccaccagcagctgctggcccagggcggcctctacgccaagctggtgcagcggcagatgctggggcttcagcccgccgcagacttcacagctggccacaacgagcctgtagccaacggcagtcacaaggcctgatggggggcccctgcttctcccggtggggcagaggacccggtgcctgcctggcagatgtgcccacggaggcccccagctgccctccgagcccaggcctgcagcactgaaagacgacctgccatgtcccatggatcaccgcttcctgcatcttgcccctggtccctgccccattcccagggcactccttacccctcctgggggatgtccagagactaggcctctcccctttacccctccagagaaggggcttccctgtcccggagggagacacggggaacgggattttccgtctctccctcttgccagctctgtgagtctggccagggcgggtagggagcgtggagggcatctgtctgccatcgcccgctgccaatctaagccagtctcactgtgaaccacacgaaacctcaactgggggagtgaggggctggccaggtctggaggggcctcaggggtgcccccagcccggcacccagcgctttcgcccctcgtccacccacccctggctggcagcctccctccccacacccgcccctgtgctctgctgtctggaggccacgtggatgttcatgagatgcattctcttctgtctttggtggatgggatggtggcaaagcccaggatctggctttgccagaggttgcaacatgttgagagaacccggtcaataaagtgtactacctcttacccctaaact

SEQ ID NO: 418513 - DNA, 3059 bp, Homo sapiens
  misc_feature (2961)..(2961): n is a, c, g, or t
ggaaacggtctgcggagaaagatgctcctgggccgggttgggaccggcggcctcctcgttccgcctcccagttttcccactacgaggcagggactaatggctccactttacagacagctgaactgggtcgtgccttcacaggacggggagaggaagggactcggagccccaaggcctttgacttaaacgccgacccaccccccgccgtctgcccggagctcgtggagaaccagccgagctgaggacagtttaaagagctcggaggtccgactagttcccgctggtgcttcaatcatccagccctgtacgtttcagtttggatttagcatctaccccgggtccctgcctggcgcttccggtccctccgccacagtctgttggattacctcagattgccccagcctggcctcgccctgtggatgatgatggccttgcccccgtgagctacaacctggccttcagcacccgcccacctccaaccagcaggatgcggctgtggaaggcggtggtggtgactttggccttcatgagtgtggacatctgcgtgaccacggccatctatgtcttcagccacctggaccgcagcctcctggaggacatccgccacttcaacatctttgactcggtgctggatctctgggcagcctgcctgtaccgcagctgcctgctgctgggagccaccattggtgtggccaagaacagtgcgctggggccccggcggctgcgggcctcgtggctggtcatcaccctcgtgtgcctcttcgtgggcatctatgccatggtgaagctgctgctcttctcagaggtgcgcaggcccatccgggacccctggttttgggccctgttcgtgtggacgtacatttcactcggcgcatccttcctgctctggtggctgctgtccaccgtgcggccaggcacccaggccctggagccaggggcggccaccgaggctgagggcttccctgggagcggccggccaccgcccgagcaggcgtctggggccacgctgcagaagctgctctcctacaccaagcccgacgtggccttcctcgtggccgcctccttcttcctcatcgtggcagctctgggagagaccttcctgccctactacacgggccgcgccattgatggcatcgtcatccagaaaagcatggatcagttcagcacggctgtcgtcatcgtgtgcctgctggccattggcagctcatttgccgcaggtattcggggcggcatttttaccctcatatttgccagactgaacattcgccttcgaaactgtctcttccgctcactggtgtcccaggagacaagcttctttgatgagaaccgcacaggggacctcatctcccgcctgacctcggacaccaccatggtcagcgacctggtctcccagaacatcaatgtcttcctgcggaacacagtcaaggtcacgggcgtggtggtcttcatgttcagcctctcatggcagctctccttggtcaccttcatgggcttccccatcatcatgatggtgtccaacatctacggcaagtactacaagaggctctccaaagaggtccagaatgccctggccagagcgagcaacacggcggaggagaccatcagtgccatgaagactgtccggagcttcgccaatgaggaggaggaggcagaggtgtacctgcggaagctgcagcaggtgtacaagctgaacaggaaggaggcagctgcctacatgtactacgtctggggcagcgggaatgtctccttcagcctgtcccccggcaaggtgacggccctggtggggccctcgggcagtgggaagagctcctgtgtcaacatcctggagaacttctaccccctggaggggggccgggtgctgctggacggcaagcccatcagcgcctacgaccacaagtacttgcaccgtgtgatctccctggtgagccaggagcccgtgctgttcgcccgctccatcacggataacatctcctacggcctgcccactgtgcctttcgagatggtggtggaggccgcacagaaggccaatgcccacggcttcatcatggaactccaggacggctacagcacagagacaggggagaagggcgcccagctgtcaggtggccagaagcagcgggtggccatggcccgggctctggtgcggaaccccccagtcctcatcctggatgaagccaccagcgctttggatgccgagagcgagtatctggtgagtcacagggtggtgggcaatgcgggggcaggagcggctccaggtggccagagcccccatcgcccagcagatggatgctgagaagagacgggccccaggagctctcccagactatcagcctcctgggctggtgaattcctggtgttgagagtggggagccaggagccactctggacccagcctccaggctccaggcagagctgtatggtgtggggcaagagaaggcatcagaatggggagacctgggtcatgagtggtggcttacacctgtaatcccagcactttgggaggccgaagcaggtggatcacctgaggtcaggagttgcagaccagcctggccaacatggtgaaaccccatctctactagaaatacaaaaactagccaggtgtggtagcacatgcctataatcccagctacttgggaggctgaggcaggagaattgcttgaacctgggaagtggaggttgcagtcagccgagattgtgccactgcactccagcctgggcgacagagccagactccatctggctcaaacaaacagacaaaacaaaacaaaataaaataggcccagtatgatggctcatgcctataatcccagcactttgggaggccaaggcaggtggatcacttgaggtccggagttcgagacaagcctggtcaatacagtgaaaccctgtctctactaaaaatacaaaaattagctgggcatggtggtgcatgcctgtaaccccagctactcgggaggctgnggcaggagactcacttgaacccgggagatggaggttgcagtgagctgagattgtgccactgcactctagcctgggcgacagagtgagactccatctac

SEQ ID NO: 418514 - DNA, 1713 bp, Homo sapiens
gacaagccttggaagacacccctgccaacggccggcatttcagtttgtggctgggtctgccctcacctccccctgcagcctgggatgggtcaggaatggggatggtgggggatctaaggtcccctcgacccacatcccctctccctctgccccagctcacactgctggtggtccaggtcagcatcctctactacgggggccaccttgtcatctcaggccagatgaccagcggcaacctcatcgccttcatcatctacgagtttgtcctgggagattgtatggagaatgtctccttcagcctgtcccccggcaaggtgacggccctggtggggccctcgggcagtgggaagagctcctgtgtcaacatcctggagaacttctaccccctggaggggggccgggtgctgctggacggcaagcccatcagcgcctacgaccacaagtacttgcaccgtgtgatctccctggtgagccaggagcccgtgctgttcgcccgctccatcacggataacatctcctacggcctgcccactgtgcctttcgagatggtggtggaggccgcacagaaggccaatgcccacggcttcatcatggaactccaggacggctacagcacagagacaggggagaagggcgcccagctgtcaggtggccagaagcagcgggtggccatggcccgggctctggtgcggaaccccccagtcctcatcctggatgaagccaccagcgctttggatgccgagagcgagtatctgatccagcaggccatccatggcaacctgcagaagcacacggtactcatcatcgcgcaccggctgagcaccgtggagcacgcgcacctcattgtggtgctggacaagggccgcgtagtgcagcagggcacccaccagcagctgctggcccagggcggcctctacgccaagctggtgcagcggcagatgctggggcttcagcccgccgcagacttcacagctggccacaacgagcctgtagccaacggcagtcacaaggcctgatggggggcccctgcttctcccggtggggcagaggacccggtgcctgcctggcagatgtgcccacggaggcccccagctgccctccgagcccaggcctgcagcactgaaagacgacctgccatgtcccatggatcaccgcttcctgcatcttgcccctggtccctgccccattcccagggcactccttacccctcctgggggatgtccagagactaggcctctcccctttacccctccagagaaggggcttccctgtcccggagggagacacggggaacgggattttccgtctctccctcttgccagctctgtgagtctggccagggcgggtagggagcgtggagggcatctgtctgccatcgcccgctgccaatctaagccagtctcactgtgaaccacacgaaacctcaactgggggagtgaggggctggccaggtctggaggggcctcaggggtgcccccagcccggcacccagcgctttcgcccctcgtccacccacccctggctggcagcctccctccccacacccgcccctgtgctctgctgtctggaggccacgtggatgttcatgagatgcattctcttctgtctttggtggatgggatggtggcaaagcccaggatctggctttgccagaggttgcaacatgttgagagaacccggtcaataaagtgtactacctcttacccctaaact

SEQ ID NO: 418515 - DNA, 1562 bp, Homo sapiens
ggaaacggtctgcggagaaagatgctcctgggccgggttgggaccggcggcctcctcgttccgcctcccagttttcccactacgaggcagggactaatggctccactttacagacagctgaactgggtcgtgccttcacaggacggggagaggaagggactcggagccccaaggcctttgacttaaacgccgacccaccccccgccgtctgcccggagctcgtggagaaccagccgagctgaggacagtttaaagagctcggaggtccgactagttcccgctggtgcttcaatcatccagccctgtacgtttcagtttggatttagcatctaccccgggtccctgcctggcgcttccggtccctccgccacagtctgttggattacctcagattgccccagcctggcctcgccctgtggatgatgatggccttgcccccgtgagctacaacctggccttcagcacccgcccacctccaaccagcaggatgcggctgtggaaggcggtggtggtgactttggccttcatgagtgtggacatctgcgtgaccacggccatctatgtcttcagccacctggaccgcagcctcctggaggacatccgccacttcaacatctttgactcggtgctggatctctgggcagcctgcctgtaccgcagctgcctgctgctgggagccaccattggtgtggccaagaacagtgcgctggggccccggcggctgcgggcctcgtggctggtcatcaccctcgtgtgcctcttcgtgggcatctatgccatggtgaagctgctgctcttctcagaggtgcgcaggcccatccgggacccctggttttgggccctgttcgtgtggacgtacatttcactcggcgcatccttcctgctctggtggctgctgtccaccgtgcggccaggcacccaggccctggagccaggggcggccaccgaggctgagggcttccctgggagcggccggccaccgcccgagcaggcgtctggggccacgctgcagaagctgctctcctacaccaagcccgacgtggccttcctcgtggccgcctccttcttcctcatcgtggcagctctgggtaagtaaggacctcggggacatgtggccaccagaacatcaaattaggtggatatgactgccttagattttaaaagattttacttacgtggttcagacatcaaattgatatgaaaaggaaaagaggccaggcatagtggctcatatctataatcccagcactttgggaggctgaggtaggaagatcacttgagcccaggagttgaaaaccagcctgggcaacatagcgagaacccatttctattttatttatttatttatttattgtatttatttattttttcgaaacataaattgcttgaacctgggaggcagaggttgcagtgagccaagctcacacaactgcactccagcctgagtgacaaagtgagactccatctcaaaaaacataaataataaaatagtaaaataaaaatgttaactgacagagacagagcctagagaggtgacaatgcaataacaatgccagaatgtt

SEQ ID NO: 418516 - DNA, 3671 bp, Homo sapiens
  misc_feature (198)..(198): n is a, c, g, or t
  misc_feature (914)..(914): n is a, c, g, or t
  misc_feature (1328)..(1328): n is a, c, g, or t
  misc_feature (1541)..(1541): n is a, c, g, or t
aacgcacccgttttccagaacaccgctttctccaccagcatcaacgagaccctgcccgtgggcagtgtggtgttctccgtgctggccgtggataaagacatggggtctgcaggcatggtcgtgtactccatagagaaggtcatccctagcactggggacagcgagcatctcttccggatcctggccaatggctccatngtcctcaatggcagcctcagctacaacaacaagagcgctttctaccagctggagctgaaggcctgtgacttgggcggcatgtaccacaacaccttcaccatccagtgctccctgcctgtcttcctgtccatctccgtggtggaccagcctgaccttgacccccagtttgtcagggagttttactcggcctctgtggctgaggatgcagccaagggaacctcggtgctgacggtggaggctgtggatggcgacaaaggcatcaatgaccctgtgatctacagcatctcctactccacgcggcccggctggtttgacatcggggcagatggggtgatcagggtcaacggctccctggaccgtgagcagctgctggaggcggatgaggaggtgcagctgcaggtcacggccaccgagacacacctcaacatctacgggcaggaggccaaggtgagcatctgggtgacagtgagagtgatggacgtcaatgaccacaaacctgagttttacaactgcagcctcccagcctgcaccttcacccccgaagaggcccaagtgaacttcactggctacgtggacgagcatgcctccccccgcatccccatcgatgacctcaccatggtggtctacgacccggacaagggcagcaatggcaccttcctgttgtcgctggggggccccgatgcagaagccttcagcgtctccccggagcgggcagngggctcagcctccgttcaggtgctggtgagagtatccgcgctggtggacacgagaggcagacggcgatggcggtgcaggttgtggccacagactccgtcagccagaacttctccgtcgccatggtgaccatccaccttagagacattaatgaccacaggcccacgtttccccagagcttgtacgtcctcacggtgccagagcacagcgccaccggctctgtggtcaccgacagcatccacgccacggacccagacacgggcgcgtggggccaaattacctacagcctgctcccaggaaatggggcagacctcttccaagtggatcccgtctcagggacggtgacggtgaggaacggtgagctgctggaccgggagagccaggccgtgtactacctgacgctgcaggccacaganggcgggaacctgtcctcctccaccacactgcagatccacctgctggacatcaacgacaatgcacccgtggttagcggctcctacaacatcttcgtccaggaggaggagggcaatgtctccgtgaccatccaggcccacgacaatgatgagccgggcaccaacaacagccgtctgctcttcaacctgctgcctggcccctacagccacaacttntccttggaccctgacacagggctcctcagaaacctggggcccctggacagagaggccatcgaccccgccctggagggccgcattgtgctgacagtgcttgtgtctgactgcggcgagcctgtcctcggcaccaaagtcaatgtcaccatcactgtggaggacatcaatgataacctgcccatcttcaatcagtccagctacaactttacggtgaaggaggaggatccaggagtgctagtgggcgtggtgaaggcctgggacgcggaccagacggaagccaacaaccgcatcagcttcagcctgtcggggagtggtgccaactacttcatgatccgaggcttggtgctgggggctgggtgggctgagggctacctccggctgcccccggacgtgagcctggattacgagacacagcccgtcttcaacttgacagtgagtgctgagaacccagacccccaggggggtgagaccatagtagacgtctgcgtgaatgtgaaagacgtgaacgacaatccccccaccctggatgtagcctcactccggggcatccgtgtggctgagaatggctcacagcacggccaggtggctgtggtggttgcctcggatgtggacaccagtgcccagctggagatacagcttgtgaacattctctgcaccaaggccggggtcgatgtgggcagcctatgctggggctggttctcagtggcggccaacggctctgtgtacatcaaccagagcaaagccatcgactacgaggcctgtgacctggtcacgctggttgtgcgggcctgtgacctagccacggaccccggcttccaggcctacagcaacaatggaagcctcctcattaccattgaggacgtgaatgacaatgcaccctattttctgcctgagaataagacttttgtgatcatccctgaactcgtgctgcccaaccgggaggtggcttctgtccgggccagagacgatgattcagggaacaatggcgtcatcctgttctccatcctccgagtagacttcatctctaaggacggggccaccatccctttccagggtgtcttctcgatcttcacctcctccgaggccgacgtgttcgctgggagcattcagccggtgaccagcctcgactccactctccaaggcacctaccaagtgacagtccaggccagggacagaccttccttgggtcctttcctggaagccaccaccaccctgaatctcttcaccgtggaccagagttaccgctcgcggctgcagttctccacaccgaaggaggaggtgggcgccaacagacaggcgattaatgcggctcttacccaggcaaccaggactacagtatacattgtggacattcaggacatagattctgcagctcgggcccgacctcactcctacctcgatgcctactttgtcttccccaatgggtcagccctgacccttgatgagctgagtgtgatgatccggaatgatcaggactcgctgacgcagctgctgcagctggggctggtggtgctgggctcccaggagagccaggagtcagacctgtcgaaacagctcatcagtgtcatcataggattgggagtggctttgctgctggtccttgtgatcatgaccatggccttcgtgtgtgtgcggaagagctacaaccggaagcttcaagctatgaaggctgccaaggaggccaggaagacagcagcaggggtgatgccctcagcccctgccatcccagggactaacatgtacaacactgagcgagccaaccccatgctgaacctccccaacaaagacctgggcttggagtacctctctccctccaatgacctggactctgtcagcgtcaactccctggacgacaactctgtggatgtggacaagaacagtcaggaaatcaaggagcacaggccaccacacacaccaccagagccagatccagagcccctgagcgtggtcctgttaggacggcaggcaggcgcaagtggacagctggaggggccatcctacaccaacgctggcctggacaccacggacctgtgacaggggcccccactcttctggaccccttgaagaggccctaccacaccctaactgcacctgtctccctggagatgaaaatatatgacgctgccctgc

SEQ ID NO: 418517 - DNA, 1421 bp, Homo sapiens
gtggctgtaataggggtctcttttggtagagaggttgagggcaggtttagggggatgagccctgagctgggctcgtgaccagccttggtccaggtgggcagtgtcccgaccccgctgaccccgttcccgttcacacctgcagtgatcatccctgaactcgtgctgcccaaccgggaggtggcttctgtccgggccagagacgatgattcagggaacaatggcgtcatcctgttctccatcctccgagtagacttcatctctaaggacggggccaccatccctttccagggtgtcttctcgatcttcacctcctccgaggccgacgtgttcgctgggagcattcagccggtgaccagcctcgactccactctccaaggcacctaccaagtgacagtccaggccagggacagaccttccttgggtcctttcctggaagccaccaccaccctgaatctcttcaccgtggaccagagttaccgctcgcggctgcagttctccacaccgaaggaggaggtgggcgccaacagacaggcgattaatgcggctcttacccaggcaaccaggactacagtatacattgtggacattcaggacatagattctgcagctcgggcccgacctcactcctacctcgatgcctactttgtcttccccaatgggtcagccctgacccttgatgagctgagtgtgatgatccggaatgatcaggactcgctgacgcagctgctgcagctggggctggtggtgctgggctcccaggagagccaggagtcagacctgtcgaaacagctcatcagtgtcatcataggattgggagtggctttgctgctggtccttgtgatcatgaccatggccttcgtgtgtgtgcggaagagctacaaccggaagcttcaagctatgaaggctgccaaggaggccaggaagacagcagcaggggtgatgccctcagcccctgccatcccagggactaacatgtacaacactgagcgagccaaccccatgctgaacctccccaacaaagacctgggcttggagtacctctctccctccaatgacctggactctgtcagcgtcaactccctggacgacaactctgtggatgtggacaagaacagtcaggaaatcaaggagcacaggccaccacacacaccaccagagccagatccagagcccctgagcgtggtcctgttaggacggcaggcaggcgcaagtggacagctggaggggccatcctacaccaacgctggcctggacaccacggacctgtgacaggggcccccactcttctggaccccttgaagaggccctaccacaccctaactgcacctgtctccctggagatgaaaatatatgacgctgccctgcctcctgcttttggccaatcacggcagacaggggttggggaaatattttattaccaa

SEQ ID NO: 418518 - DNA, 1392 bp, Homo sapiens
gtggctgtaataggggtctcttttggtagagaggttgagggcaggtttagggggatgagccctgagctgggctcgtgaccagccttggtccaggtgggcagtgtcccgaccccgctgaccccgttcccgttcacacctgcagtgatcatccctgaactcgtgctgcccaaccgggaggtggcttctgtccgggccagagacgatgattcagggaacaatggcgtcatcctgttctccatcctccgagtagacttcatctctaaggacggggccaccatccctttccagggtgtcttctcgatcttcacctcctccgaggccgacgtgttcgctgggagcattcagccggtgaccagcctcgactccactctccaaggcacctaccaagtgacagtccaggccagggacagaccttccttgggtcctttcctggaagccaccaccaccctgaatctcttcaccgtggaccagagttaccgctcgcggctgcagttctccacaccgaaggaggagggctcttacccaggcaaccaggactacagtatacattgtggacattcaggacatagattctgcagctcgggcccgacctcactcctacctcgatgcctactttgtcttccccaatgggtcagccctgacccttgatgagctgagtgtgatgatccggaatgatcaggactcgctgacgcagctgctgcagctggggctggtggtgctgggctcccaggagagccaggagtcagacctgtcgaaacagctcatcagtgtcatcataggattgggagtggctttgctgctggtccttgtgatcatgaccatggccttcgtgtgtgtgcggaagagctacaaccggaagcttcaagctatgaaggctgccaaggaggccaggaagacagcagcaggggtgatgccctcagcccctgccatcccagggactaacatgtacaacactgagcgagccaaccccatgctgaacctccccaacaaagacctgggcttggagtacctctctccctccaatgacctggactctgtcagcgtcaactccctggacgacaactctgtggatgtggacaagaacagtcaggaaatcaaggagcacaggccaccacacacaccaccagagccagatccagagcccctgagcgtggtcctgttaggacggcaggcaggcgcaagtggacagctggaggggccatcctacaccaacgctggcctggacaccacggacctgtgacaggggcccccactcttctggaccccttgaagaggccctaccacaccctaactgcacctgtctccctggagatgaaaatatatgacgctgccctgcctcctgcttttggccaatcacggcagacaggggttggggaaatattttattaccaa

SEQ ID NO: 418519 - DNA, 1155 bp, Homo sapiens
gtggctgtaataggggtctcttttggtagagaggttgagggcaggtttagggggatgagccctgagctgggctcgtgaccagccttggtccaggtgggcagtgtcccgaccccgctgaccccgttcccgttcacacctgcagtgatcatccctgaactcgtgctgcccaaccgggaggtggcttctgtccgggccagagacgatgattcagggaacaatggcgtcatcctgttctccatcctccgagtagacttcatctctaaggacggggccaccatccctttccagggtgtcttctcgatcttcacctcctccgaggccgacgtgttcgctgggagcattcagccggtgaccagcctcgactccactctccaaggcacctaccaagtgacagtccaggccagggacagaccttccttgggtcctttcctggaagccaccaccaccctgaatctcttcaccgtggaccagagttaccgctcgcggctgcagttctccacaccgaaggaggaggtgggcgccaacagacaggcgattaatgcggctcttacccaggcaaccaggactacagtatacattgtggacattcaggacatagattctgcagctcgggcccgacctcactcctacctcgatgcctactttgtcttccccaatgggtcagccctgacccttgatgagctgagtgtgatgatccggaatgatcaggactcgctgacgcagctgctgcagctggggctggtggtgctgggctcccaggagagccaggagtcagacctgtcgaaacagctcatcagtgtcatcataggattgggagtggctttgctgctggtccttgtgatcatgaccatggccttcgtgtgtgtgcggaagagctacaaccggaagcttcaagctatgaaggctgccaaggaggccaggaagacagcagcaggggtgatgccctcagcccctgccatcccagggactaacatgtacaacactgagcgagccaaccccatgctgaacctccccaacaaagacctgggcttggagtacctctctccctccaatgacctggactctgtcagggtaaattccctggcgaaaactttgggatgtggccaagaacgcccgggaataagggggccaggccccccccccacccccagggcc

SEQ ID NO: 418520 - DNA, 1419 bp, Homo sapiens
gtggctgtaataggggtctcttttggtagagaggttgagggcaggtttagggggatgagccctgagctgggctcgtgaccagccttggtccaggtgggcagtgtcccgaccccgctgaccccgttcccgttcacacctgcagtgatcatccctgaactcgtgctgcccaaccgggaggtggcttctgtccgggccagagacgatgattcagggaacaatggcgtcatcctgttctccatcctccgagtagacttcatctctaaggacggggccaccatccctttccagggtgtcttctcgatcttcacctcctccgaggccgacgtgttcgctgggagcattcagccggtgaccagcctcgactccactctccaaggcacctaccaagtgacagtccaggccagggacagaccttccttgggtcctttcctggaagccaccaccaccctgaatctcttcaccgtggaccagagttaccgctcgcggctgcagttctccacaccgaaggaggagggctcttacccaggcaaccaggactacagtatacattgtggacattcaggacatagattctgcagctcgggcccgacctcactcctacctcgatgcctactttgtcttccccaatgggtcagccctgacccttgatgagctgagtgtgatgatccggaatgatcaggactcgctgacgcagctgctgcagctggggctggtggtgctgggctcccaggagagccaggagtcagacctgtcgaaacagctcatcagtgtcatcataggattgggagtggctttgctgctggtccttgtgatcatgaccatggccttcgtgtgtgtgcggaagagctacaaccggaagcttcaagctatgaaggctgccaaggaggccaggaagacagcagcaggggtgatgccctcagcccctgccatcccagggactaacatgtacaacactgagcgagccaaccccatgctgaacctccccaacaaagacctgggcttggagtacctctctccctccaatgacctggactctgtcaggtgagcagtgcccctcacagccaggctaggtggtggtggtggtacaggtagtgacggtgatggtggtgatggtgttggtggtgatgatggtgatgacaatggtgatggtgtggtcatggtagtagtggtagttatggtggtggtggtgatggtagtgaggtgatggtgatggtagcaatggtgacagtggtgatgatgacaacaatgatggtggtgatgatggtgttggtgttgaggtgatggtgatggttgtgatggtgatggtggtgatgatggtgttggtgttgaggtgatggtgatggttgtgatggtgatggtggtgatgatggtgttggtgttgaggtgatggtgatggttgtgatggtgatggtggtgatg

SEQ ID NO: 418521 - DNA, 362 bp, Homo sapiens
cctgtactttcacctgcacgacgttcttgcatgtccccagaagcccatacccagccaagggcagagggaagccttggaacaaggctgccgtgtacagttgtgaaggctgtgtgttgcacaagggcactctgcttgctaagctattcacccagccccagaggaagggatttccttttgtaattttcacagagatgctacctactcagccaacagagctgtccagaggaggtgccctttctcactcatacaattcttaatcccactggcacagcgctggccacaggcccaggctaagaccccaggcctctgtgacatctgccttctttgcagggctcttacccaggcaaccaggactacagtat

SEQ ID NO: 418522 - DNA, 191 bp, Homo sapiens
gtcaggagtccttctgagctctgccccttgtccacaggagtgctagtgggcgtggtgaaggcctgggacgcggaccagacggaagccaacaaccgcatcagcttcagcctgtcggggagtggtgccaactacttcatgatccgaggcttggtgctgggggctgggtgggctgagggctacctccggctgcc

SEQ ID NO: 418523 - DNA, 365 bp, Homo sapiens
gaaaccatttgcttattcggggcagcgtggggatggcggatagagacggtgagggccagcctcccaggccacccttgcctctgatccctgctggggtggagggatgcctggcctggctgggcccccagatattgtccactcttgctcccagaggccagagacgatgattcagggaacaatggcgtcatcctgttctccatcctccgagtagacttcatctctaaggacggggccaccatccctttccagggtgtcttctcgatcttcacctcctccgaggccgacgtgttcgctgggagcattcagtaactgcgggcggccccgggagggaggttgcggggaggggcccgataggagctttcagg

SEQ ID NO: 418524 - DNA, 705 bp, Homo sapiens
agacaaaacccctcagacaccgagttgtagaaggaagggctttattcagctgggagcatccgcagactcacgtctccaaaaaccaagctctccgagtgagcaattcctgtccctcttaagggcttacaactctaagggggtccgcgtgagagggtcttgatggattgaggaagcagagggtacgtgactgggggctgcatgcacaggtaattagatcagaacaaaacaggacagggattttcacagtgcttttctatacaatgtctgtaatctatagataacataaccgagtaggtcaggggtcgatctttaactaccaggcccagggtgtggcgcggggctgtctgcctgtggatttcatttctgccttttagattttacttcttctttctttggaggcagaaattgggcataagacaatatgaggggaggtctccctttgagctatctgtgtctgtgtctttgtgtgtccgtgtgtgtgtgcccgggtgtggtgtgtgtgtgtgtctgcgcgcatgcacccgtgtgtatccgtgtgtgtgtcagggtgggtttgctcgtggtagtggtggggtgtgtctgggtgtccgtcagcccctctttcccgggatgaggctgccggggctctagtgccagggcggggcaaagcagagccttcttgcccctttggccatggcgggtcctcctcagaaaaagcgacgatgg

SEQ ID NO: 418525 - DNA, 3013 bp, Homo sapiens
agacaaaacccctcagacaccgagttgtagaaggaagggctttattcagctgggagcatccgcagactcacgtctccaaaaaccaagctctccgagtgagcaattcctgtccctcttaagggcttacaactctaagggggtccgcgtgagagggtcttgatggattgaggaagcagagggtacgtgactgggggctgcatgcacagacaacgagagcgaaaccacagagaaaagaaacatcccgtgcatcacggcctgatgatggattcctgtttcctgcaaaatggggagtctccaatatagcctgtttgaaaactggaaaggagagcaccgacacgatgctggtcttccacgcattcctggaagtttctggggccccacagagctcgcgaaacagtcaacatggtcacgctttcggggggcagaaacttgagcaacaggcacctttacagagggcaaagaaacgtggaatccagaatcacgcttcagttggcctgagtgtgactcctgtgtggatgggactatccgcctcgagctctgttgcagggctcaacgtggggatatgtcatctgtgaaccatgtggatgaaaaacagacaactacctgggtctcggctcattgctctctggggaattcgctcattccttcggaaacggaattggtctgaattgctccgggacgaagtaacccaggctggtgatccagagggccgctgagcgccccgccggccaacggggctgtgggcccagcactcagcctgtactgggcacccaacattttcccggagttctgggtcctgttggttctggaggcataagaccgtttttgtctctgccttccgttctctgcttcttgctccttttgtcccttggtccatccttccatctgttcttccctccctcccctggctttttcctccctttctccctccctccctctttctctcccttccggggtccctccttccacccatccttgcctagctccatccttccatctcactctgtctccgttcctgtcctcatctctgcctgccttccctcttgcctggaaagggcagcaccctggtttgcgcgaggtctggggtctttatttagttgcaaggcgctctatggtgctggcgaggaggctggcgggacacgggttggcaactgatggtgagcgaagaggcggaggagtcgagccgcagaaaggagaactggcctggcttctgccccggcccagtgtttcgcggactgaggtctccgccaacccgattgaagaacgcagggggaaaagggatgagagctccgcctgggctagttagaaaactaggctgctgcctggaaacccgcgcatgcgcagtagacagcctacctccctgtacctggaccagccctgggatccccgggatgctcaggaatgctttcttgtcattgttgacagccctcctctgtgtggagtctctcgctggacctggaactcagggatcctaggcaggtcagctggaagggaagacacgcctctccacaccaagcctgaggttcaccgcgaaagagaggccgccaccctgccccaaacccgccccaacctgctcctccagcagagccctgtgttcttcctggctgaggagtggttccagcaaagcgggctcttccacgtccttcagctcccccagtggcgccggatctaggaaaggttgtgccttttgctgaaactctggggttgacaggagctcatctaacaggctggaggtgagtgcagaggagagccccggctcctggagcggttgggaggtgcccggttggctggcatctgtgcttgacgcggaggcctccggggtcacgagctccggaggtgaaggtgccccgtcttcgggttcccatgccgccctggcgacctgcggctccagccccaccacggactccggtgggacgtgggtggcgcaagcacacctttcccctgtgactcagcttgaggggccccaaggtgtcccactgagcacgcgcccagcaggccatcgcgctgcgggttctggtcttcctgtcatttgttggggttcggaggccaccagggagtctgaggatgggagagccccagtttcggaggggccagggcagtgaacacaaagccccgcatgcccgggcaggttgggagagtccttctgcctgcgcagcctggctgggctggagcagggggatggcccttgctgcctggctcacgaaagccccctgtgggagagccccaggagcgcagggcatgtggggtgcaggaagcgcctttccccacgccccggtgtaggtgaactcgatagaggagggaggagggtgacacccaccaggggtgctaattagtaaccacagtggcctcaaagaactcaaatgaaaggaagacttgcaagtctctcactttaagtccagagctagaaatgattaagcttagtgaagatgcagaattttcatagctagagagaagtcaacgcttggcttcaaaacttcaaaggatgggctgactctctttgaggagcactgcagctggtgactttaagttacagccagtgctcattgaccactctgaaaatctcagggcccttaagaattatgcaaaatctattctttctgtgctctagaaatggaacatcactgtctgggtgacagcacatctgttaatagcatggtttactgaatattttaatcccactattgagaactgctcagaaaaaaaaaaaaccgattcttttaaaaagattgttggttggccaggcatagtggctcatacttgtaatccctgcactttgggaggccgaggatcacctgaggtcaggagttcaagaccagcctggccaaaatgatgaaaccccatctctaataaaaatacaaaaaaattagccaggcatggtggtagtacctgtaatttcagctactcgggaggctgaggcagaagaatggcttgaaccctggaggcagaggttgcagtgagccgagaccgcaccactgtactgcagcctgggcaacaagagcgaaactacgtcaaa

SEQ ID NO: 418526 - DNA, 2497 bp, Homo sapiens
  misc_feature (34)..(34): n is a, c, g, or t
  misc_feature (117)..(117): n is a, c, g, or t
  misc_feature (139)..(139): n is a, c, g, or t
  misc_feature (155)..(155): n is a, c, g, or t
  misc_feature (172)..(172): n is a, c, g, or t
  misc_feature (187)..(187): n is a, c, g, or t
gcggctccggggtgcctgatcccagcctcgcgcncccgggttggtggtgacgcctggaatcaggcaggcgtagctggactgggctcttgggccagccaggcgccactgccattgtcnacggccataccacctggaaaangagagagacccaagcngcggcccgtgggcacgntcagcgccactgctnctgccacagtgaggggcgcactctacaactttcagggcccacagcaccaagaggacagggaggagccaacaaaggaatgacgctacgaaaagcacccccaaagcaaccaacaaatccaagtaaaaacacgtctcagggctccgttggttttcccgcgtgggcggccctgcccccatgttccagcccagcccaggcaccctccaccctaccctggccaaaggggcccctgtctaccagatagagcctccctctccaaggctctgttgctctccctctctagctccctcaccctttccctttctctacttccctctccaccttgctctctctctctctctctcaatctccccagttcctctctgtctctctctccatcgctgtttctctccttccgtttctatttctcatccctctgtcccttgctctccttcaagttgtctgtgtctttgtgtgtctgtgtgtgtgcttgtgttcccgcgcgtgcgcccgtgtgtgtctgtgtgtttgggagtgggtttgctagtgattgtggtggggtgtgtctggatgtccatcagtacctttgtcccaggatcaggctgccaactctattgccaacgcctgggtgtcacagttgccgtgatagtctcacacacgcagttgtgttcatctcgttcgttttcacgtagacaacgagagcgaaaccacagagaaaagaaacatcccgtgcatcacggcctgatgatggattcctgtttcctgcaaaatggggagtctccaatatagcctgtttgaaaactggaaaggagagcaccgacacgatgctggtcttccacgcattcctggaagtttctggggccccacagagctcgcgaaacagtcaacatggtcacgctttcggggggcagaaacttgagcaacaggcacctttacagagggcaaagaaacgtggaatccagaatcacgcttcagttggcctgagtgtgactcctgtgtggatgggactatccgcctcgagctctgttgcagggctcaacgtggggatatgtcatctgtgaaccatgtggatgaaaaacagacaactacctgggtctcggctcattgctctctggggaattcgctcattccttcggaaacggaattggtctgaattgctccgggacgaagtaacccaggctggtgatccagagggccgctgagcgccccgccggccaacggggctgtgggcccagcactcagcctgtactgggcacccaacattttcccggagttctgggtcctgttggttctggaggcataagaccgtttttgtctctgccttccgttctctgcttcttgctccttttgtcccttggtccatccttccatctgttcttccctccctcccctggctttttcctccctttctccctccctccctctttctctcccttccggggtccctccttccacccatccttgcctagctccatccttccatctcactctgtctccgttcctgtcctcatctctgcctgccttccctcttgcctggaaagggcagcaccctggtttgcgcgaggtctggggtctttatttagttgcaaggcgctctatggtgctggcgaggaggctggcgggacacgggttggcaactgatggtgagcgaagaggcggaggagtcgagccgcagaaaggagaactggcctggcttctgccccggcccagtgtttcgcggactgaggtctccgccaacccgattgaagaacgcagggggaaaagggatgagagctccgcctgggctagttagaaaactaggctgctgcctggaaacccgcgcatgcgcagtagacagcctacctccctgtacctggaccagccctgggatccccgggatgctcaggaatgctttcttgtcattgttgacagccctcctctgtgtggagtctctcgctggacctggaactcagggatcctaggcaggtcagctggaagggaagacacgcctctccacaccaagcctgaggttcaccgcgaaagagaggccgccaccctgccccaaacccgccccaacctgctcctccagcagagccctgtgttcttcctggctgaggagtggttccagcaaagcgggctcttccacgtccttcagctcccccagtggcgccggatctaggaaaggttgtgccttttgctgaaactctggggttgacaggagctcatctaacaggctggagctactcgggaggctgaggcagaagaatggcttgaaccctggaggcagaggttgcagtgagccgagaccgcaccactgtactgcagcctgggcaacaagagcgaaactacgtcaaa

SEQ ID NO: 418527 - DNA, 3662 bp, Homo sapiens
  misc_feature (34)..(34): n is a, c, g, or t
  misc_feature (117)..(117): n is a, c, g, or t
  misc_feature (139)..(139): n is a, c, g, or t
  misc_feature (155)..(155): n is a, c, g, or t
  misc_feature (172)..(172): n is a, c, g, or t
  misc_feature (187)..(187): n is a, c, g, or t
gcggctccggggtgcctgatcccagcctcgcgcncccgggttggtggtgacgcctggaatcaggcaggcgtagctggactgggctcttgggccagccaggcgccactgccattgtcnacggccataccacctggaaaangagagagacccaagcngcggcccgtgggcacgntcagcgccactgctnctgccacagtgaggggcgcactctacaactttcagggcccacagcaccaagaggacagggaggagccaacaaaggaatgacgctacgaaaagcacccccaaagcaaccaacaaatccaagtaaaaacacgtctcagggctccgttggttttcccgcgtgggcggccctgcccccatgttccagcccagcccaggcaccctccaccctaccctggccaaaggggcccctgtctaccagatagagcctccctctccaaggctctgttgctctccctctctagctccctcaccctttccctttctctacttccctctccaccttgctctctctctctctctctcaatctccccagttcctctctgtctctctctccatcgctgtttctctccttccgtttctatttctcatccctctgtcccttgctctccttcaagttgtctgtgtctttgtgtgtctgtgtgtgtgcttgtgttcccgcgcgtgcgcccgtgtgtgtctgtgtgtttgggagtgggtttgctagtgattgtggtggggtgtgtctggatgtccatcagtacctttgtcccaggatcaggctgccaactctattgccaacgcctgggtgtcacagttgccgtgatagtctcacacacgcagttgtgttcatctcgttcgttttcacgtagacaacgagagcgaaaccacagagaaaagaaacatcccgtgcatcacggcctgatgatggattcctgtttcctgcaaaatggggagtctccaatatagcctgtttgaaaactggaaaggagagcaccgacacgatgctggtcttccacgcattcctggaagtttctggggccccacagagctcgcgaaacagtcaacatggtcacgctttcggggggcagaaacttgagcaacaggcacctttacagagggcaaagaaacgtggaatccagaatcacgcttcagttggcctgagtgtgactcctgtgtggatgggactatccgcctcgagctctgttgcagggctcaacgtggggatatgtcatctgtgaaccatgtggatgaaaaacagacaactacctgggtctcggctcattgctctctggggaattcgctcattccttcggaaacggaattggtctgaattgctccgggacgaagtaacccaggctggtgatccagagggccgctgagcgccccgccggccaacggggctgtgggcccagcactcagcctgtactgggcacccaacattttcccggagttctgggtcctgttggttctggaggcataagaccgtttttgtctctgccttccgttctctgcttcttgctccttttgtcccttggtccatccttccatctgttcttccctccctcccctggctttttcctccctttctccctccctccctctttctctcccttccggggtccctccttccacccatccttgcctagctccatccttccatctcactctgtctccgttcctgtcctcatctctgcctgccttccctcttgcctggaaagggcagcaccctggtttgcgcgaggtctggggtctttatttagttgcaaggcgctctatggtgctggcgaggaggctggcgggacacgggttggcaactgatggtgagcgaagaggcggaggagtcgagccgcagaaaggagaactggcctggcttctgccccggcccagtgtttcgcggactgaggtctccgccaacccgattgaagaacgcagggggaaaagggatgagagctccgcctgggctagttagaaaactaggctgctgcctggaaacccgcgcatgcgcagtagacagcctacctccctgtacctggaccagccctgggatccccgggatgctcaggaatgctttcttgtcattgttgacagccctcctctgtgtggagtctctcgctggacctggaactcagggatcctaggcaggtcagctggaagggaagacacgcctctccacaccaagcctgaggttcaccgcgaaagagaggccgccaccctgccccaaacccgccccaacctgctcctccagcagagccctgtgttcttcctggctgaggagtggttccagcaaagcgggctcttccacgtccttcagctcccccagtggcgccggatctaggaaaggttgtgccttttgctgaaactctggggttgacaggagctcatctaacaggctggaggtgagtgcagaggagagccccggctcctggagcggttgggaggtgcccggttggctggcatctgtgcttgacgcggaggcctccggggtcacgagctccggaggtgaaggtgccccgtcttcgggttcccatgccgccctggcgacctgcggctccagccccaccacggactccggtgggacgtgggtggcgcaagcacacctttcccctgtgactcagcttgaggggccccaaggtgtcccactgagcacgcgcccagcaggccatcgcgctgcgggttctggtcttcctgtcatttgttggggttcggaggccaccagggagtctgaggatgggagagccccagtttcggaggggccagggcagtgaacacaaagccccgcatgcccgggcaggttgggagagtccttctgcctgcgcagcctggctgggctggagcagggggatggcccttgctgcctggctcacgaaagccccctgtgggagagccccaggagcgcagggcatgtggggtgcaggaagcgcctttccccacgccccggtgtaggtgaactcgatagaggagggaggagggtgacacccaccaggggtgctaattagtaaccacagtggcctcaaagaactcaaatgaaaggaagacttgcaagtctctcactttaagtccagagctagaaatgattaagcttagtgaagatgcagaattttcatagctagagagaagtcaacgcttggcttcaaaacttcaaaggatgggctgactctctttgaggagcactgcagctggtgactttaagttacagccagtgctcattgaccactctgaaaatctcagggcccttaagaattatgcaaaatctattctttctgtgctctagaaatggaacatcactgtctgggtgacagcacatctgttaatagcatggtttactgaatattttaatcccactattgagaactgctcagaaaaaaaaaaaaccgattcttttaaaaagattgttggttggccaggcatagtggctcatacttgtaatccctgcactttgggaggccgaggatcacctgaggtcaggagttcaagaccagcctggccaaaatgatgaaaccccatctctaataaaaatacaaaaaaattagccaggcatggtggtagtacctgtaatttcagctactcgggaggctgaggcagaagaatggcttgaaccctggaggcagaggttgcagtgagccgagaccgcaccactgtactgcagcctgggcaacaagagcgaaactacgtcaaa

SEQ ID NO: 418528 - DNA, 2733 bp, Homo sapiens
  misc_feature (34)..(34): n is a, c, g, or t
  misc_feature (117)..(117): n is a, c, g, or t
  misc_feature (139)..(139): n is a, c, g, or t
  misc_feature (155)..(155): n is a, c, g, or t
  misc_feature (172)..(172): n is a, c, g, or t
  misc_feature (187)..(187): n is a, c, g, or t
gcggctccggggtgcctgatcccagcctcgcgcncccgggttggtggtgacgcctggaatcaggcaggcgtagctggactgggctcttgggccagccaggcgccactgccattgtcnacggccataccacctggaaaangagagagacccaagcngcggcccgtgggcacgntcagcgccactgctnctgccacagtgaggggcgcactctacaactttcagggcccacagcaccaagaggacagggaggagccaacaaaggaatgacgctacgaaaagcacccccaaagcaaccaacaaatccaagtaaaaacacgtctcagggctccgttggttttcccgcgtgggcggccctgcccccatgttccagcccagcccaggcaccctccaccctaccctggccaaaggggcccctgtctaccagatagagcctccctctccaaggctctgttgctctccctctctagctccctcaccctttccctttctctacttccctctccaccttgctctctctctctctctctcaatctccccagttcctctctgtctctctctccatcgctgtttctctccttccgtttctatttctcatccctctgtcccttgctctccttcaagttgtctgtgtctttgtgtgtctgtgtgtgtgcttgtgttcccgcgcgtgcgcccgtgtgtgtctgtgtgtttgggagtgggtttgctagtgattgtggtggggtgtgtctggatgtccatcagtacctttgtcccaggatcaggctgccaactctattgccaacgcctgggtgtcacagttgccgtgatagtctcacacacgcagttgtgttcatctcgttcgttttcacgtagacaacgagagcgaaaccacagagaaaagaaacatcccgtgcatcacggcctgatgatggattcctgtttcctgcaaaatggggagtctccaatatagcctgtttgaaaactggaaaggagagcaccgacacgatgctggtcttccacgcattcctggaagtttctggggccccacagagctcgcgaaacagtcaacatggtcacgctttcggggggcagaaacttgagcaacaggcacctttacagagggcaaagaaacgtggaatccagaatcacgcttcagttggcctgagtgtgactcctgtgtggatgggactatccgcctcgagctctgttgcagggctcaacgtggggatatgtcatctgtgaaccatgtggatgaaaaacagacaactacctgggtctcggctcattgctctctggggaattcgctcattccttcggaaacggaattggtctgaattgctccgggacgaagtaacccaggctggtgatccagagggccgctgagcgccccgccggccaacggggctgtgggcccagcactcagcctgtactgggcacccaacattttcccggagttctgggtcctgttggttctggaggcataagaccgtttttgtctctgccttccgttctctgcttcttgctccttttgtcccttggtccatccttccatctgttcttccctccctcccctggctttttcctccctttctccctccctccctctttctctcccttccggggtccctccttccacccatccttgcctagctccatccttccatctcactctgtctccgttcctgtcctcatctctgcctgccttccctcttgcctggaaagggcagcaccctggtttgcgcgaggtctggggtctttatttagttgcaaggcgctctatggtgctggcgaggaggctggcgggacacgggttggcaactgatggtgagcgaagaggcggaggagtcgagccgcagaaaggagaactggcctggcttctgccccggcccagtgtttcgcggactgaggtctccgccaacccgattgaagaacgcagggggaaaagggatgagagctccgcctgggctagttagaaaactaggctgctgcctggaaacccgcgcatgcgcagtagacagcctacctccctgtacctggaccagccctgggatccccgggatgctcaggaatgctttcttgtcattgttgacagccctcctctgtgtggagtctctcgctggacctggaactcagggatcctaggcaggtcagctggaagggaagacacgcctctccacaccaagcctgaggttcaccgcgaaagagaggccgccaccctgccccaaacccgccccaacctgctcctccagcagagccctgtgttcttcctggctgaggagtggttccagcaaagcgggctcttccacgtccttcagctcccccagtggcgccggatctaggaaaggttgtgccttttgctgaaactctggggttgacaggagctcatctaacaggctggaggcccataggtggaagggacttgccttgtctcggatgagactttggactttggactgtggacttttgagttaacactgaaatgaattaatgctgaaatgaattgagactttgggagacggttgagaagccatgactcattttaaacatgtgagacatgcctttcaccttctgccatgattgtgaggcctctccagccatgtggaactgtgaacacaacagtgttcatcccctcaggaggacacagctttgaggtaccatcttggaagcagagaacaggccctcactagaaacaaaacttcctggcacgttgaatttggacttcatagcctctaaaactgtgctgggaagaca

SEQ ID NO: 418529 - DNA, 446 bp, Homo sapiens
gcctgggccattccaggtttccctgtcaccaggacctgtaaacctggcctgcccatggggacgccagctggggatacccgtttctctagcttggagccaccaagatagaggacaaacacttctgtgattcagtccccagactgtctctgacttaatcccttgggttcaagccctatgtgggagagcaagggcacacactgcctaatccgtggtgtcccccccaggacaatggcgtctcttggccacatcttggttttctgtgtgggtctcctcaccatggccaaggcagaaagtccaaaggaacacgacccgttcacttacgactaccagtccctgcagatcggaggcctcgtcatcgccgggatcctcttcatcctgggcatcctcatcgtgctgagtgagtgcccctagctcccgccctctaccccgcctctccctggccccac

SEQ ID NO: 418530 - DNA, 602 bp, Homo sapiens
ctgggccagggggtccaaagtgctcagcccccggggcacagcaggacgtttgggggccttctttcagcaggggacagcccgattggggacaatggcgtctcttggccacatcttggttttctgtgtgggtctcctcaccatggccaaggcagaaagtccaaaggaacacgacccgttcacttacgactaccagtccctgcagatcggaggcctcgtcatcgccgggatcctcttcatcctgggcatcctcatcgtgctgagcagaagatgccggtgcaagttcaaccagcagcagaggactggggaacccgatgaagaggagggaactttccgcagctccatccgccgtctgtccacccgcaggcggtagaaacacctggagcgatggaatccggccaggactcccctggcacctgacatctcccacgctccacctgcgcgcccaccgccccctccgccgccccttccccagccctgcccccgcagactccccctgccgccaagacttccaataaaacgtgcgttcctctcgacaaaacgaagggaataccagcacaaggacataacaaatagaaaaaagaaaatatacaccaagaatcaac

SEQ ID NO: 418531 - DNA, 739 bp, Homo sapiens
gcctgggccattccaggtttccctgtcaccaggacctgtaaacctggcctgcccatggggacgccagctggggatacccgtttctctagcttggagccaccaagatagaggacaaacacttctgtgattcagtccccagactgtctctgacttaatcccttgggttcaagccctatgtgggagagcaagggcacacactgcctaatccgtggtgtcccccccaggacaatggcgtctcttggccacatcttggttttctgtgtgggtctcctcaccatggccaaggcagaaagtccaaaggaacacgacccgttcacttacgactaccagtccctgcagatcggaggcctcgtcatcgccgggatcctcttcatcctgggcatcctcatcgtgctgagcagaagatgccggtgcaagttcaaccagcagcagaggactggggaacccgatgaagaggagggaactttccgcagctccatccgccgtctgtccacccgcaggcggtagaaacacctggagcgatggaatccggccaggactcccctggcacctgacatctcccacgctccacctgcgcgcccaccgccccctccgccgccccttccccagccctgcccccgcagactccccctgccgccaagacttccaataaaacgtgcgttcctctcgacaaaacgaagggaataccagcacaaggacataacaaatagaaaaaagaaaatatacaccaagaatcaac

SEQ ID NO: 418532 - DNA, 1459 bp, Homo sapiens
gatgaaatagtagtaatgtttatactcactcagccttcacagccaccctgtgagatgggcagtactgctatccctgctttacagatggggaaactgaggcacagggaagttatgtgattagtttcctggctctagtcagctctaaacctaacccctaggctgtaccacctcatcgcctggggacgagactcatcctgtgattgaggaatgcatgcagcctctcttgacactgacgcccacgcccagaagcctcgttggaggataagggggcttaacagcttggaggtcatgcagatctgggttccaggcccagtcctgtgtggcctcagttttcccatctgtcaaacggggacaatcgtggcacccgcttcccagttgtggagaggactcaggtgatggaggcaactcatccttttggggttcagcacaaggtgggcatcccacagtggtcggcaagcttgggggtgggctccggatccagctcctagaggagcagaccccagcagcttgtggtttgagccatgcccgtcagctctcagtttccttcactgactattgggtatgataaacagggtccctgacatccgattgtgaaagatgtcacccagaggcgggcagaggggctgtcttttccttttctcgttgctgcccagggaggagacggggtggcctttcccacaggggcagcctgtggcgatgtggcagctgggcctcaccccggcaggcttgtgcgtgaccccctgagtgggggaaggcaggctgttgcatggtggcctgagcgagcagaattcctccagggacaatggcgtctcttggccacatcttggttttctgtgtgggtctcctcaccatggccaaggcagaaagtccaaaggaacacgacccgttcacttacgactaccagtccctgcagatcggaggcctcgtcatcgccgggatcctcttcatcctgggcatcctcatcgtgctgagcagaagatgccggtgcaagttcaaccagcagcagaggactggggaacccgatgaagaggagggaactttccgcagctccatccgccgtctgtccacccgcaggcggtagaaacacctggagcgatggaatccggccaggtgctgcagctctgacacggcggtgggagggaaggagggaggaaggaaaggcgggagagggagggggccaagtgccagagttgaagggcggcgaggggtggtggctggacgtcccccctcgcctctcacccttttcaccctcacaggactcccctggcacctgacatctcccacgctccacctgcgcgcccaccgccccctccgccgccccttccccagccctgcccccgcagactccccctgccgccaagacttccaataaaacgtgcgttcctctcgacaaaacgaagggaataccagcacaaggacataacaaatagaaaaaagaaaatatacaccaagaatcaac

SEQ ID NO: 418533 - DNA, 701 bp, Homo sapiens
tgcctgcgtctgtctcagcatctcgtggcccatcctctgcttcttcccgtcttctctcccccctgtcctcctcctccctgtcccctccctccctttcctatacacccctttcctctccctggtaccccactttcctcctcccatatctgctcccccttaattatcttacttccccccttctgcctgctggtcctttctccctgttccctccttcccaatttacccctctcctattctccctcctgtcttccctgccctcaccttccctgctctgctgctcacagactaccagtccctgcagatcggaggcctcgtcatcgccgggatcctcttcatcctgggcatcctcatcgtgctgagcagaagatgccggtgcaagttcaaccagcagcagaggactggggaacccgatgaagaggagggaactttccgcagctccatccgccgtctgtccacccgcaggcggtagaaacacctggagcgatggaatccggccaggactcccctggcacctgacatctcccacgctccacctgcgcgcccaccgccccctccgccgccccttccccagccctgcccccgcagactccccctgccgccaagacttccaataaaacgtgcgttcctctcgacaaaacgaagggaataccagcacaaggacataacaaatagaaaaaagaaaatatacaccaagaatcaac

SEQ ID NO: 418534 - DNA, 364 bp, Homo sapiens
tcctacctctccacgcccacaggcagaagatgccggtgcaagttcaaccagcagcagaggactggggaacccgatgaagaggagggaactttccgcagctccatccgccgtctgtccacccgcaggcggtagaaacacctggagcgatggaatccggccaggactcccctggcacctgacatctcccacgctccacctgcgcgcccaccgccccctccgccgccccttccccagccctgcccccgcagactccccctgccgccaagacttccaataaaacgtgcgttcctctcgacaaaacgaagggaataccagcacaaggacataacaaatagaaaaaagaaaatatacaccaagaatcaac

SEQ ID NO: 418535 - DNA, 756 bp, Homo sapiens
ctcgatgctggggaacccaggacatgctgaacccacagccccatctgccacagagggaacctcacgatacaaatacaaagttaccctcgatgttggggaacccaggacatgctgatctcacaggatggcgactgcatggcgcagccgcgtggaaggaggcagaagaaggagaagtgcgcctgggtgcgcacccaggcgcacttctgggggccttctttcagcaggggacagcccgattggggacaatggcgtctcttggccacatcttggttttctgtgtgggtctcctcaccatggccaaggcagaaagtccaaaggaacacgacccgttcacttacgactaccagtccctgcagatcggaggcctcgtcatcgccgggatcctcttcatcctgggcatcctcatcgtgctgagcagaagatgccggtgcaagttcaaccagcagcagaggactggggaacccgatgaagaggagggaactttccgcagctccatccgccgtctgtccacccgcaggcggtagaaacacctggagcgatggaatccggccaggactcccctggcacctgacatctcccacgctccacctgcgcgcccaccgccccctccgccgccccttccccagccctgcccccgcagactccccctgccgccaagacttccaataaaacgtgcgttcctctcgacaaaacgaagggaataccagcacaaggacataacaaatagaaaaaagaaaatatacaccaagaatcaac

SEQ ID NO: 418536 - DNA, 630 bp, Homo sapiens
tgtgtagggctggttgcgtcactgcgtgggggcaccggaggcccagaggaggagtattggatgcctgacggtgtttacaccccacgtcctgctccaaccagcagtttggggagaggacaatggcgtctcttggccacatcttggttttctgtgtgggtctcctcaccatggccaaggcagaaagtccaaaggaacacgacccgttcacttacgactaccagtccctgcagatcggaggcctcgtcatcgccgggatcctcttcatcctgggcatcctcatcgtgctgagcagaagatgccggtgcaagttcaaccagcagcagaggactggggaacccgatgaagaggagggaactttccgcagctccatccgccgtctgtccacccgcaggcggtagaaacacctggagcgatggaatccggccaggactcccctggcacctgacatctcccacgctccacctgcgcgcccaccgccccctccgccgccccttccccagccctgcccccgcagactccccctgccgccaagacttccaataaaacgtgcgttcctctcgacaaaacgaagggaataccagcacaaggacataacaaatagaaaaaagaaaatatacaccaagaatcaac

SEQ ID NO: 418537 - DNA, 1087 bp, Homo sapiens
gatgaaatagtagtaatgtttatactcactcagccttcacagccaccctgtgagatgggcagtactgctatccctgctttacagatggggaaactgaggcacagggaagttatgtgattagtttcctggctctagtcagctctaaacctaacccctaggctgtaccacctcatcgcctggggacgagactcatcctgtgattgaggaatgcatgcagcctctcttgacactgacgcccacgcccagaagcctcgttggaggataagggggcttaacagcttggaggtcatgcagatctgggttccaggcccagtcctgtgtggcctcagttttcccatctgtcaaacggggacaatcgtggcacccgcttcccagttgtggagaggactcaggtgatggaggcaactcatccttttggggttcagcacaaggtgggcatcccacagtggtcggcaagcttgggggtgggctccggatccagctcctgacatccgattgtgaaagatgtcacccagaggcgggcagaggggctgtcttttccttttctcgttgctgcccagggaggagacggggtggcctttcccacaggggcagcctgtggcgatgtggcagctgggcctcaccccggcaggcttgtgcgtgacccccttccctgctctgctgctcacagactaccagtccctgcagatcggaggcctcgtcatcgccgggatcctcttcatcctgggcatcctcatcgtgctgagcagaagatgccggtgcaagttcaaccagcagcagaggactggggaacccgatgaagaggagggaactttccgcagctccatccgccgtctgtccacccgcaggcggtagaaacacctggagcgatggaatccggccaggactcccctggcacctgacatctcccacgctccacctgcgcgcccaccgccccctccgccgccccttccccagccctgcccccgcagactccccctgccgccaagacttccaataaaacgtgcgttcctctcgacaaaacgaagggaataccagcacaaggacataacaaatagaaaaaagaaaatatacaccaagaatcaac

SEQ ID NO: 418538 - DNA, 1313 bp, Homo sapiens
gatgaaatagtagtaatgtttatactcactcagccttcacagccaccctgtgagatgggcagtactgctatccctgctttacagatggggaaactgaggcacagggaagttatgtgattagtttcctggctctagtcagctctaaacctaacccctaggctgtaccacctcatcgcctggggacgagactcatcctgtgattgaggaatgcatgcagcctctcttgacactgacgcccacgcccagaagcctcgttggaggataagggggcttaacagcttggaggtcatgcagatctgggttccaggcccagtcctgtgtggcctcagttttcccatctgtcaaacggggacaatcgtggcacccgcttcccagttgtggagaggactcaggtgatggaggcaactcatccttttggggttcagcacaaggtgggcatcccacagtggtcggcaagcttgggggtgggctccggatccagctcctagaggagcagaccccagcagcttgtggtttgagccatgcccgtcagctctcagtttccttcactgactattgggtatgataaacagggtccctgacatccgattgtgaaagatgtcacccagaggcgggcagaggggctgtcttttccttttctcgttgctgcccagggaggagacggggtggcctttcccacaggggcagcctgtggcgatgtggcagctgggcctcaccccggcaggcttgtgcgtgaccccctgagtgggggaaggcaggctgttgcatggtggcctgagcgagcagaattcctccagggacaatggcgtctcttggccacatcttggttttctgtgtgggtctcctcaccatggccaaggcagaaagtccaaaggaacacgacccgttcacttacgactaccagtccctgcagatcggaggcctcgtcatcgccgggatcctcttcatcctgggcatcctcatcgtgctgagcagaagatgccggtgcaagttcaaccagcagcagaggactggggaacccgatgaagaggagggaactttccgcagctccatccgccgtctgtccacccgcaggcggtagaaacacctggagcgatggaatccggccaggactcccctggcacctgacatctcccacgctccacctgcgcgcccaccgccccctccgccgccccttccccagccctgcccccgcagactccccctgccgccaagacttccaataaaacgtgcgttcctctcgacaaaacgaagggaataccagcacaaggacataacaaatagaaaaaagaaaatatacaccaagaatcaac

SEQ ID NO: 418539 - DNA, 803 bp, Homo sapiens
acttccctcaacccttcccacaaactgggaggaaaactgagacctcctggtcacccgccgccgggccttttagaaactcccacaagctctgccttccctccctggtcctcttcagaccccctcttagttcttcgcggctaacggctcgcgctcggggcagggtgtggagctggaacagagggctggcaaggcgcgcatgcgcaccgagggtggagccgctgagcacagaaccggaaacttagagacaaagttcggagccccgcccccgccgcgcgccgctgagttgtctggccccgccgacccacggcccacgacccaccgacccacgaatcggcccggccgtcgcgtgcaccatgtctggctcctccagcgtcgccgctatgaagaaagtggttcaacagctccggctggaggccggactcaaccgcgtaaaagtttcccaggcagctgcagacttgaaacagttctgtctgcagaatgctcaacatgaccctctgctgactggagtatcttcaagtacaaatcccttcagaccccagaaagtctgttcctttttgtagtaaaatgaatctttcaaaggtttcccaaaccactccttatgatccagtgaatattcaagagagctacatttgaagcctgtacaaaagcttatccctgtaacacatgtgccataatatacaaacttctactttcgtcagtccttaacatctacctctctgaattttcatgaatttctatttcacaagggtaattgttttatatacactggcagcagcatacaataaaacttagtatgaaacttt

SEQ ID NO: 418540 - DNA, 937 bp, Homo sapiens
acttccctcaacccttcccacaaactgggaggaaaactgagacctcctggtcacccgccgccgggccttttagaaactcccacaagctctgccttccctccctggtcctcttcagaccccctcttagttcttcgcggctaacggtaagctctctccttacctctccctaatccgcccctctggagaggaaaagaaaacttaacagtcgggtcgcgctagcctccagcagccgccgcgcccaccgactgctccgccccttctcctccccctcctccaggctcgcgctcggggcagggtgtggagctggaacagagggctggcaaggcgcgcatgcgcaccgagggtggagccgctgagcacagaaccggaaacttagagacaaagttcggagccccgcccccgccgcgcgccgctgagttgtctggccccgccgacccacggcccacgacccaccgacccacgaatcggcccggccgtcgcgtgcaccatgtctggctcctccagcgtcgccgctatgaagaaagtggttcaacagctccggctggaggccggactcaaccgcgtaaaagtttcccaggcagctgcagacttgaaacagttctgtctgcagaatgctcaacatgaccctctgctgactggagtatcttcaagtacaaatcccttcagaccccagaaagtctgttcctttttgtagtaaaatgaatctttcaaaggtttcccaaaccactccttatgatccagtgaatattcaagagagctacatttgaagcctgtacaaaagcttatccctgtaacacatgtgccataatatacaaacttctactttcgtcagtccttaacatctacctctctgaattttcatgaatttctatttcacaagggtaattgttttatatacactggcagcagcatacaataaaacttagtatgaaacttt

SEQ ID NO: 418541 - DNA, 557 bp, Homo sapiens
ttattcattttactacagagcaccttgtctgtcattttctctgaactgttagctccataacaacagggctctggctgttcttatgtattcttagtgcctgtaagtatatgcggcacatagtggtgcttgaaaattgtgaaagcgagttacattggaccccacctacactttaaacagaaaattaacaggtttcccaggcagctgcagacttgaaacagttctgtctgcagaatgctcaacatgaccctctgctgactggagtatcttcaagtacaaatcccttcagaccccagaaagtctgttcctttttgtagtaaaatgaatctttcaaaggtttcccaaaccactccttatgatccagtgaatattcaagagagctacatttgaagcctgtacaaaagcttatccctgtaacacatgtgccataatatacaaacttctactttcgtcagtccttaacatctacctctctgaattttcatgaatttctatttcacaagggtaattgttttatatacactggcagcagcatacaataaaacttagtatgaaacttt

SEQ ID NO: 418542 - DNA, 433 bp, Homo sapiens
ggacgcgtgggtccggacgcgtgggcaacagctccggctggaggccggactcaaccgcgtaaaagtttcccaggcagctgcagacttgaaacagttctgtctgcagaatgctcaacatgaccctctgctgactggagtatcttcaagtacaaatcccttcagaccccagaaagtctgttcctttttgtagtaaaatgaatctttcaaaggtttcccaaaccactccttatgatccagtgaatattcaagagagctacatttgaagcctgtacaaaagcttatccctgtaacacatgtgccataatatacaaacttctactttcgtcagtccttaacatctacctctctgaattttcatgaatttctatttcacaagggtaattgttttatatacactggcagcagcatacaataaaacttagtatgaaacttt

SEQ ID NO: 418543 - DNA, 408 bp, Homo sapiens
  misc_feature (1)..(1): n is a, c, g, or t
  misc_feature (14)..(14): n is a, c, g, or t
ncctatggggactngactctcttccttaacgccgcacaggtttcccaggcagctgcagacttgaaacagttctgtctgcagaatgctcaacatgaccctctgctgactggagtatcttcaagtacaaatcccttcagaccccagaaagtctgttcctttttgtagtaaaatgaatctttcaaaggtttcccaaaccactccttatgatccagtgaatattcaagagagctacatttgaagcctgtacaaaagcttatccctgtaacacatgtgccataatatacaaacttctactttcgtcagtccttaacatctacctctctgaattttcatgaatttctatttcacaagggtaattgttttatatacactggcagcagcatacaataaaacttagtatgaaacttt

SEQ ID NO: 418544 - DNA, 1220 bp, Homo sapiens
acttccctcaacccttcccacaaactgggaggaaaactgagacctcctggtcacccgccgccgggccttttagaaactcccacaagctctgccttccctccctggtcctcttcagaccccctcttagttcttcgcggctaacggctcgcgctcggggcagggtgtggagctggaacagagggctggcaaggcgcgcatgcgcaccgagggtggagccgctgagcacagaaccggaaacttagagacaaagttcggagccccgcccccgccgcgcgccgctgagttgtctggccccgccgacccacggcccacgacccaccgacccacgaatcggcccggccgtcgcgtgcaccatgtctggctcctccagcgtcgccgctatgaagaaagtggttcaacagctccggctggaggccggactcaaccgcgtaaaagtttcccaggcagctgcagacttgaaacagttctgtctgcagaatgctcaacatgaccctctgctgactggagtatcttcaagtacaaatcccttcagaccccagaaagtctgttcctttttgtagtaaaatgaatctttcaaaggtttcccaaaccactccttatgatccagtgaatattcaagagagctacatttgaagcctgtacaaaagcttatccctgtaacacatgtgccataatatacaaacttctactttcgtcagtccttaacatctacctctctgaattttcatgaatttctatttcacaagggtaattgttttatatacactggcagcagcatacaataaaacttagtatgaaactttaaaaaaaaaaaaaaaaaaaaaaaaaaaaaaaaaagcgggggcttagggggggggggggaaaaaggggttgaaagggggggggactaggtgtttcgtgggaccccattttttgggtaccgaggggcgaaatcgggcgaccgccagaagggggccataaacggtggggagagggcagtggacgtctaggtgccgcccaacaacggaggcgaagagaagcagcaagcgcggggaccataccaggtctcaccagactgtccgaacaccagcagacggatagcgctacacacaagaaacatagagaacggacgaatgctacgaaggacagaaacgagacgacgggggaaagcacgagagaagaaggcagagcaaggtgacgaggcacagacgaggaaggagcgaggcaaagcaacgaagtat

SEQ ID NO: 418545 - DNA, 1282 bp, Homo sapiens
acttccctcaacccttcccacaaactgggaggaaaactgagacctcctggtcacccgccgccgggccttttagaaactcccacaagctctgccttccctccctggtcctcttcagaccccctcttagttcttcgcggctaacggctcgcgctcggggcagggtgtggagctggaacagagggctggcaaggcgcgcatgcgcaccgagggtggagccgctgagcacagaaccggaaacttagagacaaagttcggagccccgcccccgccgcgcgccgctgagttgtctggccccgccgacccacggcccacgacccaccgacccacgaatcggcccggccgtcgcgtgcaccatgtctggctcctccagcgtcgccgctatgaagaaagtggttcaacagctccggctggaggccggactcaaccgcgtaaaagtttcccaggcagctgcagacttgaaacagttctgtctgcagaatgctcaacatgaccctctgctgactggagtatcttcaagtacaaatcccttcagaccccagaaagtctgttcctttttgtagtaaaatgaatctttcaaaggtttcccaaaccactccttatgatccagtgaatattcaagagagctacatttgaagcctgtacaaaagcttatccctgtaacacatgtgccataatatacaaacttctactttcgtcagtccttaacatctacctctctgaattttcatgaatttctatttcacaagggtaattgttttatatacactggcagcagcatacaataaaacttagtatgaaactttattttgcattattattggtattaaatacatggtatattaatctgttctgaacacctgaaggggttaagtttgtacagttttttccacctactcttctcacatgactttatgccatacatctggcaagactgctagggaattaaaggtaaactgtgaacctttattcttttaaggtcaggaggaggctgttaagttctacgggtttccatccatgagttacttatagggttaactttgtttcagtgcctgaatggagtactacagcaccatgtaatgaggtaaaaaagagctccccacaacgtgggcacaaaaaaccaaaaacctcaaaatcaggaagcaaagattagcttcagtaatttgcaactttgctttaaaccctggtagatcattttgctttaaattttttacccttctgaaggcttaagagaatgttaaaacatccagaaacctggcctccatttaagctattaaaactgtgc

SEQ ID NO: 418546 - DNA, 881 bp, Homo sapiens
acttccctcaacccttcccacaaactgggaggaaaactgagacctcctggtcacccgccgccgggccttttagaaactcccacaagctctgccttccctccctggtcctcttcagaccccctcttagttcttcgcggctaacggctcgcgctcggggcagggtgtggagctggaacagagggctggcaaggcgcgcatgcgcaccgagggtggagccgctgagcacagaaccggaaacttagagacaaagttcggagccccgcccccgccgcgcgccgctgagttgtctggccccgccgacccacggcccacgacccaccgacccacgaatcggcccggccgtcgcgtgcaccatgtctggctcctccagcgtcgccgctatgaagaaagtggttcaacagctccggctggaggccggactcaaccgcgtaaaagtttcccaggcagctgcagacttgaaacagttctgtctgcagaatgctcaacatgaccctctgctgactggagtatcttcaagtacaaatcccttcagaccccagaaagtctgttcctttttgtagtaaaatgaatctttcaaaggtttcccaaaccactccttatgatccagtgaatattcaagagagctacatttgaagcctgtacaaaagcttatccctgtaacacatgtgccataatatacaaacttctactttcgtcagtccttaacatctacctctctgaattttcatgaatttctatttcacaagggtaattgttttatatacactggcagcagcatacaataaaacttagtatgaaactttaaagaaaaaacaaaaagagaagccctctttagcaagccaggaattcaaaagaaaaaaaatggcctcgttgtgcctaaa

SEQ ID NO: 418547 - DNA, 527 bp, Homo sapiens
  misc_feature (8)..(8): n is a, c, g, or t
ggctgacntagcgtttacccccgtccgatggcccacgacccaccgacccacgaatcggcccggccgtcgcgtgcaccatgtctggctcctccagcgtcgccgctatgaagaaagtggttcaacagctccggctggaggccggactcaaccgcgtaaaagtttcccaggcagctgcagacttgaaacagttctgtctgcagaatgctcaacatgaccctctgctgactggagtatcttcaagtacaaatcccttcagaccccagaaagtctgttcctttttgtagtaaaatgaatctttcaaaggtttcccaaaccactccttatgatccagtgaatattcaagagagctacatttgaagcctgtacaaaagcttatccctgtaacacatgtgccataatatacaaacttctactttcgtcagtccttaacatctacctctctgaattttcatgaatttctatttcacaagggtaattgttttatatacactggcagcagcatacaataaaacttagtatgaaacttt

SEQ ID NO: 418548 - DNA, 957 bp, Homo sapiens
acttccctcaacccttcccacaaactgggaggaaaactgagacctcctggtcacccgccgccgggccttttagaaactcccacaagctctgccttccctccctggtcctcttcagaccccctcttagttcttcgcggctaacggtaagctctctccttacctctccctaatccgcccctctggagaggaaaagaaaacttaacagtcgggtcgcgctagcctccagcagccgccgcgcccaccgactgctccgccccttctcctccccctcctccaggctcgcgctcggggcagggtgtggagctggaacagagggctggcaaggcgcgcatgcgcaccgagggtggagccgctgagcacagaaccggaaacttagagacaaagttcggagccccgcccccgccgcgcgccgctgagttgtctggccccgccgacccacggcccacgacccaccgacccacgaatcggcccggccgtcgcgtgcaccatgtctggctcctccagcgtcgccgctatgaagaaagtggttcaacagctccggctggaggccggactcaaccgcgtaaaagtttcccaggcagctgcagacttgaaacagttctgtctgcagaatgctcaacatgaccctctgctgactggagtatcttcaagtacaaatcccttcagaccccagaaagtctgttcctttttgtagtaaaatgaatctttcaaaggtttcccaaaccactccttatgatccagtgaatattcaagagagctacatttgaagcctgtacaaaagcttatccctgtaacacatgtgccataatatacaaacttctactttcgtcagtccttaacatctacctctctgaattttcatgaatttctatttcacaagggtaattgttttatatacactggcagcagcatacaataaaacttagtatgaaactttaacaaaagaaaaaaagaagc

SEQ ID NO: 418549 - DNA, 646 bp, Homo sapiens
ttcaagcttctaacgatgtacggggacatgtgccataatatacaaacttctactttcgtcagtccttaacatctacctctctgaattttcatgaatttctatttcacaagggtaattgttttatatacactggcagcagcatacaataaaacttagtatgaaactttattttgcattattattggtattaaatacatggtatattaatctgttctgaacacctgaaggggttaagtttgtacagttttttccacctactcttctcacatgactttatgccatacatctggcaagactgctagggaattaaaggtaaactgtgaacctttattcttttaaggtcaggaggaggctgttaagttctacgggtttccatccatgagttacttatagggttaactttgtttcagtgcctgaatggagtactacagcaccatgtaatgaggtaaaaaagagctccccacaacgtgggcacaaaaaaccaaaaacctcaaaatcaggaagcaaagattagcttcagtaatttgcaactttgctttaaaccctggtagatcattttgctttaaattttttacccttctgaaggcttaagagaatgttaaaacatccagaaacctggcctccatttaagctattaaaactgtgc

SEQ ID NO: 418550 - DNA, 792 bp, Homo sapiens
acttccctcaacccttcccacaaactgggaggaaaactgagacctcctggtcacccgccgccgggccttttagaaactcccacaagctctgccttccctccctggtcctcttcagaccccctcttagttcttcgcggctaacggtaagctctctccttacctctccctaatccgcccctctggagaggaaaagaaaacttaacagtcgggtcgcgctagcctccagcagccgccgcgcccaccgactgctccgccccttctcctccccctcctccaggctcgcgctcggggcagggtgtggagctggaacagagggctggcaaggcgcgcatgcgcaccgagggtggagccgctgagcacagaaccggaaacttagagacaaagttcggagccccgcccccgccgcgcgccgctgagttgtctggccccgccgacccacggcccacgacccaccgacccacgaatcggcccggccgtcgcgtgcaccatgtctggctcctccagcgtcgccgctatgaagaaagtggttcaacagctccggctggaggccggactcaaccgcgtaaaagtttcccaaaccactccttatgatccagtgaatattcaagagagctacatttgaagcctgtacaaaagcttatccctgtaacacatgtgccataatatacaaacttctactttcgtcagtccttaacatctacctctctgaattttcatgaatttctatttcacaagggtaattgttttatatacactggcagcagcatacaataaaacttagtatgaaacttt

SEQ ID NO: 418551 - DNA, 333 bp, Homo sapiens
ggttgtgaaaattaagggaaagattttactgttactggaccataggcatttcccatcctgcttcttttaagttattcatgaaaaaaattaaaaactatgttctttgatactttaccctaactcacctttttttttttttccccatcttaggtttcccaaaccactccttatgatccagtgaatattcaagagagctacatttgaagcctgtacaaaagcttatccctgtaacacatgtgccataatatacaaacttctactttcgtcagtccttaacatctacctctctgaattttcatgaatttctatttcacaagggtaattgttttatat

SEQ ID NO: 418552 - DNA, 570 bp, Homo sapiens
tggctggtacggccggagtgtagggatcgcccccgccgcgcgccgctgagttgtctggccccgccgacccacggcccacgacccaccgacccacgaatcggcccggccgtcgcgtgcaccatgtctggctcctccagcgtcgccgctatgaagaaagtggttcaacagctccggctggaggccggactcaaccgcgtaaaagtttcccaggcagctgcagacttgaaacagttctgtctgcagaatgctcaacatgaccctctgctgactggagtatcttcaagtacaaatcccttcagaccccagaaagtctgttcctttttgtagtaaaatgaatctttcaaaggtttcccaaaccactccttatgatccagtgaatattcaagagagctacatttgaagcctgtacaaaagcttatccctgtaacacatgtgccataatatacaaacttctactttcgtcagtccttaacatctacctctctgaattttcatgaatttctatttcacaagggtaattgttttatatacactggcagcagcatacaataaaacttagtatgaaacttt

SEQ ID NO: 418553 - DNA, 1016 bp, Homo sapiens
acttccctcaacccttcccacaaactgggaggaaaactgagacctcctggtcacccgccgccgggccttttagaaactcccacaagctctgccttccctccctggtcctcttcagaccccctcttagttcttcgcggctaacggtaagctctctccttacctctccctaatccgcccctctggagaggaaaagaaaacttaacagtcgggtcgcgctagcctccagcagccgccgcgcccaccgactgctccgccccttctcctccccctcctccaggctcgcgctcggggcagggtgtggagctggaacagagggctggcaaggcgcgcatgcgcaccgagggtggagccgctgagcacagaaccggaaacttagagacaaagttcggagccccgcccccgccgcgcgccgctgagttgtctggccccgccgacccacggcccacgacccaccgacccacgaatcggcccggccgtcgcgtgcaccatgtctggctcctccagcgtcgccgctatgaagaaagtggttcaacagctccggcaattttggggggattgtccgaagaacgatgcatcactgtggacttgggcaggggggccccctggggggaaaactttcaaaacccccggggccggggttacaaacagtttcccaggcagctgcagacttgaaacagttctgtctgcagaatgctcaacatgaccctctgctgactggagtatcttcaagtacaaatcccttcagaccccagaaagtctgttcctttttgtagtaaaatgaatctttcaaaggtttcccaaaccactccttatgatccagtgaatattcaagagagctacatttgaagcctgtacaaaagcttatccctgtaacacatgtgccataatatacaaacttctactttcgtcagtccttaacatctacctctctgaattttcatgaatttctatttcacaagggtaattgttttatatacactggcagcagcatacaataaaacttagtatgaaacttt

SEQ ID NO: 418554 - DNA, 1058 bp, Homo sapiens
tcaccttgctttaacaagttcaatcgctttccacgctacctacagaggggtccatacggcgttgttctggattcccgtcgtaacttaaagggaaactttcacaatgtccggagcccttgatgtcctgcaaatgaaggaggaggatgtccttaagttccttgcagcaggaacccacttaggtggcaccaatcttgacttccagatggaacagtacatctataaaaggaaaagtgatggcatctatatcataaatctcaagaggacctgggagaagcttctgctggcagctcgtgcaattgttgccattgaaaaccctgctgatgtcagtgttatatcctccaggaatactggccagagggctgtgctgaagtttgctgctgccactggagccactccaattgctggccgcttcactcctggaaccttcactaaccagatccaggcagccttccgggagccacggcttcttgtggttactgaccccagggctgaccaccagcctctcacggaggcatcttatgttaacctacctaccattgcgctgtgtaacacagattctcctctgcgctatgtggacattgccatcccatgcaacaacaagggagctcactcagtgggtttgatgtggtggatgctggctcgggaagttctgcgcatgcgtggcaccatttcccgtgaacacccatgggaggtcatgcctgatctgtacttctacagagatcctgaagagattgaaaaagaagagcaggctgctgctgagaaggcagtgacccaaggaggaatttcagggtgaatggactgctcccgctcctgagttcactgctactcagcctgaggttgcagactggtctgaaggtgtacaggtgccctctgtgcctattcagcaattccctactgaagactggagcgctcagcctgccacggaagactggtctgcagctcccactgctcaggccactgaatgggtaggagcaaccactgactggtcttaagctgttcttgcataggctcttaagcaatatggaaaaatggtggatggaaaataaacatcagtttct

SEQ ID NO: 418555 - DNA, 327 bp, Homo sapiens
tcttgataatttcagttggttaaattacaatagtttgctatttcctccctcacattttatgttctacagtatctagctgcttgggttttcctgtataccatggggcttctgtcatctgggctttactcagtggcatattccctctgcctaaaactctcctcccctctccaccttagaagtagcttttcctagaacggttttcccagggtttcacctaaggtgatagtacaatctacagggacctgcacatgaagacctttgcatacatgccaggaagttggactttatctttggaaaaagggagcctttgaaggttttaaagtaaaa

SEQ ID NO: 418556 - DNA, 2286 bp, Homo sapiens
  misc_feature (2226)..(2226): n is a, c, g, or t
agcgggggtacgcgggcacgcgggactcccagctgtcaatcaggcgcgggctgagctctacgaggcggagcggcggcggtggcgacggcgatgggaccccagcgagagatctgcagctaggctggctgcacttgctccacgggtcaggggatcggagggggattgaagaatgcgccattaaaaggaaagatcaaggagtaaaccagaagaagaagaaaaagaggacttcaaagctgggaaggatgagttcttgcagcaacgtctgtgggtccaggcaggcacaggctgcagctgagggtggttaccagcgctatggagtccggtcctacctgcaccagttttatgaggactgtacagcctcaatttgggagtatgaggatgatttccagatccaaagatcacctaacaggtggagctcagtattctggaaggttggactcatctcaggtacagtttttgtgatcctcggattgactgttctggcagtgggctttcttgtgccccccaaaatcgaagcatttggcgaagccgattttgtggtggtcgacacacatgctgtccagtttaacagtgctctggacatgtacaagctggcaggagctgttctcttctgcattggaggcacgtccatggcagggtgcctgctgatgtcggtgttgtaaagagctactccaaagaagaaaaattcctccagcagaagtttaaagaacgaatcgcagacatcaaagcccacacccagccggttacaaaagctccagggccaggggaaacaaagattccagtcactttgtccagggttcaaaatgtccagcctctactggcaacctgaaacctttcccaccccagttcttcttgtctgatttatgcccgtggttaaaaagagcaggccagttttcgagataaagaagatttggcgttgactgccctagggctgtgttcagctgtgggcaatataatgggtggactcacacttgctcagttcaggcagctctgctggagggcggtgccatgcctaagcctgtgcacatgcatccagctgcttaagatgggtgcttccttgtacccggccaccagaaaacccctggaactcctctttcatagatcgtgactttgtgttattttccgtgttgtttgaaagtgccgaacagtttagaccagctcaccaatggctaatgtggtccattttattttctaatattggtttatctaatgttttctgcgtggtgctgtcttccattcctgtctcactatgtgtaagattttgtcatatgtgttcatagaaacatggaattctctgattttgagccgaacatgagtttttagactgtatcttgacatgaggttcctgacattggatacaaagttatcagcattcacaaatctttttgttttctccattttttttcctttgagatgaagtgctgttcttttgcctaggttggagtacagcggtgaaatcatagcgcactgcagccttgaactcctgggctcaagcgatcctcccacctcagcctcccaagtagctgggactacaggcacctgccaccacccccagttaatattttttttaattttttttagaggcaggatcttgctgtccaattttttttaaaaagctaaaattgccaactttagaatcttgaccaaaaaaaattaattttaggagcatctatttatgcagtgttcaaaagtactgaattagaaaccaggaagttttagttccttctactacctgtgtgatcttggggaaattatttaacctctcagtcctaattttccccttctgtataatgggagttctggatcacaatatgtctgggctctcattacccaaacatctgagattccatttttgccatgtgtcatcgagtcgctccccaacagatgtttgtgatgtttttgtggctgtcaccatggtgggattctttcagaatgagactcctggaaattcactgagtcagcagccttcacaccatctacccttaaatatccaaccccagcaatttatacaacgctgtcatatttttaaaaaaacaaaagtaagccatcctcaaataaggaaccccttggtagatattaaccttaaaaagggttttcattctcaaacaagatgctttgttctccaacaagatgttcatctcatcacttgcacttttgttttaatgtatggattcagattagactgagaaaaatggatggtattttcttaaaattgtgccaccttanagcccccccccttttttttttcttccttcactggataaataaaatatgtgaacaagtgga

SEQ ID NO: 418557 - DNA, 989 bp, Homo sapiens
tgctgggattacaggcgtgagccactgcgccccgccaagagagaggggtctttaaaagtaccttttctgtaatgaaaagagcattgttcaactaggcatacattactcagtctggttcttacctttcatatgtcttttgatcctgtggccaaagcctgtggcattaatccatgtggatgttgtcattccagctgggaaggatgagttcttgcagcaacgtctgtgggtccaggcaggcacaggctgcagctgagggtggttaccagcgctatggagtccggtcctacctgcaccagttttatgaggactgtacagcctcaatttgggagtatgaggatgatttccagatccaaagatcacctaacaggtggagctcagtattctggaagcaggaactgggttttcacacatcctcccacagccaagagtggaatcggaagttacagcacaaaaactgtcctcgctgctgtttcgggagtttgtcaccacctggagaggcccttctctgtcgccattgggattggccttaccaccctaaggccccaggttgctctgctgagcctggaggaggacccttccaaagcattccaactcttctgtgtggccctaaacgaggctgctttgcttcctcagaactttaaacaacctctgcattgcaattttttgactctttccatttgggagtcctctttctgttagacctgggaccaattcgactttgaactgtgtccagagataatttttatgatactgtatggaattgctccctcaatttttatcctttccagtactcagcatggtaccaagactaagctgatgagtcccaactgctctcctcacctcccatatgctactcatgagactccttcgtacctatcatcccacgctctccctcccatgttttaacatgtctggaattccccaatgggtgcatctctcagagattctcattaaagactggcattaacagccccttcagaagccttgaa

SEQ ID NO: 418558 - DNA, 626 bp, Homo sapiens
agcgggggtacgcgggcacgcgggactcccagctgtcaatcaggcgcgggctgagctctacgaggcggagcggcggcggtggcgacggcgatgggaccccagcgagagatctgcagctaggctggctgcacttgctccacgggtcaggggatcggagggggattgaagaatgcgccattaaaaggaaagatcaaggagtaaaccagaagaagaagaaaaagaggacttcaaaggtgcctggcacgtagtgctttaaaaacactgaaggaaggggaggatgaaaaatggaggactactcaggccttcatccacaccaacccacgtagaactctgcaggaagtttcaaagtactggagattaaagtggtcaacagtacagaaaatgtccctgcccacatgtagcttacactctatcatgtatatggtctatcagaccataagtaaataaaccacacatagaatatcagatagtaacaagtgctaggaagagaaacaaacctagacaaggggatagaaagtaatggaacgctgatatttagatatattgattatagaaagcctctcagaagaatttgatagggagtggcagcataatttttttccctcctcatgtctctgggttatgat

SEQ ID NO: 418559 - DNA, 1959 bp, Homo sapiens
  misc_feature (1899)..(1899): n is a, c, g, or t
agcgggggtacgcgggcacgcgggactcccagctgtcaatcaggcgcgggctgagctctacgaggcggagcggcggcggtggcgacggcgatgggaccccagcgagagatctgcagctaggctggctgcacttgctccacgggtcaggggatcggagggggattgaagaatgcgccattaaaaggaaagatcaaggagtaaaccagaagaagaagaaaaagaggacttcaaagctgggaaggatgagttcttgcagcaacgtctgtgggtccaggcaggcacaggctgcagctgagggtggttaccagcgctatggagtccggtcctacctgcaccagttttatgaggactgtacagcctcaatttgggagtatgaggatgatttccagatccaaagatcacctaacaggtggagctcagtattctggaaggttggactcatctcaggtacagtttttgtgatcctcggattgactgttctggcagtgggctttcttgtgccccccaaaatcgaagcatttggcgaagccgattttgtggtggtcgacacacatgctgtccagtttaacagtgctctggacatgtacaagctggcaggagctgttctcttctgcattggaggcacgtccatggcagggtgcctgctgatgtcggtgttgtaaagagctactccaaagaagaaaaattcctccagcagaagtttaaagaacgaatcgcagacatcaaagcccacacccagccggttacaaaagccctggaactcctctttcatagatcgtgactttgtgttattttccgtgttgtttgaaagtgccgaacagtttagaccagctcaccaatggctaatgtggtccattttattttctaatattggtttatctaatgttttctgcgtggtgctgtcttccattcctgtctcactatgtgtaagattttgtcatatgtgttcatagaaacatggaattctctgattttgagccgaacatgagtttttagactgtatcttgacatgaggttcctgacattggatacaaagttatcagcattcacaaatctttttgttttctccattttttttcctttgagatgaagtgctgttcttttgcctaggttggagtacagcggtgaaatcatagcgcactgcagccttgaactcctgggctcaagcgatcctcccacctcagcctcccaagtagctgggactacaggcacctgccaccacccccagttaatattttttttaattttttttagaggcaggatcttgctgtccaattttttttaaaaagctaaaattgccaactttagaatcttgaccaaaaaaaattaattttaggagcatctatttatgcagtgttcaaaagtactgaattagaaaccaggaagttttagttccttctactacctgtgtgatcttggggaaattatttaacctctcagtcctaattttccccttctgtataatgggagttctggatcacaatatgtctgggctctcattacccaaacatctgagattccatttttgccatgtgtcatcgagtcgctccccaacagatgtttgtgatgtttttgtggctgtcaccatggtgggattctttcagaatgagactcctggaaattcactgagtcagcagccttcacaccatctacccttaaatatccaaccccagcaatttatacaacgctgtcatatttttaaaaaaacaaaagtaagccatcctcaaataaggaaccccttggtagatattaaccttaaaaagggttttcattctcaaacaagatgctttgttctccaacaagatgttcatctcatcacttgcacttttgttttaatgtatggattcagattagactgagaaaaatggatggtattttcttaaaattgtgccaccttanagcccccccccttttttttttcttccttcactggataaataaaatatgtgaacaagtgga

SEQ ID NO: 418560 - DNA, 2244 bp, Homo sapiens
  misc_feature (2184)..(2184): n is a, c, g, or t
tgctgggattacaggcgtgagccactgcgccccgccaagagagaggggtctttaaaagtaccttttctgtaatgaaaagagcattgttcaactaggcatacattactcagtctggttcttacctttcatatgtcttttgatcctgtggccaaagcctgtggcattaatccatgtggatgttgtcattccagctgggaaggatgagttcttgcagcaacgtctgtgggtccaggcaggcacaggctgcagctgagggtggttaccagcgctatggagtccggtcctacctgcaccagttttatgaggactgtacagcctcaatttgggagtatgaggatgatttccagatccaaagatcacctaacaggtggagctcagtattctggaaggttggactcatctcaggtacagtttttgtgatcctcggattgactgttctggcagtgggctttcttgtgccccccaaaatcgaagcatttggcgaagccgattttgtggtggtcgacacacatgctgtccagtttaacagtgctctggacatgtacaagctggcaggagctgttctcttctgcattggaggcacgtccatggcagggtgcctgctgatgtcggtgttgtaaagagctactccaaagaagaaaaattcctccagcagaagtttaaagaacgaatcgcagacatcaaagcccacacccagccggttacaaaagctccagggccaggggaaacaaagattccagtcactttgtccagggttcaaaatgtccagcctctactggcaacctgaaacctttcccaccccagttcttcttgtctgatttatgcccgtggttaaaaagagcaggccagttttcgagataaagaagatttggcgttgactgccctagggctgtgttcagctgtgggcaatataatgggtggactcacacttgctcagttcaggcagctctgctggagggcggtgccatgcctaagcctgtgcacatgcatccagctgcttaagatgggtgcttccttgtacccggccaccagaaaacccctggaactcctctttcatagatcgtgactttgtgttattttccgtgttgtttgaaagtgccgaacagtttagaccagctcaccaatggctaatgtggtccattttattttctaatattggtttatctaatgttttctgcgtggtgctgtcttccattcctgtctcactatgtgtaagattttgtcatatgtgttcatagaaacatggaattctctgattttgagccgaacatgagtttttagactgtatcttgacatgaggttcctgacattggatacaaagttatcagcattcacaaatctttttgttttctccattttttttcctttgagatgaagtgctgttcttttgcctaggttggagtacagcggtgaaatcatagcgcactgcagccttgaactcctgggctcaagcgatcctcccacctcagcctcccaagtagctgggactacaggcacctgccaccacccccagttaatattttttttaattttttttagaggcaggatcttgctgtccaattttttttaaaaagctaaaattgccaactttagaatcttgaccaaaaaaaattaattttaggagcatctatttatgcagtgttcaaaagtactgaattagaaaccaggaagttttagttccttctactacctgtgtgatcttggggaaattatttaacctctcagtcctaattttccccttctgtataatgggagttctggatcacaatatgtctgggctctcattacccaaacatctgagattccatttttgccatgtgtcatcgagtcgctccccaacagatgtttgtgatgtttttgtggctgtcaccatggtgggattctttcagaatgagactcctggaaattcactgagtcagcagccttcacaccatctacccttaaatatccaaccccagcaatttatacaacgctgtcatatttttaaaaaaacaaaagtaagccatcctcaaataaggaaccccttggtagatattaaccttaaaaagggttttcattctcaaacaagatgctttgttctccaacaagatgttcatctcatcacttgcacttttgttttaatgtatggattcagattagactgagaaaaatggatggtattttcttaaaattgtgccaccttanagcccccccccttttttttttcttccttcactggataaataaaatatgtgaacaagtgga

SEQ ID NO: 418561 - DNA, 1141 bp, Homo sapiens
agcgggggtacgcgggcacgcgggactcccagctgtcaatcaggcgcgggctgagctctacgaggcggagcggcggcggtggcgacggcgatgggaccccagcgagagatctgcagctaggctggctgcacttgctccacgggtcaggggatcggagggggattgaagaatgcgccattaaaaggaaagatcaaggagtaaaccagaagaagaagaaaaagaggacttcaaagctgggaaggatgagttcttgcagcaacgtctgtgggtccaggcaggcacaggctgcagctgagggtggttaccagcgctatggagtccggtcctacctgcaccagttttatgaggactgtacagcctcaatttgggagtatgaggatgatttccagatccaaagatcacctaacaggtggagctcagtattctggaagcacagcatctaattcacaggagaagctcaatgaatgtttgctgaattgaggtgtttgagttgaagaaactgcaataattgttcttagtaaacagacctccttgtgacctgcaccaattcatatgatactgggatcaaaagcttcaacgaatatggtggctgatttagactcacctgcctcgggtgacattcaaaaggctgctgatgtgtcacggtgaggctgcgccaggctggcaccagagcctgcttcttccttcccatggagtggagctggctgaagaggttgggcaatccgggtccaaggagctgagtctctgccgtgtattgactgtcttgtttcctgcttgacttccttgtttcctgtccccacctgcctcaccctaactcttcattcaagttgcaaatgtatattctcctctgaggaggcttgcttttgaggaagacagtagaaattccccaaattcccttttcagacccatcctgcaaaatatgcctaccctagagtgtaataatccgcacttttatttttgcttactctttctagtattttctggttaaattagaagcagtagaacatagtggctaataacatgagctgagaaagggtgaatctagacttttcaatttactagttgtgtaactttaaaccaattatttactccatgccttacacacttcatcaataaaatggaagtaatggtgtcttcctca

SEQ ID NO: 418562 - DNA, 1214 bp, Homo sapiens
agcgggggtacgcgggcacgcgggactcccagctgtcaatcaggcgcgggctgagctctacgaggcggagcggcggcggtggcgacggcgatgggaccccagcgagagatctgcagctaggctggctgcacttgctccacgggtcaggggatcggagggggattgaagaatgcgccattaaaaggaaagatcaaggagtaaaccagaagaagaagaaaaagaggacttcaaagcactggccctgtggaaaagtggctataatgggaacctcagtctcattatctcagaatcattttatgggagagaaaagcagcatgaaaaattgaatgatatttcaaagaaaataaatagaacagggcctgtgcctggcctcacaactgactcacacatagtgtcacaggaaaacactcatatttgttgcctctcttctctcaaggagaccttgaagacaaagaatataatgtctgtaatgttcttagagtttcatgaggcataaagatttatttctgcttcaaggctatgaacatttataaaggaaaataaaaagtaactgcatatattacacagaaatttaaatttccaacacattgatactacagtctattggcacacatagtgatatcacaatagcacattcatgagcttgtttccctaatacaggaattattcaaggaattctcagcatttgtactccctttacctcttgatgatgcccattttgttatgtttattgcttcatgagtgtgtctccttgtaacccaagagtccattgagggcagacctggctccactcatcttcacaactattatttatctcacaggtgcctggcacgtagtgctttaaaaacactgaaggaaggggaggatgaaaaatggaggactactcaggccttcatccacaccaacccacgtagaactctgcaggaagtttcaaagtactggagattaaagtggtcaacagtacagaaaatgtccctgcccacatgtagcttacactctatcatgtatatggtctatcagaccataagtaaataaaccacacatagaatatcagatagtaacaagtgctaggaagagaaacaaacctagacaaggggatagaaagtaatggaacgctgatatttagatatattgattatagaaagcctctcagaagaatttgatagggagtggcagcataatttttttccctcctcatgtctctgggttatgat

SEQ ID NO: 418563 - DNA, 2220 bp, Homo sapiens
  misc_feature (21)..(21): n is a, c, g, or t
ccacgctggtacggccgcgtnttatatgtgacaggcgtcggaaaagggaggcagaggaggcggaggcagaggcagaggcagagcccggtgccgagaccaagcgacagaccggcggggctgggcctcgcaaagccggctcggcgagctctcccgacacccgagccggggaggaaaagcagcgactcctcgctcgcatccccgggagccgcactccagactggcccggtagtcaggggctcaggagcagatcccgaggcaggctttgctcagcctccgacgagggctggccctttggaaggcgccttcaacagccggaccagacaggccaccatgaccgagaattccacgtccgcccctgcggccaagcccaagcgggccaaggcctccaagaagtccacagaccaccccaagtattcagacatgatcgtggctgccatccaggccgagaagaaccgcgctggctcctcgcgccagtccattcagaagtatatcaagagccactacaaggtgggtgagaacgctgactcgcagatcaagttgtccatcaagcgcctggtcaccaccggtgtcctcaagcagaccaaaggggtgggggcctcggggtccttccggctagccaagagcgacgaacccaagaagtcagtggccttcaagaagaccaagaaggaaatcaagaaggtagccacgccaaagaaggcatccaagcccaagaaggctgcctccaaagccccaaccaagaaacccaaagccaccccggtcaagaaggccaagaagaagctggctgccacgcccaagaaagccaaaaaacccaagactgtcaaagccaagccggtcaaggcatccaagcccaaaaaggccaaaccagtgaaacccaaagcaaagtccagtgccaagagggccggcaagaagaagtgacaatgaagtcttttcttgcggacactccctcctgtctcctattttctgtaaataattttctccttttttctctcttgatgctcaccaccaccttttgcccccttctgttctgactttataagagacaggatttggattcttcagaaattacagaataattcatttttccttaaccagttgtgcaaggacagcaacaaccaatctaatgatgagaatgtacttatattttgttttgctattaacctacttacggggttagggatttgcggggggggcttgtgtgttttgttggcttgtttgccatgaaggtagatgtgggtggggagaagacacaaggcagtttgttctggctagatgagagggaacccaggaattgtgaggttagcaggaatatctttagggtgagtgagttttccttgagttgggcacccgttgtgagagtttcagaacctttggccagcaggagagaggtggtagggagcagccagccggcaaaggaaggaggtggaaaaaaaccgccaccgggctgacttccacctcccagtggtgagcagtgggggcccaaacccagtttccttctcatttttgttagtttgccctttcggcctccctattttcttagggaaggggagtggggtccaagtgacagctggatgggagaagccatagtttctcccagtcagctaggatgtagccattgggggatctttgtggcttcagcaaattctcttgttaaaccggagtgaaaacttcaggggaagggtggggagtcagccaagtgcctcagtgtgccctgttgaaacttaggtttttccacgcaatcgatggattgtgtcctaggaagacttttcttttcctctggatttttgttcctcctgtacaagaggtgtctttgcttggtttggtggggctgcggccacttaaaacctcccgatctctttttgagtcctttattataagtagttgtagctgcgggagggggagggggagtgggcgggcagtggatagtaagacttactgcagtcgatttgggatttgctaagtagttttacagagctagatctgtgtgcatgtgtgtgtttgtgtatatatacatatctagggctagtacttagtttcacacccgggagctgggagaaaaaacctgtacagttgtctttctcttatttttaataaaatagaaaaaatcgcgcacttgcgcgtcccccccccacccccttttttaaacaagtgttacttgtgccgggaaaattttgctgtctttgtaattttaaaactttaaaataaattggaaaagggagaaac

SEQ ID NO: 418564 - DNA, 2398 bp, Homo sapiens
  misc_feature (21)..(21): n is a, c, g, or t
ccacgctggtacggccgcgtnttatatgtgacaggcgtcggaaaagggaggcagaggaggcggaggcagaggcagaggcagagcccggtgccgagaccaagcgacagaccggcggggctgggcctcgcaaagccggctcggcgagctctcccgacacccgagccggggaggaaaagcagcgactcctcgctcgcatccccgggagccgcactccagactggcccggtagtcaggggctcaggagcagatcccgaggcaggctttgctcagcctccgacgagggctggccctttggaaggcgccttcaacagccggaccagacaggccaccatgaccgagaattccacgtccgcccctgcggccaagcccaagcgggccaaggcctccaagaagtccacagaccaccccaagtattcagacatgatcgtggctgccatccaggccgagaagaaccgcgctggctcctcgcgccagtccattcagaagtatatcaagagccactacaaggtgggtgagaacgctgactcgcagatcaagttgtccatcaagcgcctggtcaccaccggtgtcctcaagcagaccaaaggggtgggggcctcggggtccttccggctagccaagagcgacgaacccaagaagtcagtggccttcaagaagaccaagaaggaaatcaagaaggtagccacgccaaagaaggcatccaagcccaagaaggctgcctccaaagccccaaccaagaaacccaaagccaccccggtcaagaaggccaagaagaagctggctgccacgcccaagaaagccaaaaaacccaagactgtcaaagccaagccggtcaaggcatccaagcccaaaaaggccaaaccagtgaaacccaaagcaaagtccagtgccaagagggccggcaagaagaagtgacaatgaagtcttttcttgcggacactccctcctgtctcctattttctgtaaataattttctccttttttctctcttgatgctcaccaccaccttttgcccccttctgttctgactttataagagacaggatttggattcttcagaaattacagaataattcatttttccttaaccagttgtgcaaggacagcaacaaccaatctaatgatgagaatgtacttatattttgttttgctattaacctacttacggggttagggatttgcggggggggcttgtgtgttttgttggcttgtttgccatgaaggtagatgtgggtggggagaagacacaaggcagtttgttctggctagatgagagggaacccaggaattgtgaggttagcaggaatatctttagggtgagtgagttttccttgagttgggcacccgttgtgagagtttcagaacctttggccagcaggagagaggtggtagggagcagccagccggcaaaggaaggaggtggaaaaaaaccgccaccgggctgacttccacctcccagtggtgagcagtgggggcccaaacccagtttccttctcatttttgttagtttgccctttcggcctccctattttcttagggaaggggagtggggtccaagtgacagctggatgggagaagccatagtttctcccagtcagctaggatgtagccattgggggatctttgtggcttcagcaaattctcttgttaaaccggagtgaaaacttcaggggaagggtggggagtcagccaagtgcctcagtgtgccctgttgaaacttaggtttttccacgcaatcgatggattgtgtcctaggaagacttttcttttcctctggatttttgttcctcctgtacaagaggtgtctttgcttggtttggtggggctgcggccacttaaaacctcccgatctctttttgagtcctttattataagtagttgtagctgcgggagggggagggggagtgggcgggcagtggatagtaagacttactgcagtcgatttgggatttgctaagtagttttacagagctagatctgtgtgcatgtgtgtgtttgtgtatatatacatatctagggctagtacttagtttcacacccgggagctgggagaaaaaacctgtacagttgtctttctcttatttttaataaaatagaaaaaatcgcgcacttgcgcgtcccccccccacctccagataaagcttcagttatatctcaaaaaaaaaaaaaaaaaaaaaaaaaaaaaaaaaaaaaaaaaacaaaaaaaaaaaaaaaaaaaaaaaaaaaaaaaaaaaaaaaaaaacacccaaaacaaaacaacacaacacaaacccaccaaacacccaacacaacacaaacccccaaccaccccccaaaaacaaacacaactcaaaaaccccaaccatctcccaacctttctcttctaaccccttttattatattatctaaactcctttca

SEQ ID NO: 418565 - DNA, 2122 bp, Homo sapiens
  misc_feature (21)..(21): n is a, c, g, or t
ccacgctggtacggccgcgtnttatatgtgacaggcgtcggaaaagggaggcagaggaggcggaggcagaggcagaggcagagcccggtgccgagaccaagcgacagaccggcggggctgggcctcgcaaagccggctcggcgagctctcccgacacccgagccggggaggaaaagcagcgactcctcgctcgcatccccgggagccgcactccagactggcccggtagtcaggggctcaggagcagatcccgaggcaggctttgctcagcctccgacgagggctggccctttggaaggcgccttcaacagccggaccagacaggccaccatgaccgagaattccacgtccgcccctgcggccaagcccaagcgggccaaggcctccaagaagtccacagaccaccccaagtattcagacatgatcgtggctgccatccaggccgagaagaaccgcgctggctcctcgcgccagtccattcagaagtatatcaagagccactacaaggtgggtgagaacgctgactcgcagatcaagttgtccatcaagcgcctggtcaccaccggtgtcctcaagcagaccaaaggggtgggggcctcggggtccttccggctagccaagagcgacgaacccaagaagtcagtggccttcaagaagaccaagaaggaaatcaagaaggtagccacgccaaagaaggcatccaagcccaagaaggctgcctccaaagccccaaccaagaaacccaaagccaccccggtcaagaaggccaagaagaagctggctgccacgcccaagaaagccaaaaaacccaagactgtcaaagccaagccggtcaaggcatccaagcccaaaaaggccaaaccagtgaaacccaaagcaaagtccagtgccaagagggccggcaagaagaagtgacaatgaagtcttttcttgcggacactccctcctgtctcctattttctgtaaataattttctccttttttctctcttgatgctcaccaccaccttttgcccccttctgttctgactttataagagacaggatttggattcttcagaaattacagaataattcatttttccttaaccagttgtgcaaggacagcaacaaccaatctaatgatgagaatgtacttatattttgttttgctattaacctacttacggggttagggatttgcggggggggcttgtgtgttttgttggcttgtttgccatgaaggtagatgtgggtggggagaagacacaaggcagtttgttctggctagatgagagggaacccaggaattgtgaggttagcaggaatatctttagggtgagtgagttttccttgagttgggcacccgttgtgagagtttcagaacctttggccagcaggagagaggtggtagggagcagccagccggcaaaggaaggaggtggaaaaaaaccgccaccgggctgacttccacctcccagtggtgagcagtgggggcccaaacccagtttccttctcatttttgttagtttgccctttcggcctccctattttcttagggaaggggagtggggtccaagtgacagctggatgggagaagccatagtttctcccagtcagctaggatgtagccattgggggatctttgtggcttcagcaaattctcttgttaaaccggagtgaaaacttcaggggaagggtggggagtcagccaagtgcctcagtgtgccctgttgaaacttaggtttttccacgcaatcgatggattgtgtcctaggaagacttttcttttcctctggatttttgttcctcctgtacaagaggtgtctttgcttggtttggtggggctgcggccacttaaaacctcccgatctctttttgagtcctttattataagtagttgtagctgcgggagggggagggggagtgggcgggcagtggatagtaagacttactgcagtcgatttgggatttgctaagtagttttacagagctagatctgtgtgcatgtgtgtgtttgtgtatatatacatatctagggctagtacttagtttcacacccgggagctgggagaaaaaacctgtacatgcaagggtaatgcaagcccggtacatgcaagacatgcaagcccggtacatgcaag

SEQ ID NO: 418566 - DNA, 2166 bp, Homo sapiens
  misc_feature (21)..(21): n is a, c, g, or t
ccacgctggtacggccgcgtnttatatgtgacaggcgtcggaaaagggaggcagaggaggcggaggcagaggcagaggcagagcccggtgccgagaccaagcgacagaccggcggggctgggcctcgcaaagccggctcggcgagctctcccgacacccgagccggggaggaaaagcagcgactcctcgctcgcatccccgggagccgcactccagactggcccggtagtcaggggctcaggagcagatcccgaggcaggctttgctcagcctccgacgagggctggccctttggaaggcgccttcaacagccggaccagacaggccaccatgaccgagaattccacgtccgcccctgcggccaagcccaagcgggccaaggcctccaagaagtccacagaccaccccaagtattcagacatgatcgtggctgccatccaggccgagaagaaccgcgctggctcctcgcgccagtccattcagaagtatatcaagagccactacaaggtgggtgagaacgctgactcgcagatcaagttgtccatcaagcgcctggtcaccaccggtgtcctcaagcagaccaaaggggtgggggcctcggggtccttccggctagccaagagcgacgaacccaagaagtcagtggccttcaagaagaccaagaaggaaatcaagaaggtagccacgccaaagaaggcatccaagcccaagaaggctgcctccaaagccccaaccaagaaacccaaagccaccccggtcaagaaggccaagaagaagctggctgccacgcccaagaaagccaaaaaacccaagactgtcaaagccaagccggtcaaggcatccaagcccaaaaaggccaaaccagtgaaacccaaagcaaagtccagtgccaagagggccggcaagaagaagtgacaatgaagtcttttcttgcggacactccctcctgtctcctattttctgtaaataattttctccttttttctctcttgatgctcaccaccaccttttgcccccttctgttctgactttataagagacaggatttggattcttcagaaattacagaataattcatttttccttaaccagttgtgcaaggacagcaacaaccaatctaatgatgagaatgtacttatattttgttttgctattaacctacttacggggttagggatttgcggggggggcttgtgtgttttgttggcttgtttgccatgaaggtagatgtgggtggggagaagacacaaggcagtttgttctggctagatgagagggaacccaggaattgtgaggttagcaggaatatctttagggtgagtgagttttccttgagttgggcacccgttgtgagagtttcagaacctttggccagcaggagagaggtggtagggagcagccagccggcaaaggaaggaggtggaaaaaccagtttccttctcatttttgttagtttgccctttcggcctccctattttcttagggaaggggagtggggtccaagtgacagctggatgggagaagccatagtttctcccagtcagctaggatgtagccattgggggatctttgtggcttcagcaaattctcttgttaaaccggagtgaaaacttcaggggaagggtggggagtcagccaagtgcctcagtgtgccctgttgaaacttaggtttttccacgcaatcgatggattgtgtcctaggaagacttttcttttcctctggatttttgttcctcctgtacaagaggtgtctttgcttggtttggtggggctgcggccacttaaaacctcccgatctctttttgagtcctttattataagtagttgtagctgcgggagggggagggggagtgggcgggcagtggatagtaagacttactgcagtcgatttgggatttgctaagtagttttacagagctagatctgtgtgcatgtgtgtgtttgtgtatatatacatatctagggctagtacttagtttcacacccgggagctgggagaaaaaacctgtacagttgtctttctcttatttttaataaaatagaaaaaatcgcgcacttgcgcgtcccccccccacccccttttttaaacaagtgttacttgtgccgggaaaattttgctgtctttgtaattttaaaactttaaaataaattggaaaagggagaaac

SEQ ID NO: 418567 - DNA, 2286 bp, Homo sapiens
aggtcggatttgctcggcggaagaaacacagatggcggcggcgcagcgccattccgggccgggagcaggcagccagcagccctgtcctcaccgcggtccgcccgccgccgctaaatacccggatgcgccgcccaagcgccagacgcggagctgggaaaagggaggcagaggaggcggaggcggaggcagaggcagaggcagagcccggtgccgagaccaagcgacagaccggcggggctgggcctcgcaaagccggctcggcgagctctcccgacacccgagccggggagggtagtcaggggctcaggagcagatcccgaggcaggctttgctcagcctccgacgagggctggccctttggaaggcgccttcaacagccggaccagacaggccaccatgaccgagaattccacgtccgcccctgcggccaagcccaagcgggccaaggcctccaagaagtccacagaccaccccaagtattcagacatgatcgtggctgccatccaggccgagaagaaccgcgctggctcctcgcgccagtccattcagaagtatatcaagagccactacaaggtgggtgagaacgctgactcgcagatcaagttgtccatcaagcgcctggtcaccaccggtgtcctcaagcagaccaaaggggtgggggcctcggggtccttccggctagccaagagcgacgaacccaagaagtcagtggccttcaagaagaccaagaaggaaatcaagaaggtagccacgccaaagaaggcatccaagcccaagaaggctgcctccaaagccccaaccaagaaacccaaagccaccccggtcaagaaggccaagaagaagctggctgccacgcccaagaaagccaaaaaacccaagactgtcaaagccaagccggtcaaggcatccaagcccaaaaaggccaaaccagtgaaacccaaagcaaagtccagtgccaagagggccggcaagaagaagtgacaatgaagtcttttcttgcggacactccctcctgtctcctattttctgtaaataattttctccttttttctctcttgatgctcaccaccaccttttgcccccttctgttctgactttataagagacaggatttggattcttcagaaattacagaataattcatttttccttaaccagttgtgcaaggacagcaacaaccaatctaatgatgagaatgtacttatattttgttttgctattaacctacttacggggttagggatttgcggggggggcttgtgtgttttgttggcttgtttgccatgaaggtagatgtgggtggggagaagacacaaggcagtttgttctggctagatgagagggaacccaggaattgtgaggttagcaggaatatctttagggtgagtgagttttccttgagttgggcacccgttgtgagagtttcagaacctttggccagcaggagagaggtggtagggagcagccagccggcaaaggaaggaggtggaaaaaaaccgccaccgggctgacttccacctcccagtggtgagcagtgggggcccaaacccagtttccttctcatttttgttagtttgccctttcggcctccctattttcttagggaaggggagtggggtccaagtgacagctggatgggagaagccatagtttctcccagtcagctaggatgtagccattgggggatctttgtggcttcagcaaattctcttgttaaaccggagtgaaaacttcaggggaagggtggggagtcagccaagtgcctcagtgtgccctgttgaaacttaggtttttccacgcaatcgatggattgtgtcctaggaagacttttcttttcctctggatttttgttcctcctgtacaagaggtgtctttgcttggtttggtggggctgcggccacttaaaacctcccgatctctttttgagtcctttattataagtagttgtagctgcgggagggggagggggagtgggcgggcagtggatagtaagacttactgcagtcgatttgggatttgctaagtagttttacagagctagatctgtgtgcatgtgtgtgtttgtgtatatatacatatctagggctagtacttagtttcacacccgggagctgggagaaaaaacctgtacagttgtctttctcttatttttaataaaatagaaaaaatcgcgcacttgcgcgtcccccccccacccccttttttaaacaagtgttacttgtgccgggaaaattttgctgtctttgtaattttaaaactttaaaataaattggaaaagggagaaac

SEQ ID NO: 418568 - DNA, 1965 bp, Homo sapiens
cgagctcggtaccccctggctgctcaggctggccctttggaaggcgccttcaacagccggaccagacaggccaccatgaccgagaattccacgtccgcccctgcggccaagcccaagcgggccaaggcctccaagaagtccacagaccaccccaagtattcagacatgatcgtggctgccatccaggccgagaagaaccgcgctggctcctcgcgccagtccattcagaagtatatcaagagccactacaaggtgggtgagaacgctgactcgcagatcaagttgtccatcaagcgcctggtcaccaccggtgtcctcaagcagaccaaaggggtgggggcctcggggtccttccggctagccaagagcgacgaacccaagaagtcagtggccttcaagaagaccaagaaggaaatcaagaaggtagccacgccaaagaaggcatccaagcccaagaaggctgcctccaaagccccaaccaagaaacccaaagccaccccggtcaagaaggccaagaagaagctggctgccacgcccaagaaagccaaaaaacccaagactgtcaaagccaagccggtcaaggcatccaagcccaaaaaggccaaaccagtgaaacccaaagcaaagtccagtgccaagagggccggcaagaagaagtgacaatgaagtcttttcttgcggacactccctcctgtctcctattttctgtaaataattttctccttttttctctcttgatgctcaccaccaccttttgcccccttctgttctgactttataagagacaggatttggattcttcagaaattacagaataattcatttttccttaaccagttgtgcaaggacagcaacaaccaatctaatgatgagaatgtacttatattttgttttgctattaacctacttacggggttagggatttgcggggggggcttgtgtgttttgttggcttgtttgccatgaaggtagatgtgggtggggagaagacacaaggcagtttgttctggctagatgagagggaacccaggaattgtgaggttagcaggaatatctttagggtgagtgagttttccttgagttgggcacccgttgtgagagtttcagaacctttggccagcaggagagaggtggtagggagcagccagccggcaaaggaaggaggtggaaaaaaaccgccaccgggctgacttccacctcccagtggtgagcagtgggggcccaaacccagtttccttctcatttttgttagtttgccctttcggcctccctattttcttagggaaggggagtggggtccaagtgacagctggatgggagaagccatagtttctcccagtcagctaggatgtagccattgggggatctttgtggcttcagcaaattctcttgttaaaccggagtgaaaacttcaggggaagggtggggagtcagccaagtgcctcagtgtgccctgttgaaacttaggtttttccacgcaatcgatggattgtgtcctaggaagacttttcttttcctctggatttttgttcctcctgtacaagaggtgtctttgcttggtttggtggggctgcggccacttaaaacctcccgatctctttttgagtcctttattataagtagttgtagctgcgggagggggagggggagtgggcgggcagtggatagtaagacttactgcagtcgatttgggatttgctaagtagttttacagagctagatctgtgtgcatgtgtgtgtttgtgtatatatacatatctagggctagtacttagtttcacacccgggagctgggagaaaaaacctgtacagttgtctttctcttatttttaataaaatagaaaaaatcgcgcacttgcgcgtcccccccccacccccttttttaaacaagtgttacttgtgccgggaaaattttgctgtctttgtaattttaaaactttaaaataaattggaaaagggagaaac

SEQ ID NO: 418569 - DNA, 1264 bp, Homo sapiens
  misc_feature (21)..(21): n is a, c, g, or t
ccacgctggtacggccgcgtnttatatgtgacaggcgtcggaaaagggaggcagaggaggcggaggcagaggcagaggcagagcccggtgccgagaccaagcgacagaccggcggggctgggcctcgcaaagccggctcggcgagctctcccgacacccgagccggggaggaaaagcagcgactcctcgctcgcatccccgggagccgcactccagactggcccggtagtcaggggctcaggagcagatcccgaggcaggctttgctcagcctccgacgagggctggccctttggaaggcgccttcaacagccggaccagacaggccaccatgaccgagaattccacgtccgcccctgcggccaagcccaagcgggccaaggcctccaagaagtccacagaccaccccaagtattcagacatgatcgtggctgccatccaggccgagaagaaccgcgctggctcctcgcgccagtccattcagaagtatatcaagagccactacaaggtgggtgagaacgctgactcgcagatcaagttgtccatcaagcgcctggtcaccaccggtgtcctcaagcagaccaaaggggtgggggcctcggggtccttccggctagccaagagcgacgaacccaagaagtcagtggccttcaagaagaccaagaaggaaatcaagaaggtagccacgccaaagaaggcatccaagcccaagaaggctgcctccaaagccccaaccaagaaacccaaagccaccccggtcaagaaggccaagaagaagctggctgccacgcccaagaaagccaaaaaacccaagactgtcaaagccaagccggtcaaggcatccaagcccaaaaaggccaaaccagtgaaacccaaagcaaagtccagtgccaagagggccggcaagaagaagtgacaatgaagtcttttcttgcggacactccctcctgtctcctattttctgtaaataattttctccttttttctctcttgatgctcaccaccaccttttgcccccttctgttctgactttataagagacaggatttggattcactccctcctgtctcctattttctgtaaataattttctccttttttctctcttgatgctcaccaccaccttttgcccccttctgttctgactttataagagacaggatttggattcactccctcctgtctcctattttctgtaaataattttctccttttttctctcttgatgctcaccaccaccttttgcccccttctgtcgtcttctc

SEQ ID NO: 418570 - DNA, 1106 bp, Homo sapiens
  misc_feature (21)..(21): n is a, c, g, or t
ccacgctggtacggccgcgtnttatatgtgacaggcgtcggaaaagggaggcagaggaggcggaggcagaggcagaggcagagcccggtgccgagaccaagcgacagaccggcggggctgggcctcgcaaagccggctcggcgagctctcccgacacccgagccggggaggaaaagcagcgactcctcgctcgcatccccgggagccgcactccagactggcccggtagtcaggggctcaggagcagatcccgaggcaggctttgctcagcctccgacgagggctggccctttggaaggcgccttcaacagccggaccagacaggccaccatgaccgagaattccacgtccgcccctgcggccaagcccaagcgggccaaggcctccaagaagtccacagaccaccccaagtattcagacatgatcgtggctgccatccaggccgagaagaaccgcgctggctcctcgcgccagtccattcagaagtatatcaagagccactacaaggtgggtgagaacgctgactcgcagatcaagttgtccatcaagcgcctggtcaccaccggtgtcctcaagcagaccaaaggggtgggggcctcggggtccttccggctagccaagagcgacgaacccaagaagtcagtggccttcaagaagaccaagaaggaaatcaagaaggtagccacgccaaagaaggcatccaagcccaagaaggctgcctccaaagccccaaccaagaaacccaaagccaccccggtcaagaaggccaagaagaagctggctgccacgcccaagaaagccaaaaaacccaagactgtcaaagccaagccggtcaaggcatccaagcccaaaaaggccaaaccagtgaaacccaaagcaaagtccagtgccaagagggccggcaagaagaagtgacaatgaagtcttttcttgcggacactccctcctgtctcctattttctgtaaataattttctccttttttctctcttgatgctcaccaccaccttttgcccccttcctccttagagtgggaaagaaaaaagggctcaagtagccaaaggagctgagcagcagctctggggtctgggagttgtggcctcaact

SEQ ID NO: 418571 - DNA, 2644 bp, Homo sapiens
  misc_feature (21)..(21): n is a, c, g, or t
  misc_feature (2644)..(2644): n is a, c, g, or t
ccacgctggtacggccgcgtnttatatgtgacaggcgtcggaaaagggaggcagaggaggcggaggcagaggcagaggcagagcccggtgccgagaccaagcgacagaccggcggggctgggcctcgcaaagccggctcggcgagctctcccgacacccgagccggggaggaaaagcagcgactcctcgctcgcatccccgggagccgcactccagactggcccggtagtcaggggctcaggagcagatcccgaggcaggctttgctcagcctccgacgagggctggccctttggaaggcgccttcaacagccggaccagacaggccaccatgaccgagaattccacgtccgcccctgcggccaagcccaagcgggccaaggcctccaagaagtccacagaccaccccaagtattcagacatgatcgtggctgccatccaggccgagaagaaccgcgctggctcctcgcgccagtccattcagaagtatatcaagagccactacaaggtgggtgagaacgctgactcgcagatcaagttgtccatcaagcgcctggtcaccaccggtgtcctcaagcagaccaaaggggtgggggcctcggggtccttccggctagccaagagcgacgaacccaagaagtcagtggccttcaagaagaccaagaaggaaatcaagaaggtagccacgccaaagaaggcatccaagcccaagaaggctgcctccaaagccccaaccaagaaacccaaagccaccccggtcaagaaggccaagaagaagctggctgccacgcccaagaaagccaaaaaacccaagactgtcaaagccaagccggtcaaggcatccaagcccaaaaaggccaaaccagtgaaacccaaagcaaagtccagtgccaagagggccggcaagaagaagtgacaatgaagtcttttcttgcggacactccctcctgtctcctattttctgtaaataattttctccttttttctctcttgatgctcaccaccaccttttgcccccttctgttctgactttataagagacaggatttggattcttcagaaattacagaataattcatttttccttaaccagttgtgcaaggacagcaacaaccaatctaatgatgagaatgtacttatattttgttttgctattaacctacttacggggttagggatttgcggggggggcttgtgtgttttgttggcttgtttgccatgaaggtagatgtgggtggggagaagacacaaggcagtttgttctggctagatgagagggaacccaggaattgtgaggttagcaggaatatctttagggtgagtgagttttccttgagttgggcacccgttgtgagagtttcagaacctttggccagcaggagagaggtggtagggagcagccagccggcaaaggaaggaggtggaaaaaaaccgccaccgggctgacttccacctcccagtggtgagcagtgggggcccaaacccagtttccttctcatttttgttagtttgccctttcggcctccctattttcttagggaaggggagtggggtccaagtgacagctggatgggagaagccatagtttctcccagtcagctaggatgtagccattgggggatctttgtggcttcagcaaattctcttgttaaaccggagtgaaaacttcaggggaagggtggggagtcagccaagtgcctcagtgtgccctgttgaaacttaggtttttccacgcaatcgatggattgtgtcctaggaagacttttcttttcctctggatttttgttcctcctgtacaagaggtgtctttgcttggtttggtggggctgcggccacttaaaacctcccgatctctttttgagtcctttattataagtagttgtagctgcgggagggggagggggagtgggcgggcagtggatagtaagacttactgcagtcgatttgggatttgctaagtagttttacagagctagatctgtgtgcatgtgtgtgtttgtgtatatatacatatctagggctagtacttagtttcacacccgggagctgggagaaaaaacctgtacagttgtctttctcttatttttaataaaatagaaaaaatcgcgcacttgcgcgtcccccccccacccccttttttaaacaagtgttacttgtgccgggaaaattttgctgtctttgtaattttaaaactttaaaataaattggaaaagggagaaacaaaaaaaaaaaaaaaaaaaaaaaaacaaaaaaaaaaaaaaaaaaaaaaaaagggggggggggggcgcaaaaaaatttatccccggggggggcgcccatttaggggcgacaccgagcagttttttgtgtaaaagaagggggccccactaagagagaggagcgacgtaaaaaaagagagagagagagagggagacgcggcgccggttataaaacaacgggtgcgtgggagggggaaaacagcggccgacgggggacaacttggggggaagggacccccacacgcggggcgggggggcgaacctgtggcgaccacatcacccacgagtatttgagcgcccagggggaacaaaacaactgggggggttatggggtaaaccaacgcaatagctctgcggagaattgggtcacggactgattggatattn

SEQ ID NO: 418572 - DNA, 2340 bp, Homo sapiens
aggtcggatttgctcggcggaagaaacacagatggcggcggcgcagcgccattccgggccgggagcaggcagccagcagccctgtcctcaccgcggtccgcccgccgccgctaaatacccggatgcgccgcccaagcgccagacgcggagctgggaaaagggaggcagaggaggcggaggcggaggcagaggcagaggcagagcccggtgccgagaccaagcgacagaccggcggggctgggcctcgcaaagccggctcggcgagctctcccgacacccgagccggggaggaaaagcagcgactcctcgctcgcatccccgggagccgcactccagactggcccggtagtcaggggctcaggagcagatcccgaggcaggctttgctcagcctccgacgagggctggccctttggaaggcgccttcaacagccggaccagacaggccaccatgaccgagaattccacgtccgcccctgcggccaagcccaagcgggccaaggcctccaagaagtccacagaccaccccaagtattcagacatgatcgtggctgccatccaggccgagaagaaccgcgctggctcctcgcgccagtccattcagaagtatatcaagagccactacaaggtgggtgagaacgctgactcgcagatcaagttgtccatcaagcgcctggtcaccaccggtgtcctcaagcagaccaaaggggtgggggcctcggggtccttccggctagccaagagcgacgaacccaagaagtcagtggccttcaagaagaccaagaaggaaatcaagaaggtagccacgccaaagaaggcatccaagcccaagaaggctgcctccaaagccccaaccaagaaacccaaagccaccccggtcaagaaggccaagaagaagctggctgccacgcccaagaaagccaaaaaacccaagactgtcaaagccaagccggtcaaggcatccaagcccaaaaaggccaaaccagtgaaacccaaagcaaagtccagtgccaagagggccggcaagaagaagtgacaatgaagtcttttcttgcggacactccctcctgtctcctattttctgtaaataattttctccttttttctctcttgatgctcaccaccaccttttgcccccttctgttctgactttataagagacaggatttggattcttcagaaattacagaataattcatttttccttaaccagttgtgcaaggacagcaacaaccaatctaatgatgagaatgtacttatattttgttttgctattaacctacttacggggttagggatttgcggggggggcttgtgtgttttgttggcttgtttgccatgaaggtagatgtgggtggggagaagacacaaggcagtttgttctggctagatgagagggaacccaggaattgtgaggttagcaggaatatctttagggtgagtgagttttccttgagttgggcacccgttgtgagagtttcagaacctttggccagcaggagagaggtggtagggagcagccagccggcaaaggaaggaggtggaaaaaaaccgccaccgggctgacttccacctcccagtggtgagcagtgggggcccaaacccagtttccttctcatttttgttagtttgccctttcggcctccctattttcttagggaaggggagtggggtccaagtgacagctggatgggagaagccatagtttctcccagtcagctaggatgtagccattgggggatctttgtggcttcagcaaattctcttgttaaaccggagtgaaaacttcaggggaagggtggggagtcagccaagtgcctcagtgtgccctgttgaaacttaggtttttccacgcaatcgatggattgtgtcctaggaagacttttcttttcctctggatttttgttcctcctgtacaagaggtgtctttgcttggtttggtggggctgcggccacttaaaacctcccgatctctttttgagtcctttattataagtagttgtagctgcgggagggggagggggagtgggcgggcagtggatagtaagacttactgcagtcgatttgggatttgctaagtagttttacagagctagatctgtgtgcatgtgtgtgtttgtgtatatatacatatctagggctagtacttagtttcacacccgggagctgggagaaaaaacctgtacagttgtctttctcttatttttaataaaatagaaaaaatcgcgcacttgcgcgtcccccccccacccccttttttaaacaagtgttacttgtgccgggaaaattttgctgtctttgtaattttaaaactttaaaataaattggaaaagggagaaac

SEQ ID NO: 418573 - DNA, 1953 bp, Homo sapiens
  misc_feature (21)..(21): n is a, c, g, or t
ccacgctggtacggccgcgtnttatatgtgacaggcgtcggaaaagggaggcagaggaggcggaggcagaggcagaggcagagcccggtgccgagaccaagcgacagaccggcggggctgggcctcgcaaagccggctcggcgagctctcccgacacccgagccggggaggaaaagcagcgactcctcgctcgcatccccgggagccgcactccagactggcccggtagtcaggggctcaggagcagatcccgaggcaggctttgctcagcctccgacgagggctggccctttggaaggcgccttcaacagccggaccagacaggccaccatgaccgagaattccacgtccgcccctgcggccaagcccaagcgggccaaggcctccaagaagtccacagaccaccccaagtattcagacatgatcgtggctgccatccaggccgagaagaaccgcgctggctcctcgcgccagtccattcagaagtatatcaagagccactacaaggtgggtgagaacgctgactcgcagatcaagttgtccatcaagcgcctggtcaccaccggtgtcctcaagcagaccaaaggggtgggggcctcggggtccttccggctagccaagagcgacgaacccaagaagtcagtggccttcaagaagaccaagaaggaaatcaagaaggtagccacgccaaagaaggcatccaagcccaagaaggctgcctccaaagccccaaccaagaaacccaaagccaccccggtcaagaaggccaagaagaagctggctgccacgcccaagaaagccaaaaaacccaagactgtcaaagccaagccggtcaaggcatccaagcccaaaaaggccaaaccagtgaaacccaaagcaaagtccagtgccaagagggccggcaagaagaagtgacaatgaagtcttttcttgcggacactccctcctgtctcctattttctgtaaataattttctccttttttctctcttgatgctcaccaccaccttttgcccccttctgttctgactttataagagacaggatttggattcttcagaaattacagaataattcatttttccttaaccagttgtgcaaggacagcaacaaccaatctaatgatgagaatgtacttatattttgttttgctattaacctacttacggggttagggatttgcggggggggcttgtgtgttttgttggcttgtttgccatgaaggtagatgtgggtggggagaagacacaaggcagtttgttctggctagatgagagggaacccaggaattgtgaggttagcaggaatatctttagggtgagtgagttttccttgagttgggcacccgttgtgagagtttcagaacctttggccagcaggagagaggtggtagggagcagccagccggcaaaggaaggaggtggaaaaaaaccgccaccgggctgacttccacctcccagtggtgagcagtgggggcccaaacccagtttccttctcatttttgttagtttgccctttcggcctccctattttcttagggaaggggagtggggtccaagtgacagctggatgggagaagccatagtttctcccagtcagctaggatgtagccattgggggatctttgtggcttcagcaaattctcttgttaaaccggagtgaaaacttcaggggaagggtggggagtcagccaagtgcctcagtgtgccctgttgaaacttaggtttttccacgcaatcgatggattgtgtcctaggaagacttttcttttcctctggatttttgttcctcctgtacaagaggtgtctttgcttggtttggtggggctgcggccacttaaaacctcccgatctctttttgagtccccttttttaaacaagtgttacttgtgccgggaaaattttgctgtctttgtaattttaaaactttaaaataaattggaaaagggagaaac

SEQ ID NO: 418574 - DNA, 1899 bp, Homo sapiens
  misc_feature (21)..(21): n is a, c, g, or t
ccacgctggtacggccgcgtnttatatgtgacaggcgtcggaaaagggaggcagaggaggcggaggcagaggcagaggcagagcccggtgccgagaccaagcgacagaccggcggggctgggcctcgcaaagccggctcggcgagctctcccgacacccgagccggggaggaaaagcagcgactcctcgctcgcatccccgggagccgcactccagactggcccggtagtcaggggctcaggagcagatcccgaggcaggctttgctcagcctccgacgagggctggccctttggaaggcgccttcaacagccggaccagacaggccaccatgaccgagaattccacgtccgcccctgcggccaagcccaagcgggccaaggcctccaagaagtccacagaccaccccaagtattcagacatgatcgtggctgccatccaggccgagaagaaccgcgctggctcctcgcgccagtccattcagaagtatatcaagagccactacaaggtgggtgagaacgctgactcgcagatcaagttgtccatcaagcgcctggtcaccaccggtgtcctcaagcagaccaaaggggtgggggcctcggggtccttccggctagccaagagcgacgaacccaagaagtcagtggccttcaagaagaccaagaaggaaatcaagaaggtagccacgccaaagaaggcatccaagcccaagaaggctgcctccaaagccccaaccaagaaacccaaagccaccccggtcaagaaggccaagaagaagctggctgccacgcccaagaaagccaaaaaacccaagactgtcaaagccaagccggtcaaggcatccaagcccaaaaaggccaaaccagtgaaacccaaagcaaagtccagtgccaagagggccggcaagaagaagtgacaatgaagtcttttcttgcggacactccctcctgtctcctattttctgtaaataattttctccttttttctctcttgatgctcaccaccaccttttgcccccttctgttctgactttataagagacaggatttggattcttcagaaattacagaataattcatttttccttaaccagttgtgcaaggacagcaacaaccaatctaatgatgagaatgtacttatattttgttttgctattaacctacttacggggttagggatttgcggggggggcttgtgtgttttgttggcttgtttgccatgaaggtagatgtgggtggggagaagacacaaggcagtttgttctggctagatgagagggaacccaggaattgtgaggttagcaggaatatctttagggtgagtgagttttccttgagttgggcacccgttgtgagagtttcagaacctttggccagcaggagagaggtggtagggagcagccagccggcaaaggaaggaggtggaaaaaccagtttccttctcatttttgttagtttgccctttcggcctccctattttcttagggaaggggagtggggtccaagtgacagctggatgggagaagccatagtttctcccagtcagctaggatgtagccattgggggatctttgtggcttcagcaaattctcttgttaaaccggagtgaaaacttcaggggaagggtggggagtcagccaagtgcctcagtgtgccctgttgaaacttaggtttttccacgcaatcgatggattgtgtcctaggaagacttttcttttcctctggatttttgttcctcctgtacaagaggtgtctttgcttggtttggtggggctgcggccacttaaaacctcccgatctctttttgagtccccttttttaaacaagtgttacttgtgccgggaaaattttgctgtctttgtaattttaaaactttaaaataaattggaaaagggagaaac

SEQ ID NO: 418575 - DNA, 2166 bp, Homo sapiens
  misc_feature (21)..(21): n is a, c, g, or t
ccacgctggtacggccgcgtnttatatgtgacaggcgtcggaaaagggaggcagaggaggcggaggcagaggcagaggcagagcccggtgccgagaccaagcgacagaccggcggggctgggcctcgcaaagccggctcggcgagctctcccgacacccgagccggggaggaaaagcagcgactcctcgctcgcatccccgggagccgcactccagactggcccggtagtcaggggctcaggagcagatcccgaggcaggctttgctcagcctccgacgagggctggccctttggaaggcgccttcaacagccggaccagacaggccaccatgaccgagaattccacgtccgcccctgcggccaagcccaagcgggccaaggcctccaagaagtccacagaccaccccaagtattcagacatgatcgtggctgccatccaggccgagaagaaccgcgctggctcctcgcgccagtccattcagaagtatatcaagagccactacaaggtgggtgagaacgctgactcgcagatcaagttgtccatcaagcgcctggtcaccaccggtgtcctcaagcagaccaaaggggtgggggcctcggggtccttccggctagccaagagcgacgaacccaagaagtcagtggccttcaagaagaccaagaaggaaatcaagaaggtagccacgccaaagaaggcatccaagcccaagaaggctgcctccaaagccccaaccaagaaacccaaagccaccccggtcaagaaggccaagaagaagctggctgccacgcccaagaaagccaaaaaacccaagactgtcaaagccaagccggtcaaggcatccaagcccaaaaagaagtgacaatgaagtcttttcttgcggacactccctcctgtctcctattttctgtaaataattttctccttttttctctcttgatgctcaccaccaccttttgcccccttctgttctgactttataagagacaggatttggattcttcagaaattacagaataattcatttttccttaaccagttgtgcaaggacagcaacaaccaatctaatgatgagaatgtacttatattttgttttgctattaacctacttacggggttagggatttgcggggggggcttgtgtgttttgttggcttgtttgccatgaaggtagatgtgggtggggagaagacacaaggcagtttgttctggctagatgagagggaacccaggaattgtgaggttagcaggaatatctttagggtgagtgagttttccttgagttgggcacccgttgtgagagtttcagaacctttggccagcaggagagaggtggtagggagcagccagccggcaaaggaaggaggtggaaaaaaaccgccaccgggctgacttccacctcccagtggtgagcagtgggggcccaaacccagtttccttctcatttttgttagtttgccctttcggcctccctattttcttagggaaggggagtggggtccaagtgacagctggatgggagaagccatagtttctcccagtcagctaggatgtagccattgggggatctttgtggcttcagcaaattctcttgttaaaccggagtgaaaacttcaggggaagggtggggagtcagccaagtgcctcagtgtgccctgttgaaacttaggtttttccacgcaatcgatggattgtgtcctaggaagacttttcttttcctctggatttttgttcctcctgtacaagaggtgtctttgcttggtttggtggggctgcggccacttaaaacctcccgatctctttttgagtcctttattataagtagttgtagctgcgggagggggagggggagtgggcgggcagtggatagtaagacttactgcagtcgatttgggatttgctaagtagttttacagagctagatctgtgtgcatgtgtgtgtttgtgtatatatacatatctagggctagtacttagtttcacacccgggagctgggagaaaaaacctgtacagttgtctttctcttatttttaataaaatagaaaaaatcgcgcacttgcgcgtcccccccccacccccttttttaaacaagtgttacttgtgccgggaaaattttgctgtctttgtaattttaaaactttaaaataaattggaaaagggagaaac

SEQ ID NO: 418576 - DNA, 842 bp, Homo sapiens
  misc_feature (21)..(21): n is a, c, g, or t
ccacgctggtacggccgcgtnttatatgtgacaggcgtcggaaaagggaggcagaggaggcggaggcagaggcagaggcagagcccggtgccgagaccaagcgacagaccggcggggctgggcctcgcaaagccggctcggcgagctctcccgacacccgagccggggaggaaaagcagcgactcctcgctcgcatccccgggagccgcactccagactggcccggtagtcaggggctcaggagcagatcccgaggcaggctttgctcagcctccgacgagggctggccctttggaaggcgccttcaacagccggaccagacaggccaccatgaccgagaattccacgtccgcccctgcggccaagcccaagcgggccaaggcctccaagaagtccacagaccaccccaagtattcagacatgatcgtggctgccatccaggccgagaagaaccgcgctggctcctcgcgccagtccattcagaagtatatcaagagccactacaaggtgggtgagaacgctgactcgcagatcaagttgtccatcaagcgcctggtcaccaccggtgtcctcaagcagaccaaaggggtgggggcctcggggtccttccggctagccaagagcgacgaacccaagaagtcagtggccttcaagaagaccaagaaggaaatcaagaaggtagccacgccaaagaaggcatccaagcccaagaaggctgcctccaaagccccaaccaagaaacccaaagccaccccttttttaaacaagtgttacttgtgccgggaaaattttgctgtctttgtaattttaaaactttaaaataaattggaaaagggagaaac

SEQ ID NO: 418577 - DNA, 1592 bp, Homo sapiens
gcaccttgtgctatattagtacttctcagacaggaagaattttctttgctggtgtagctcgtccggttaccttcaggaagattggataaccaagaaatgactaatcaagagtctgccgtacatgtgaaaatgatgccagaattccagaaaagttcagttcgaatcaagaaccctacaagagtagaagaaattatctgtggtcttatcaaaggaggagctgccaaacttcagataataacggactttgatatgacactcagtagattttcatataaagggaaaagatgcccaacatgtcataatatcattgacaactgtaagctggttacagatgaatgtagaaaaaagttattgcaactaaaggaaaaatactacgctattgaagttgatcctgttcttactgtagaagagaagtacccttatatggtggaatggtatactaaatcacatggtttgcttgttcagcaagctttaccaaaagctaaacttaaagaaattgtggcagaatctgacgttatgctcaaagaaggatatgagaatttctttgataagctccaacaacatagcatccccgtgttcatattttcggctggaatcggcgatgtactagaggaagttattcgtcaagctggtgtttatcatcccaatgtcaaagttgtgtccaattttatggattttgatgaaactggggtgctcaaaggatttaaaggagaactaattcatgtatttaacaaacatgatggtgccttgaggaatacagaatatttcaatcaactaaaagacaatagtaacataattcttctgggagactcccaaggagacttaagaatggcagatggagtggccaatgttgagcacattctgaaaattggatatctaaatgatagagtggatgagcttttagaaaagtacatggactcttatgatattgttttagtacaagatgaatcattagaagtagccaactctattttacagaagattctataaacaagcattctccaagaagacctctctcctgtgggtgcaattgaactgttcatccgttcatcttgctgagagacttatttataatatatccttactctcgaagtgttccctttgtataactgaagtattttcagatatggtgaatgcattgactggaagctccttttctccacctctctcaacacactcctcaccgtatcttttaacccatttaaaaaaaaaaatcttaaagccaaaattagaaaaataactccctacttttccaaagtgaattttgtagtttaatgttatcatgcagcttttgaggagtcttttacactgggaaagtttgtagaaattttaaaataagttttatgaaatggtgaaataatatgcatgattttaagtattgccatttttgtaatttgggttattatgctgatggtatcaccatctcttgaaattgtgttaggtttggttattttgtctggggaaaaaatatttactggaaaagactagcagttagtgttggaaaaacctggtggtgtttacaatgttgctaatcattacaaaacattctatattgaagcactgataataaatatgaaatgcaaaaccttttt

SEQ ID NO: 418578 - DNA, 930 bp, Homo sapiens
gcaccttgtgctatattagtacttctcagacaggaagaattttctttgctggtgtagctcgtccggttaccttcaggaagattggataaccaagaaatgactaatcaagagtctgccgtacatgtgaaaatgatgccagaattccagaaaagttcagttcgaatcaagaaccctacaagagtagaagaaattatctgtggtcttatcaaaggaggagctgccaaacttcagataataacggactttgatatgacactcagtagattttcatataaagggaaaagatgcccaacatgtcataatatcattgacaactgtaagctggttacagatgaatgtagaaaaaagttattgcaactaaaggaaaaatactacgctattgaagttgatcctgttcttactgtagaagagaagtacccttatatggtggaatggtatactaaatcacatggtttgcttgttcagcaagctttaccaaaagctaaacttaaagaaattgtggcagaatctgacgttatgctcaaagaaggatatgagaatttctttgataagctccaacaacatagcatccccgtgttcatattttcggctggaatcggcgatgtactagaggaagttattcgtcaagctggtgtttatcatcccaatgtcaaagttgtgtccaattttatggattttgatgaaactgtaagaatatcaaatcgttcttcataattttaaaatctgaaaatattttaatcatgtaaatttatttattgttacttaatatatatcctatatccagaaattaggccaagccgataggcccactgtgggactccatccttctcagtgttaatatatccatattttaaaaacaatgtgcccttcttaaactttcattccccaagctatagactaataataaaagtagtaaaacttcttcttttt

SEQ ID NO: 418579 - DNA, 621 bp, Homo sapiens
gcaccttgtgctatattagtacttctcagacaggaagaattttctttgctggtgtagctcgtccggttaccttcaggaagattggataaccaagaaatgactaatcaagagtctgccgtacatgtgaaaatgatgccagaattccagaaaagttcagttcgaatcaagaaccctacaagagtagaagaaattatctgtggtcttatcaaaggaggagctgccaaacttcagataataacggactttgatatgacactcagtagattttcatataaagggaaaagatgcccaacatgtcatagtaagtgtgatatttgtaaacaaattcacaaaagcatgtcatcattattttaagatcctctttatattacctgtgagataactgggtttttaaaattcttcttggacattgacagtgaggagacctgctttttcttattatatttttgaggttttttttcccatattatataaatggttattttcatgtatggttttggtagcaaagggaatcagagactcctgaaatatttcttgccaaatatggtctattcattattcaagaaatatttaaataggttgtaaactttgggttaacctgaagaaacaccatttatcaaa

SEQ ID NO: 418580 - DNA, 475 bp, Homo sapiens
tatattaggcagtaggaggattaaaaaaaaataataaaacaacactgcagttacaactgatggcttattttttacctgtattgcaaacaaacagattaataaattatgcaagttagagcattgaataacaaaatgagctctaattatctaatctctctaacagtttaggaatccttttgttttgtttatttaaggtgaagtccagtaggaataaattaaaagtcctgcatttaagtctcaaattaaaaacaagaatttttttttaagtatatgaacaaaacgtggcttaatgtgtaaagaaaaggtatgaggatttaaactgagtctgaactcagagccagcaggtgatatggttacccaaaaatcgacctttggttgcattaatcaaaatgcagtgttccaggcagatcacactgaaagcactgtgtcggattctggaagaatgctgttaagagaaaccatgacaatagtgacc

SEQ ID NO: 418581 - DNA, 1103 bp, Homo sapiens
ctttaataaccagtttgttatctccatcttacagaagaaggatatgagaatttctttgataagctccaacaacatagcatccccgtgttcatattttcggctggaatcggcgatgtactagaggaagttattcgtcaagctggtgtttatcatcccaatgtcaaagttgtgtccaattttatggattttgatgaaactggggtgctcaaaggatttaaaggagaactaattcatgtatttaacaaacatgatggtgccttgaggaatacagaatatttcaatcaactaaaagacaatagtaacataattcttctgggagactcccaaggagacttaagaatggcagatggagtggccaatgttgagcacattctgaaaattggatatctaaatgatagagtggatgagcttttagaaaagtacatggactcttatgatattgttttagtacaagatgaatcattagaagtagccaactctattttacagaagattctataaacaagcattctccaagaagacctctctcctgtgggtgcaattgaactgttcatccgttcatcttgctgagagacttatttataatatatccttactctcgaagtgttccctttgtataactgaagtattttcagatatggtgaatgcattgactggaagctccttttctccacctctctcaacacactcctcaccgtatcttttaacccatttaaaaaaaaaaatcttaaagccaaaattagaaaaataactccctacttttccaaagtgaattttgtagtttaatgttatcatgcagcttttgaggagtcttttacactgggaaagtttgtagaaattttaaaataagttttatgaaatggtgaaataatatgcatgattttaagtattgccatttttgtaatttgggttattatgctgatggtatcaccatctcttgaaattgtgttaggtttggttattttgtctggggaaaaaatatttactggaaaagactagcagttagtgttggaaaaacctggtggtgtttacaatgttgctaatcattacaaaacattctatattgaagcactgataataaatatgaaatgcaaaaccttttt

SEQ ID NO: 418582 - DNA, 1502 bp, Homo sapiens
tatattaggcagtaggaggattaaaaaaaaataataaaacaacactgcagttacaactgatggcttattttttacctgtattgcaaacaaacagattaataaattatgcaagttagagcattgaataacaaaatgagctctaattatctaatctctctaacagtttaggaatccttttgttttgtttatttaaggtgaagtccagtaggaataaattaaaagtcctgcatttaagtctcaaattaaaaacaagaatttttttttaagtatatgaacaaaacgtggcttaatgtgtaaagaaaaggtatgaggatttaaactgagtctgaactcagagccagcaggtgatatggttacccaaaaatcgacctttggttgcattaatcaaaatgcagtgttccaggcagatcacactgaaagcactgtgtcggattagaaggatatgagaatttctttgataagctccaacaacatagcatccccgtgttcatattttcggctggaatcggcgatgtactagaggaagttattcgtcaagctggtgtttatcatcccaatgtcaaagttgtgtccaattttatggattttgatgaaactggggtgctcaaaggatttaaaggagaactaattcatgtatttaacaaacatgatggtgccttgaggaatacagaatatttcaatcaactaaaagacaatagtaacataattcttctgggagactcccaaggagacttaagaatggcagatggagtggccaatgttgagcacattctgaaaattggatatctaaatgatagagtggatgagcttttagaaaagtacatggactcttatgatattgttttagtacaagatgaatcattagaagtagccaactctattttacagaagattctataaacaagcattctccaagaagacctctctcctgtgggtgcaattgaactgttcatccgttcatcttgctgagagacttatttataatatatccttactctcgaagtgttccctttgtataactgaagtattttcagatatggtgaatgcattgactggaagctccttttctccacctctctcaacacactcctcaccgtatcttttaacccatttaaaaaaaaaaatcttaaagccaaaattagaaaaataactccctacttttccaaagtgaattttgtagtttaatgttatcatgcagcttttgaggagtcttttacactgggaaagtttgtagaaattttaaaataagttttatgaaatggtgaaataatatgcatgattttaagtattgccatttttgtaatttgggttattatgctgatggtatcaccatctcttgaaattgtgttaggtttggttattttgtctggggaaaaaatatttactggaaaagactagcagttagtgttggaaaaacctggtggtgtttacaatgttgctaatcattacaaaacattctatattgaagcactgataataaatatgaaatgcaaaaccttttt

SEQ ID NO: 418583 - DNA, 961 bp, Homo sapiens
aaaatccaacaaatagaatttttaaagcctgttcaaaagatttatatttttcatagggggtgctcaaaggatttaaaggagaactaattcatgtatttaacaaacatgatggtgccttgaggaatacagaatatttcaatcaactaaaagacaatagtaacataattcttctgggagactcccaaggagacttaagaatggcagatggagtggccaatgttgagcacattctgaaaattggatatctaaatgatagagtggatgagcttttagaaaagtacatggactcttatgatattgttttagtacaagatgaatcattagaagtagccaactctattttacagaagattctataaacaagcattctccaagaagacctctctcctgtgggtgcaattgaactgttcatccgttcatcttgctgagagacttatttataatatatccttactctcgaagtgttccctttgtataactgaagtattttcagatatggtgaatgcattgactggaagctccttttctccacctctctcaacacactcctcaccgtatcttttaacccatttaaaaaaaaaaatcttaaagccaaaattagaaaaataactccctacttttccaaagtgaattttgtagtttaatgttatcatgcagcttttgaggagtcttttacactgggaaagtttgtagaaattttaaaataagttttatgaaatggtgaaataatatgcatgattttaagtattgccatttttgtaatttgggttattatgctgatggtatcaccatctcttgaaattgtgttaggtttggttattttgtctggggaaaaaatatttactggaaaagactagcagttagtgttggaaaaacctggtggtgtttacaatgttgctaatcattacaaaacattctatattgaagcactgataataaatatgaaatgcaaaaccttttt

SEQ ID NO: 418584 - DNA, 1692 bp, Homo sapiens
tccgtgatgctctgggatcccgcgcttccgagactcgcagtctacgcgagctgcctgtttttttcctgcttggacgcgcatgagggccccgtccatggaccgcgcggccgtggcgagggtgggcgcggtagcgagcgccagcgtgtgcgccctggtggcgggggtggtgctggctcagtacatattcaccttgaagaggaagacggggcggaagaccaagatcatcgagatgatgccagaattccagaaaagttcagttcgaatcaagaaccctacaagagtagaagaaattatctgtggtcttatcaaaggaggagctgccaaacttcagataataacggactttgatatgacactcagtagattttcatataaagggaaaagatgcccaacatgtcataatatcattgacaactgtaagctggttacagatgaatgtagaaaaaagttattgcaactaaaggaaaaatactacgctattgaagttgatcctgttcttactgtagaagagaagtacccttatatggtggaatggtatactaaatcacatggtttgcttgttcagcaagctttaccaaaagctaaacttaaagaaattgtggcagaatctgacgttatgctcaaagaaggatatgagaatttctttgataagctccaacaacatagcatccccgtgttcatattttcggctggaatcggcgatgtactagaggaagttattcgtcaagctggtgtttatcatcccaatgtcaaagttgtgtccaattttatggattttgatgaaactggggtgctcaaaggatttaaaggagaactaattcatgtatttaacaaacatgatggtgccttgaggaatacagaatatttcaatcaactaaaagacaatagtaacataattcttctgggagactcccaaggagacttaagaatggcagatggagtggccaatgttgagcacattctgaaaattggatatctaaatgatagagtggatgagcttttagaaaagtacatggactcttatgatattgttttagtacaagatgaatcattagaagtagccaactctattttacagaagattctataaacaagcattctccaagaagacctctctcctgtgggtgcaattgaactgttcatccgttcatcttgctgagagacttatttataatatatccttactctcgaagtgttccctttgtataactgaagtattttcagatatggtgaatgcattgactggaagctccttttctccacctctctcaacacactcctcaccgtatcttttaacccatttaaaaaaaaaaatcttaaagccaaaattagaaaaataactccctacttttccaaagtgaattttgtagtttaatgttatcatgcagcttttgaggagtcttttacactgggaaagtttgtagaaattttaaaataagttttatgaaatggtgaaataatatgcatgattttaagtattgccatttttgtaatttgggttattatgctgatggtatcaccatctcttgaaattgtgttaggtttggttattttgtctggggaaaaaatatttactggaaaagactagcagttagtgttggaaaaacctggtggtgtttacaatgttgctaatcattacaaaacattctatattgaagcactgataataaatatgaaatgcaaaaccttttt

SEQ ID NO: 418585 - DNA, 1747 bp, Homo sapiens
tccgtgatgctctgggatcccgcgcttccgagactcgcagtctacgcgagctgcctgtttttttcctgcttggacgcgcatgagggccccgtccatggaccgcgcggccgtggcgagggtgggcgcggtagcgagcgccagcgtgtgcgccctggtggcgggggtggtgctggctcagtacatattcaccttgaagaggaagacggggcggaagaccaagatcatcgagatgaagattggataaccaagaaatgactaatcaagagtctgccgtacatgtgaaaatgatgccagaattccagaaaagttcagttcgaatcaagaaccctacaagagtagaagaaattatctgtggtcttatcaaaggaggagctgccaaacttcagataataacggactttgatatgacactcagtagattttcatataaagggaaaagatgcccaacatgtcataatatcattgacaactgtaagctggttacagatgaatgtagaaaaaagttattgcaactaaaggaaaaatactacgctattgaagttgatcctgttcttactgtagaagagaagtacccttatatggtggaatggtatactaaatcacatggtttgcttgttcagcaagctttaccaaaagctaaacttaaagaaattgtggcagaatctgacgttatgctcaaagaaggatatgagaatttctttgataagctccaacaacatagcatccccgtgttcatattttcggctggaatcggcgatgtactagaggaagttattcgtcaagctggtgtttatcatcccaatgtcaaagttgtgtccaattttatggattttgatgaaactggggtgctcaaaggatttaaaggagaactaattcatgtatttaacaaacatgatggtgccttgaggaatacagaatatttcaatcaactaaaagacaatagtaacataattcttctgggagactcccaaggagacttaagaatggcagatggagtggccaatgttgagcacattctgaaaattggatatctaaatgatagagtggatgagcttttagaaaagtacatggactcttatgatattgttttagtacaagatgaatcattagaagtagccaactctattttacagaagattctataaacaagcattctccaagaagacctctctcctgtgggtgcaattgaactgttcatccgttcatcttgctgagagacttatttataatatatccttactctcgaagtgttccctttgtataactgaagtattttcagatatggtgaatgcattgactggaagctccttttctccacctctctcaacacactcctcaccgtatcttttaacccatttaaaaaaaaaaatcttaaagccaaaattagaaaaataactccctacttttccaaagtgaattttgtagtttaatgttatcatgcagcttttgaggagtcttttacactgggaaagtttgtagaaattttaaaataagttttatgaaatggtgaaataatatgcatgattttaagtattgccatttttgtaatttgggttattatgctgatggtatcaccatctcttgaaattgtgttaggtttggttattttgtctggggaaaaaatatttactggaaaagactagcagttagtgttggaaaaacctggtggtgtttacaatgttgctaatcattacaaaacattctatattgaagcactgataataaatatgaaatgcaaaaccttttt

SEQ ID NO: 418586 - DNA, 948 bp, Homo sapiens
tccgtgatgctctgggatcccgcgcttccgagactcgcagtctacgcgagctgcctgtttttttcctgcttggacgcgcatgagggccccgtccatggaccgcgcggccgtggcgagggtgggcgcggtagcgagcgccagcgtgtgcgccctggtggcgggggtggtgctggctcagtacatattcaccttgaagaggaagacggggcggaagaccaagatcatcgagatgaagattggataaccaagaaatgactaatcaagagtctgccgtacatgtgaaaatgatgccagaattccagaaaagttcagttcgaatcaagaaccctacaagagtagaagaaattatctgtggtcttatcaaaggaggagctgccaaacttcagataataacggactttgatatgacactcagtagattttcatataaagggaaaagatgcccaacatgtcataatatcattgacaactgtaagctggttacagatgaatgtagaaaaaaggtaaacactaacaacaatctatagtcactcaaagacttcattaccctttttgcctgagaatttcttcaggtgcattcacagaagtaagaatggatgtaaagtgcttacagccatacctggcacatagtaagcactcagtaaatagtaggtttgctgtatgaattacacattcaaaacatattttaaagataaaaattcacagtaacttgacaacaaaacttatatttaaaactcttaaatgattaccaaagtattctggtgttgtaacgttaactggagatttaaaacaaaagtacttcagttttctataggttttgctcctttaagttgatgaggaagttgcttcagtacttcgcttgagtatgtatgtgtctgtgtatatcttaacaaaatgcaatttgaaatgtgaatcaaatttaatacctttatatgaaaactaaagtgt

SEQ ID NO: 418587 - DNA, 1577 bp, Homo sapiens
ctagatccggggaagggttttgcagaagtacccagaactgtgtccaaggtttcctcagatttgggctgttccgcagcggcaggtcccgggaaccaaggcaacagacatcttcctaggctcgcgagagcgcccccttgtcccacggctgctggggccccccagtagccatggctccggtgtccggctcacgcagcccggatagggaggcctcgggctcggggggaagacgtcgcagttcgtcgaagagtccgaagcccagcaaatctgcccgctccccgcggggccgccgctctcgctcgcactcttgctctcggtccggggaccggaatggactcacccatcagctgggtggcctcagccaaggctcccgaaaccagtcctaccgctcacgctcgcggtcgcgttctagagagcggccctctgcgccccggggcatccccttcgcttctgcctcctcgtcagtctattacggcagctactcgcgcccctacgggagcgacaagccttggcctagcctcctcgacaaggagagggaggagagcctgcggcagaagagattaagtgagagagagagaattggagaattgggagctcctgaagtatggggactttctccaaagaatcctgaaccagattctgatgaacatacaccagtggaggatgaagagccaaagaaaagcactacttcagcttctacttcagaagaagaaaaaaagaagaagtctagccgttcaaaagaaaggtccaagaaaaggagaaagaaaaaatcatcgaaaagaaaacataagaagtattctgaagatagcgacagtgactctgattctgaaacagactccagtgatgaagataacaaaaggagagcaaagaaagccaagaaaaaggaaaagaagaagaaacacagatcgaagaaatataagaaaaagaggtctaagaagagcagaaaagagtccagtgattcaagctctaaagaatcccaagaagagtttctggaaaatccctggaaggatcgaacaaaggctgaagaaccatcagatttaattggcccagaggctccaaaaacacttacctctcaagatgataaacctttgaactatggccatgctctgttacctggtgaaggtgcagctatggctgaatatgtaaaagctggaaaacgtatcccacgaagaggtgaaattggcttgacaagtgaagaaattgcatcatttgaatgctcaggttatgtaatgagtggtagcaggcatcgccgaatggaggctgtgcgactgcgaaaagagaaccagatctacagtgctgatgagaagagagcccttgcatcctttaaccaagaagagagacgaaagagagagaacaagattctggccagttttcgagaaatggtttacagaaagaccaaagggaaggatgacaaataaagattttctgattgtccagaagacatttttaacaacaaaaaagaaagtctgggttccacacatacatagaaaaagattattatgttctgagaaagctttacagtgctactgtgccttctatttaattctttcagtccttcaataaaaagctgcttattgata

SEQ ID NO: 418588 - DNA, 667 bp, Homo sapiens
gccgggcgcggtggcgggcgcctgtagtcccagctatcaggaggctgagatgggggaattgcttgagccagggaggtggaagttgcagtgagccgagatcgtgccactgcattccaacctaggcaacagagcaagactccatctcaaaacaaaacaaaaaaaaaggacgtgtcaggcagctaaaatattaataaatgatcttttggaaatttaacccatttcaatttttgtcagctgttaaatagaccactctgggtaagaaaggattaatgatgatgtactatgaaaataattactgagaaattaagccaaaaataaaattctctccaggcatcgccgaatggaggctgtgcgactgcgaaaagagaaccagatctacagtgctgatgagaagagagcccttgcatcctttaaccaagaagagagacgaaagagagagaacaagattctggccagttttcgagaaatggtttacagaaagaccaaagggaaggatgacaaataaagattttctgattgtccagaagacatttttaacaacaaaaaagaaagtctgggttccacacatacatagaaaaagattattatgttctgagaaagctttacagtgctactgtgccttctatttaattctttcagtccttcaataaaaagctgcttattgata

SEQ ID NO: 418589 - DNA, 1792 bp, Homo sapiens
ctagatccggggaagggttttgcagaagtacccagaactgtgtccaaggtttcctcagatttgggctgttccgcagcggcaggtcccgggaaccaaggcaacagacatcttcctaggctcgcgagagcgcccccttgtcccacggctgctggggccccccagtagccatggctccggtgtccggctcacgcagcccggatagggaggcctcgggctcggggggaagacgtcgcagttcgtcgaagagtccgaagcccagcaaatctgcccgctccccgcggggccgccgctctcgctcgcactcttgctctcggtccggggaccggaatggactcacccatcagctgggtggcctcagccaaggctcccgaaaccagtcctaccgctcacgctcgcggtcgcgttctagagagcggccctctgcgccccggggcatccccttcgcttctgcctcctcgtcagtctattacggcagctactcgcgcccctacgggagcgacaagccttggcctagcctcctcgacaaggagagggaggagagcctgcggcagaagagattaagtgagagagagagaattggagaattgggagctcctgaagtatggggactttctccaaagaatcctgaaccagattctgatgaacatacaccagtggaggatgaagagccaaagaaaagcactacttcagcttctacttcagaagaagaaaaaaagaagaagtctagccgttcaaaagaaaggtccaagaaaaggagaaagaaaaaatcatcgaaaagaaaacataagaagtattctgaagatagcgacagtgactctgattctgaaacagactccagtgatgaagataacaaaaggagagcaaagaaagccaagaaaaaggaaaagaagaagaaacacagatcgaagaaatataagaaaaagaggtctaagaagagcagaaaagagtccagtgattcaagctctaaagaatcccaagaagagtttctggaaaatccctggaaggatcgaacaaaggctgaagaaccatcagatttaattggcccagaggctccaaaaacacttacctctcaagatgataaacctttgaactatggccatgctctgttacctggtgaaggtgcagctatggctgaatatgtaaaagctggaaaacgtatcccacgaagaggtgaaattggcttgacaagtgaagaaattgcatcatttgaatgctcaggttatgtaatgagtggtagcaggcatcgccgaatggaggctgtgcgactgcgaaaagagaaccagatctacagtgctgatgagaagagagcccttgcatcctttaaccaagaagagagacgaaagagagagaacaagattctggccagttttcgagaaatggtttacagaaagaccaaagggaaggatgacaaataaagattttctgattgtccagaagacatttttaacaacaaaaaagaaagtctgggttccacacatacatagaaaaagattattatgttctgagaaagctttacagtgctactgtgccttctatttaattctttcagtccttcaataaaaagctgcttattgatataactttagcaagttctttgggttattttggattgaccatagtaactttctggtttaaaaatccaaattatgggctgggcacggttgctcacgcctgtaatctcagcctcctgaaatgctgggattacaggtgtgagcaaccgtgcctggccgtttttgttaaggttatttgatctgcattattattacatgcctatgataaatttaaattacct

SEQ ID NO: 418590 - DNA, 1181 bp, Homo sapiens
ggattacaggggtgaaacactacacccagcctcctttagtgataatttttatagcaaaagatgatttggttaaataagttagaatactttttaaaaaaattcttaagaggcagtgtctcgctctgttgcccagactggagtgcagtgggctaatcatagctcattgcagcctcgaactcctgggctcaagtgatcctcccgcctcagcctcctgaatagcttagactacagatgtgtgccatcacacccagctacttttttttttttttaatagagacggggtcttgctctgtttcccaggttcagttagaagcagatttttttaagtaaaattatcttgtaagtttgaataagctgggaattcagatcattttattgtcacctttctttgccttgaaaaattaagatgtatagtcaccagttcaaaatttaaaaagaaaagaaaaattaagatgccctctaacataggaagattaagtgaatttgtatcaaattaaaatccctataggaagaaatataagaaaaagaggtctaagaagagcagaaaagagtccagtgattcaagctctaaagaatcccaagaagagtttctggaaaatccctggaaggatcgaacaaaggctgaagaaccatcagatttaattggcccagaggctccaaaaacacttacctctcaagatgataaacctttgaactatggccatgctctgttacctggtgaaggtgcagctatggctgaatatgtaaaagctggaaaacgtatcccacgaagaggtgaaattggcttgacaagtgaagaaattgcatcatttgaatgctcaggttatgtaatgagtggtagcaggcatcgccgaatggaggctgtgcgactgcgaaaagagaaccagatctacagtgctgatgagaagagagcccttgcatcctttaaccaagaagagagacgaaagagagagaacaagattctggccagttttcgagaaatggtttacagaaagaccaaagggaaggatgacaaataaagattttctgattgtccagaagacatttttaacaacaaaaaagaaagtctgggttccacacatacatagaaaaagattattatgttctgagaaagctttacagtgctactgtgccttctatttaattctttcagtccttcaataaaaagctgcttattgata

SEQ ID NO: 418591 - DNA, 443 bp, Homo sapiens
ttctgccttaggatctccaatgcttgcttttaatggttcttggacaatcgatgctgttactgaaaaatttggagttcatatctttacactccatggtccatatctcatcactttcctaattcttataaccattttatttaaattcagttctgatgaacatacaccagtggaggatgaagagccaaagaaaagcactacttcagcttctacttcagaaggtattttaaaaaaaagggtatttttaaaatacaagctattttattgagagatttaaaaaaatcagtttgtaaatagttgaacattagactttgcttttactcaaattgcccatcgtctgtttcttttgatgttcagaaatagttttttagaatataatttttttatttgtactttcttagaagaaaaaaagaagaagtctagccgttcaaaagaaaggtccaaga

SEQ ID NO: 418592 - DNA, 1521 bp, Homo sapiens
ctagatccggggaagggttttgcagaagtacccagaactgtgtccaaggtttcctcagatttgggctgttccgcagcggcaggtcccgggaaccaaggcaacagacatcttcctaggctcgcgagagcgcccccttgtcccacggctgctggggccccccagtagccatggctccggtgtccggctcacgcagcccggatagggaggcctcgggctcggggggaagacgtcgcagttcgtcgaagagtccgaagcccagcaaatctgcccgctccccgcggggccgccgctctcgctcgcactcttgctctcggtccggggaccggaatggactcacccatcagctgggtggcctcagccaaggctcccgaaaccagtcctaccgctcacgctcgcggtcgcgttctagagagcggccctctgcgccccggggcatccccttcgcttctgcctcctcgtcagtctattacggcagctactcgcgcccctacgggagcgacaagccttggcctagcctcctcgacaaggagagggaggagagcctgcggcagaagagattaagtgagagagagagaattggagaattgggagctcctgaagtatggggactttctccaaagaatcctgaaccagattctgatgaacatacaccagtggaggatgaagagccaaagaaaagcactacttcagcttctacttcagaagaaaaaatcatcgaaaagaaaacataagaagtattctgaagatagcgacagtgactctgattctgaaacagactccagtgatgaagataacaaaaggagagcaaagaaagccaagaaaaaggaaaagaagaagaaacacagatcgaagaaatataagaaaaagaggtctaagaagagcagaaaagagtccagtgattcaagctctaaagaatcccaagaagagtttctggaaaatccctggaaggatcgaacaaaggctgaagaaccatcagatttaattggcccagaggctccaaaaacacttacctctcaagatgataaacctttgaactatggccatgctctgttacctggtgaaggtgcagctatggctgaatatgtaaaagctggaaaacgtatcccacgaagaggtgaaattggcttgacaagtgaagaaattgcatcatttgaatgctcaggttatgtaatgagtggtagcaggcatcgccgaatggaggctgtgcgactgcgaaaagagaaccagatctacagtgctgatgagaagagagcccttgcatcctttaaccaagaagagagacgaaagagagagaacaagattctggccagttttcgagaaatggtttacagaaagaccaaagggaaggatgacaaataaagattttctgattgtccagaagacatttttaacaacaaaaaagaaagtctgggttccacacatacatagaaaaagattattatgttctgagaaagctttacagtgctactgtgccttctatttaattctttcagtccttcaataaaaagctgcttattgata

SEQ ID NO: 418593 - DNA, 3280 bp, Homo sapiens
acaatccagtgtcaagaaagaagtcaacttttcttcccctatttccctgcatttctcctctgtgctcactgccacacgcagctcaacctgagctacacagccagatgcgagatgcttctctgctgatctgagtctgcctgcagcatggaccttggtcttccctgaagcatctccagggctggagggacgactgccatgcaccgagggctcatccatccgcagagcagggcagtgggaggagacgctatgacccccatcgtcacagtcctgatctgtctcaggctgagtctgggcccccggacccacgtgcaggcagggaccctccccaagcccacactctgggctgagccaggctctgtgatcacccaggggagtcccgtgaccctctggtgtcaggggatcctggagacccaggagtaccgtctgtatagagaaaagaaaacagcaccctggattacacggatcccacaggagattgtgaagaagggccagttccccatcccatccatcacctgggaacacacagggcggtatcgctgtttctacggtagccacactgcaggctggtcagagcccagtgaccccctggagctggtggtgacaggagcctacatcaaacccaccctctcagctctacccagccctgtggtgacctcaggagggaacgtgaccctccattgtgtctcacaggtggcatttggcagcttcattctgtgtaaggaaggagaagatgaacacccacaatgcctgaactcacagccccgtacccatgggtggtcccgggccatcttctctgtgggccccgtgagcccgagtcgcaggtggtcgtacaggtgctatgcttatgactcgaactctccccatgtgtggtctctacccagtgatctcctggagctcctggtcctaggtgtttctaagaagccatcactctcagtgcagccaggtcctatagtggcccctggggagagcctgaccctccagtgtgtttctgatgtcagctacgacagatttgttctgtataaggagggagaacgtgacttcctccagctccctggcccacagccccaggctgggctctcccaggccaacttcaccctgggccctgtgagccgctcctacgggggccagtacagatgctccggtgcatacaacctctcctccgagtggtcggcccccagcgaccccctggacatcctgatcgcaggacagttccgtggcagacccttcatctcggtgcatccgggccccacggtggcctcaggagagaacgtgaccctgctgtgtcagtcatgggggccgttccacactttccttctgaccaaggcgggagcagctgatgcccccctccgtctcagatcaatacacgaatatcctaagtaccaggctgaattccctatgagtcctgtgacctcagcccactcggggacctacaggtgctacggctcactcagctccaacccctacctgctgtctcaccccagtgactccctggagctcatggtctcaggagcagctgagaccctcagcccaccacaaaacaagtccgattccaaggctggagcagctaacaccctcagcccatcacaaaacaagactgcctcacacccccaggattacacagtggagaatctcatccgcatgggcatagctggcttggtcctggtggtcctcgggattctgctatttgaggctcagcacagccagagaagcctctgagatgcagccgggaggtgaacagcagagagaagaatgtacccttcagagtggtggagccttgggaacagatctgatgatgccaggaggttccgggagacaatttagggctgatgctatctggactgtctgccaatcatttttagagggaggaatcagtgttggattgcagagacattttctggagtgatccatgaaggaccattaacatgtgatacctttcctctctattaatgttgacttcccttggttggatcctcttctttccccacccccagacagacatgaggctacatcccacatggcagcgttgggtccacacctctgcacatctgtgtgctctggtccatggtgtgtaacacagtcttctttattactcattgccatactccctggtgtgctttactgagcctccatctcttcaattcagagttccaaacgtgcttcagtaactaaatcaatgggagagtatcggatttcaaccaggaaaagataaatccaccctgatgccctgacaccctctctgaaccctacgagcccttccctccttctcacatgctacctgtgcagcttctccttagatcattgtgtaaccatcactgccatcctgttccacacatggtcatcaccctacacccattcagcagccactccccattccctcttccctccagcacctgctaaccacaaatgtgctttctgtctctacggatttgcctattctgtctgaaaacatttcaatctcctttgacctgtgagctcctcacttcgagacttcctgcctttccaggcagaaccaaagtacaccacgtcaaaagcaatgataggcatttgcagtgtgttggtgatccacgaaaggaaaatcacggaagcaggatagaaatccagctgcagacaagacctcaggtcgatgaatcttgacaagcagttgagctgtttttttctactcacctaggacagtcaggcagaagtatgcaaaatgactggggctgattcttttctgaattgtcgcaaacagcaagaggacttgagtcctagcattaaagagttcaacatgtctaggtccaagaccactgttgtgtttgaaggatgtaaaaccctgctgcataggatggaatatttggagggaggatcctgaaaaacatgagggatcaaatagtcctcaactttctaggacaaagggagcagctatttgccatctaccctccagaataaagaaatcttatcattcaccatctaccctctagaataaagaaatcttatcattcgccatctaccctgtagaataaagaaatcttatcattcaccgtctaccctctagagtaaacaaatcttatcattcaccatctaccctctagaataaagaaatcttatcattcgccatctaccctctagaataaagaaatcttatcattcaccgtctaccctctagagtaaacaaatcttatcattcgccatctaccctctagaatagagaaatcttatcattcatcatctaccctccagaataaagaaatgttatcatttgccatctaccctctagaataaagaaatcttattaaggaca

SEQ ID NO: 418594 - DNA, 688 bp, Homo sapiens
  misc_feature (665)..(666): n is a, c, g, or t
  misc_feature (669)..(672): n is a, c, g, or t
  misc_feature (674)..(674): n is a, c, g, or t
  misc_feature (676)..(676): n is a, c, g, or t
  misc_feature (679)..(679): n is a, c, g, or t
  misc_feature (681)..(681): n is a, c, g, or t
  misc_feature (683)..(684): n is a, c, g, or t
  misc_feature (686)..(687): n is a, c, g, or t
agcagaaccaggctgagcttggtgctctgatctcagatgcagtgggggatggcctgccccctccttggtcagaaggaaagtgtggaactgcccccgtgactgacacagcagggtcacgttctttcctggggctactgtggggaccggctgcaccgagagagagcaccaagctcagcagaaccaggctgaattccgcatgggtcctgtgacctcagcccacgtggggacctacagatgctacagctcactcagctccaacccctacctgctgtctctccccagtgaccccctggagctcgtggtctcagcatccctaggccaacacccccaggattacacagtggagaatctcatccgcatgggtgtggctggcttggtcctggtggtcctcgggattctgctatttgaggctcagcacagccagagaagcctacaagatgcagccgggaggtgaacagcagagaggacaatgcatacttcagcgtggtggagcctcagggacagatctgatgatcccaggaggctctggaggacaatctaggacctacattatctggactgtatgctggtcatttctagagacagcaatcaatatttgagtgtaaggaaactgtctggggtgattcctagaagatcattaaactgtggtacatttttttgtctannaannnngncntcncntnncnng

SEQ ID NO: 418595 - DNA, 2332 bp, Homo sapiens
  misc_feature (2309)..(2310): n is a, c, g, or t
  misc_feature (2313)..(2316): n is a, c, g, or t
  misc_feature (2318)..(2318): n is a, c, g, or t
  misc_feature (2320)..(2320): n is a, c, g, or t
  misc_feature (2323)..(2323): n is a, c, g, or t
  misc_feature (2325)..(2325): n is a, c, g, or t
  misc_feature (2327)..(2328): n is a, c, g, or t
  misc_feature (2330)..(2331): n is a, c, g, or t
acggtttggtaggaaggaaacacacactctcaagacagaacaaatatgttttattatagttaatccctgcatttccccttttgagacagggtctcactctgtcactgaggctggaatgctaaggggtgatcatagctccctgcagcctccgcctcccaggccgaagtattcctcccacctcagcctcctgagtagctgggactagagatgtgagctgccatgcctggctaattttttgctttttttatacagacaaggtcttgctatgtggcccagggtaatctgaagctcctggcctctagccttcacccacctcagcctcctgaagtgctgggattccaggcatgagccaccatggtagaccctgcattactcctctgtgctcactgccacacgcagctcaacctgagctacacagccaggtgtcaggtgcgtctctgctgatctgagtctaactgcagcatggacctgggttttccctgaagcatctccagggctggagggacgaccgccatgccctaaaggtatgacagccaggctcctgagagggcagttgcacttcctgtgtggttgcacataacaaaaccccatgacaagaaggatccagcctccgagtgtccacaccctgtgcgtctctctgtcctgccagcactgagggctcatccatccgcagagcagggcagtgggaggagacgccatgacccccatcctcacggtcctgatctgtctcgggctgagtctgggccccaggacccacgtgcaggcagggcacctccccaagcccaccctctgggctgagccaggctctgtgatcatccagggaagtcctgtgaccctcaggtgtcaggggagccttcaggctgaggagtaccatctatatagggaaaacaaatcagcatcctgggttagacggatacaagagcctgggaagaatggccagttccccatcccatccatcacctgggaacacgcagggcggtatcactgtcagtactacagccacaatcactcatcagagtacagtgaccccctggagctggtggtgacaggagcctacagcaaacccaccctctcagctctgcccagccctgtggtgaccttaggagggaacgtgaccctccagtgtgtctcacaggtggcatttgacggcttcattctgtgtaaggaaggagaagatgaacacccacaacgcctgaactcccattcccatgcccgtgggtggtcctgggccatcttctccgtgggccccgtgagcccgagtcgcaggtggtcgtacaggtgctatgcttatgactcgaactctccctatgtgtggtctctacccagtgatctcctggagctcctggtcccaggtgtttctaagaagccatcactctcagtgcagccaggtcctatggtggcccctggggagagcctgaccctccagtgtgtctctgatgtcggctacgacagatttgttctgtataaggagggagaacgtgacttcctccagcgccctggttggcagccccaggctgggctctcccaggccaacttcaccctgggccctgtgagcccctcccacgggggccagtacagatgctacagtgcacacaacctctcctccgagtggtcggcccccagtgaccccctggacatcctgatcacaggacagttctatgacagaccctctctctcggtgcagccggtccccacagtagccccaggaaagaacgtgaccctgctgtgtcagtcacgggggcagttccacactttccttctgaccaaggagggggcaggccatcccccactgcatctgagatcagagcaccaagctcagcagaaccaggctgaattccgcatgggtcctgtgacctcagcccacgtggggacctacagatgctacagctcactcagctccaacccctacctgctgtctctccccagtgaccccctggagctcgtggtctcagcatccctaggccaacacccccaggattacacagtggagaatctcatccgcatgggtgtggctggcttggtcctggtggtcctcgggattctgctatttgaggctcagcacagccagagaagcctacaagatgcagccgggaggtgaacagcagagaggacaatgcatacttcagcgtggtggagcctcagggacagatctgatgatcccaggaggctctggaggacaatctaggacctacattatctggactgtatgctggtcatttctagagacagcaatcaatatttgagtgtaaggaaactgtctggggtgattcctagaagatcattaaactgtggtacatttttttgtctannaannnngncntcncntnncnng

SEQ ID NO: 418596 - DNA, 2163 bp, Homo sapiens
  misc_feature (2140)..(2141): n is a, c, g, or t
  misc_feature (2144)..(2147): n is a, c, g, or t
  misc_feature (2149)..(2149): n is a, c, g, or t
  misc_feature (2151)..(2151): n is a, c, g, or t
  misc_feature (2154)..(2154): n is a, c, g, or t
  misc_feature (2156)..(2156): n is a, c, g, or t
  misc_feature (2158)..(2159): n is a, c, g, or t
  misc_feature (2161)..(2162): n is a, c, g, or t
acggtttggtaggaaggaaacacacactctcaagacagaacaaatatgttttattatagttaatccctgcatttccccttttgagacagggtctcactctgtcactgaggctggaatgctaaggggtgatcatagctccctgcagcctccgcctcccaggccgaagtattcctcccacctcagcctcctgagtagctgggactagagatgtgagctgccatgcctggctaattttttgctttttttatacagacaaggtcttgctatgtggcccagggtaatctgaagctcctggcctctagccttcacccacctcagcctcctgaagtgctgggattccaggcatgagccaccatggtagaccctgcattactcctctgtgctcactgccacacgcagctcaacctgagctacacagccaggtgtcaggtgcgtctctgctgatctgagtctaactgcagcatggacctgggttttccctgaagcatctccagggctggagggacgaccgccatgcactgagggctcatccatccgcagagcagggcagtgggaggagacgccatgacccccatcctcacggtcctgatctgtctcgggcacctccccaagcccaccctctgggctgagccaggctctgtgatcatccagggaagtcctgtgaccctcaggtgtcaggggagccttcaggctgaggagtaccatctatatagggaaaacaaatcagcatcctgggttagacggatacaagagcctgggaagaatggccagttccccatcccatccatcacctgggaacacgcagggcggtatcactgtcagtactacagccacaatcactcatcagagtacagtgaccccctggagctggtggtgacaggagcctacagcaaacccaccctctcagctctgcccagccctgtggtgaccttaggagggaacgtgaccctccagtgtgtctcacaggtggcatttgacggcttcattctgtgtaaggaaggagaagatgaacacccacaacgcctgaactcccattcccatgcccgtgggtggtcctgggccatcttctccgtgggccccgtgagcccgagtcgcaggtggtcgtacaggtgctatgcttatgactcgaactctccctatgtgtggtctctacccagtgatctcctggagctcctggtcccaggtgtttctaagaagccatcactctcagtgcagccaggtcctatggtggcccctggggagagcctgaccctccagtgtgtctctgatgtcggctacgacagatttgttctgtataaggagggagaacgtgacttcctccagcgccctggttggcagccccaggctgggctctcccaggccaacttcaccctgggccctgtgagcccctcccacgggggccagtacagatgctacagtgcacacaacctctcctccgagtggtcggcccccagtgaccccctggacatcctgatcacaggacagttctatgacagaccctctctctcggtgcagccggtccccacagtagccccaggaaagaacgtgaccctgctgtgtcagtcacgggggcagttccacactttccttctgaccaaggagggggcaggccatcccccactgcatctgagatcagagcaccaagctcagcagaaccaggctgaattccgcatgggtcctgtgacctcagcccacgtggggacctacagatgctacagctcactcagctccaacccctacctgctgtctctccccagtgaccccctggagctcgtggtctcagcatccctaggccaacacccccaggattacacagtggagaatctcatccgcatgggtgtggctggcttggtcctggtggtcctcgggattctgctatttgaggctcagcacagccagagaagcctacaagatgcagccgggaggtgaacagcagagaggacaatgcatacttcagcgtggtggagcctcagggacagatctgatgatcccaggaggctctggaggacaatctaggacctacattatctggactgtatgctggtcatttctagagacagcaatcaatatttgagtgtaaggaaactgtctggggtgattcctagaagatcattaaactgtggtacatttttttgtctannaannnngncntcncntnncnng

SEQ ID NO: 418597 - DNA, 3198 bp, Homo sapiens
acaatccagtgtcaagaaagaagtcaacttttcttcccctatttccctgcatttctcctctgtgctcactgccacacgcagctcaacctgagctacacagccagatgcgagatgcttctctgctgatctgagtctgcctgcagcatggaccttggtcttccctgaagcatctccagggctggagggacgactgccatgggctgagtctgggcccccggacccacgtgcaggcagggaccctccccaagcccacactctgggctgagccaggctctgtgatcacccaggggagtcccgtgaccctctggtgtcaggggatcctggagacccaggagtaccgtctgtatagagaaaagaaaacagcaccctggattacacggatcccacaggagattgtgaagaagggccagttccccatcccatccatcacctgggaacacacagggcggtatcgctgtttctacggtagccacactgcaggctggtcagagcccagtgaccccctggagctggtggtgacaggagcctacatcaaacccaccctctcagctctacccagccctgtggtgacctcaggagggaacgtgaccctccattgtgtctcacaggtggcatttggcagcttcattctgtgtaaggaaggagaagatgaacacccacaatgcctgaactcacagccccgtacccatgggtggtcccgggccatcttctctgtgggccccgtgagcccgagtcgcaggtggtcgtacaggtgctatgcttatgactcgaactctccccatgtgtggtctctacccagtgatctcctggagctcctggtcctaggtgtttctaagaagccatcactctcagtgcagccaggtcctatagtggcccctggggagagcctgaccctccagtgtgtttctgatgtcagctacgacagatttgttctgtataaggagggagaacgtgacttcctccagctccctggcccacagccccaggctgggctctcccaggccaacttcaccctgggccctgtgagccgctcctacgggggccagtacagatgctccggtgcatacaacctctcctccgagtggtcggcccccagcgaccccctggacatcctgatcgcaggacagttccgtggcagacccttcatctcggtgcatccgggccccacggtggcctcaggagagaacgtgaccctgctgtgtcagtcatgggggccgttccacactttccttctgaccaaggcgggagcagctgatgcccccctccgtctcagatcaatacacgaatatcctaagtaccaggctgaattccctatgagtcctgtgacctcagcccactcggggacctacaggtgctacggctcactcagctccaacccctacctgctgtctcaccccagtgactccctggagctcatggtctcaggagcagctgagaccctcagcccaccacaaaacaagtccgattccaaggctggagcagctaacaccctcagcccatcacaaaacaagactgcctcacacccccaggattacacagtggagaatctcatccgcatgggcatagctggcttggtcctggtggtcctcgggattctgctatttgaggctcagcacagccagagaagcctctgagatgcagccgggaggtgaacagcagagagaagaatgtacccttcagagtggtggagccttgggaacagatctgatgatgccaggaggttccgggagacaatttagggctgatgctatctggactgtctgccaatcatttttagagggaggaatcagtgttggattgcagagacattttctggagtgatccatgaaggaccattaacatgtgatacctttcctctctattaatgttgacttcccttggttggatcctcttctttccccacccccagacagacatgaggctacatcccacatggcagcgttgggtccacacctctgcacatctgtgtgctctggtccatggtgtgtaacacagtcttctttattactcattgccatactccctggtgtgctttactgagcctccatctcttcaattcagagttccaaacgtgcttcagtaactaaatcaatgggagagtatcggatttcaaccaggaaaagataaatccaccctgatgccctgacaccctctctgaaccctacgagcccttccctccttctcacatgctacctgtgcagcttctccttagatcattgtgtaaccatcactgccatcctgttccacacatggtcatcaccctacacccattcagcagccactccccattccctcttccctccagcacctgctaaccacaaatgtgctttctgtctctacggatttgcctattctgtctgaaaacatttcaatctcctttgacctgtgagctcctcacttcgagacttcctgcctttccaggcagaaccaaagtacaccacgtcaaaagcaatgataggcatttgcagtgtgttggtgatccacgaaaggaaaatcacggaagcaggatagaaatccagctgcagacaagacctcaggtcgatgaatcttgacaagcagttgagctgtttttttctactcacctaggacagtcaggcagaagtatgcaaaatgactggggctgattcttttctgaattgtcgcaaacagcaagaggacttgagtcctagcattaaagagttcaacatgtctaggtccaagaccactgttgtgtttgaaggatgtaaaaccctgctgcataggatggaatatttggagggaggatcctgaaaaacatgagggatcaaatagtcctcaactttctaggacaaagggagcagctatttgccatctaccctccagaataaagaaatcttatcattcaccatctaccctctagaataaagaaatcttatcattcgccatctaccctgtagaataaagaaatcttatcattcaccgtctaccctctagagtaaacaaatcttatcattcaccatctaccctctagaataaagaaatcttatcattcgccatctaccctctagaataaagaaatcttatcattcaccgtctaccctctagagtaaacaaatcttatcattcgccatctaccctctagaatagagaaatcttatcattcatcatctaccctccagaataaagaaatgttatcatttgccatctaccctctagaataaagaaatcttattaaggaca

SEQ ID NO: 418598 - DNA, 2910 bp, Homo sapiens
acggtttggtaggaaggaaacacacactctcaagacagaacaaatatgttttattatagttaatccctgcatttccccttttgagacagggtctcactctgtcactgaggctggaatgctaaggggtgatcatagctccctgcagcctccgcctcccaggccgaagtattcctcccacctcagcctcctgagtagctgggactagagatgtgagctgccatgcctggctaattttttgctttttttatacagacaaggtcttgctatgtggcccagggtaatctgaagctcctggcctctagccttcacccacctcagcctcctgaagtgctgggattccaggcatgagccaccatggtagaccctgcattactcctctgtgctcactgccacacgcagctcaacctgagctacacagccaggtgtcaggtgcgtctctgctgatctgagtctaactgcagcatggacctgggttttccctgaagcatctccagggctggagggacgaccgccatgggctgagtctgggccccaggacccacgtgcaggcagggcacctccccaagcccaccctctgggctgagccaggctctgtgatcatccagggaagtcctgtgaccctcaggtgtcaggggagccttcaggctgaggagtaccatctatatagggaaaacaaatcagcatcctgggttagacggatacaagagcctgggaagaatggccagttccccatcccatccatcacctgggaacacgcagggcggtatcactgtcagtactacagccacaatcactcatcagagtacagtgaccccctggagctggtggtgacaggagcctacagcaaacccaccctctcagctctgcccagccctgtggtgaccttaggagggaacgtgaccctccagtgtgtctcacaggtggcatttgacggcttcattctgtgtaaggaaggagaagatgaacacccacaacgcctgaactcccattcccatgcccgtgggtggtcctgggccatcttctccgtgggccccgtgagcccgagtcgcaggtggtcgtacaggtgctatgcttatgactcgaactctccctatgtgtggtctctacccagtgatctcctggagctcctggtcccaggagcagctgagaccctcagcccaccacaaaacaagtccgattccaaggctggagcagctaacaccctcagcccatcacaaaacaagactgcctcacacccccaggattacacagtggagaatctcatccgcatgggcatagctggcttggtcctggtggtcctcgggattctgctatttgaggctcagcacagccagagaagcctctgagatgcagccgggaggtgaacagcagagagaagaatgtacccttcagagtggtggagccttgggaacagatctgatgatgccaggaggttccgggagacaatttagggctgatgctatctggactgtctgccaatcatttttagagggaggaatcagtgttggattgcagagacattttctggagtgatccatgaaggaccattaacatgtgatacctttcctctctattaatgttgacttcccttggttggatcctcttctttccccacccccagacagacatgaggctacatcccacatggcagcgttgggtccacacctctgcacatctgtgtgctctggtccatggtgtgtaacacagtcttctttattactcattgccatactccctggtgtgctttactgagcctccatctcttcaattcagagttccaaacgtgcttcagtaactaaatcaatgggagagtatcggatttcaaccaggaaaagataaatccaccctgatgccctgacaccctctctgaaccctacgagcccttccctccttctcacatgctacctgtgcagcttctccttagatcattgtgtaaccatcactgccatcctgttccacacatggtcatcaccctacacccattcagcagccactccccattccctcttccctccagcacctgctaaccacaaatgtgctttctgtctctacggatttgcctattctgtctgaaaacatttcaatctcctttgacctgtgagctcctcacttcgagacttcctgcctttccaggcagaaccaaagtacaccacgtcaaaagcaatgataggcatttgcagtgtgttggtgatccacgaaaggaaaatcacggaagcaggatagaaatccagctgcagacaagacctcaggtcgatgaatcttgacaagcagttgagctgtttttttctactcacctaggacagtcaggcagaagtatgcaaaatgactggggctgattcttttctgaattgtcgcaaacagcaagaggacttgagtcctagcattaaagagttcaacatgtctaggtccaagaccactgttgtgtttgaaggatgtaaaaccctgctgcataggatggaatatttggagggaggatcctgaaaaacatgagggatcaaatagtcctcaactttctaggacaaagggagcagctatttgccatctaccctccagaataaagaaatcttatcattcaccatctaccctctagaataaagaaatcttatcattcgccatctaccctgtagaataaagaaatcttatcattcaccgtctaccctctagagtaaacaaatcttatcattcaccatctaccctctagaataaagaaatcttatcattcgccatctaccctctagaataaagaaatcttatcattcaccgtctaccctctagagtaaacaaatcttatcattcgccatctaccctctagaatagagaaatcttatcattcatcatctaccctccagaataaagaaatgttatcatttgccatctaccctctagaataaagaaatcttattaaggaca

SEQ ID NO: 418599 - DNA, 2992 bp, Homo sapiens
acggtttggtaggaaggaaacacacactctcaagacagaacaaatatgttttattatagttaatccctgcatttccccttttgagacagggtctcactctgtcactgaggctggaatgctaaggggtgatcatagctccctgcagcctccgcctcccaggccgaagtattcctcccacctcagcctcctgagtagctgggactagagatgtgagctgccatgcctggctaattttttgctttttttatacagacaaggtcttgctatgtggcccagggtaatctgaagctcctggcctctagccttcacccacctcagcctcctgaagtgctgggattccaggcatgagccaccatggtagaccctgcattactcctctgtgctcactgccacacgcagctcaacctgagctacacagccaggtgtcaggtgcgtctctgctgatctgagtctaactgcagcatggacctgggttttccctgaagcatctccagggctggagggacgaccgccatgcactgagggctcatccatccgcagagcagggcagtgggaggagacgccatgacccccatcctcacggtcctgatctgtctcgggctgagtctgggccccaggacccacgtgcaggcagggcacctccccaagcccaccctctgggctgagccaggctctgtgatcatccagggaagtcctgtgaccctcaggtgtcaggggagccttcaggctgaggagtaccatctatatagggaaaacaaatcagcatcctgggttagacggatacaagagcctgggaagaatggccagttccccatcccatccatcacctgggaacacgcagggcggtatcactgtcagtactacagccacaatcactcatcagagtacagtgaccccctggagctggtggtgacaggagcctacagcaaacccaccctctcagctctgcccagccctgtggtgaccttaggagggaacgtgaccctccagtgtgtctcacaggtggcatttgacggcttcattctgtgtaaggaaggagaagatgaacacccacaacgcctgaactcccattcccatgcccgtgggtggtcctgggccatcttctccgtgggccccgtgagcccgagtcgcaggtggtcgtacaggtgctatgcttatgactcgaactctccctatgtgtggtctctacccagtgatctcctggagctcctggtcccaggagcagctgagaccctcagcccaccacaaaacaagtccgattccaaggctggagcagctaacaccctcagcccatcacaaaacaagactgcctcacacccccaggattacacagtggagaatctcatccgcatgggcatagctggcttggtcctggtggtcctcgggattctgctatttgaggctcagcacagccagagaagcctctgagatgcagccgggaggtgaacagcagagagaagaatgtacccttcagagtggtggagccttgggaacagatctgatgatgccaggaggttccgggagacaatttagggctgatgctatctggactgtctgccaatcatttttagagggaggaatcagtgttggattgcagagacattttctggagtgatccatgaaggaccattaacatgtgatacctttcctctctattaatgttgacttcccttggttggatcctcttctttccccacccccagacagacatgaggctacatcccacatggcagcgttgggtccacacctctgcacatctgtgtgctctggtccatggtgtgtaacacagtcttctttattactcattgccatactccctggtgtgctttactgagcctccatctcttcaattcagagttccaaacgtgcttcagtaactaaatcaatgggagagtatcggatttcaaccaggaaaagataaatccaccctgatgccctgacaccctctctgaaccctacgagcccttccctccttctcacatgctacctgtgcagcttctccttagatcattgtgtaaccatcactgccatcctgttccacacatggtcatcaccctacacccattcagcagccactccccattccctcttccctccagcacctgctaaccacaaatgtgctttctgtctctacggatttgcctattctgtctgaaaacatttcaatctcctttgacctgtgagctcctcacttcgagacttcctgcctttccaggcagaaccaaagtacaccacgtcaaaagcaatgataggcatttgcagtgtgttggtgatccacgaaaggaaaatcacggaagcaggatagaaatccagctgcagacaagacctcaggtcgatgaatcttgacaagcagttgagctgtttttttctactcacctaggacagtcaggcagaagtatgcaaaatgactggggctgattcttttctgaattgtcgcaaacagcaagaggacttgagtcctagcattaaagagttcaacatgtctaggtccaagaccactgttgtgtttgaaggatgtaaaaccctgctgcataggatggaatatttggagggaggatcctgaaaaacatgagggatcaaatagtcctcaactttctaggacaaagggagcagctatttgccatctaccctccagaataaagaaatcttatcattcaccatctaccctctagaataaagaaatcttatcattcgccatctaccctgtagaataaagaaatcttatcattcaccgtctaccctctagagtaaacaaatcttatcattcaccatctaccctctagaataaagaaatcttatcattcgccatctaccctctagaataaagaaatcttatcattcaccgtctaccctctagagtaaacaaatcttatcattcgccatctaccctctagaatagagaaatcttatcattcatcatctaccctccagaataaagaaatgttatcatttgccatctaccctctagaataaagaaatcttattaaggaca

SEQ ID NO: 418600 - DNA, 2383 bp, Homo sapiens
  misc_feature (2360)..(2361): n is a, c, g, or t
  misc_feature (2364)..(2367): n is a, c, g, or t
  misc_feature (2369)..(2369): n is a, c, g, or t
  misc_feature (2371)..(2371): n is a, c, g, or t
  misc_feature (2374)..(2374): n is a, c, g, or t
  misc_feature (2376)..(2376): n is a, c, g, or t
  misc_feature (2378)..(2379): n is a, c, g, or t
  misc_feature (2381)..(2382): n is a, c, g, or t
acggtttggtaggaaggaaacacacactctcaagacagaacaaatatgttttattatagttaatccctgcatttccccttttgagacagggtctcactctgtcactgaggctggaatgctaaggggtgatcatagctccctgcagcctccgcctcccaggccgaagtattcctcccacctcagcctcctgagtagctgggactagagatgtgagctgccatgcctggctaattttttgctttttttatacagacaaggtcttgctatgtggcccagggtaatctgaagctcctggcctctagccttcacccacctcagcctcctgaagtgctgggattccaggcatgagccaccatggtagaccctgcattactcctctgtgctcactgccacacgcagctcaacctgagctacacagccaggtgtcaggtgcgtctctgctgatctgagtctaactgcagcatggacctgggttttccctgaagcatctccagggctggagggacgaccgccatgccctaaaggtatgacagccaggctcctgagagggcagttgcacttcctgtgtggttgcacataacaaaaccccatgacaagaaggatccagcctccgagtgtccacaccctgtgcgtctctctgtcctgccagcactgagggctcatccatccgcagagcagggcagtgggaggagacgccatgacccccatcctcacggtcctgatctgtctcgggctgagtctgggccccaggacccacgtgcaggcagggcacctccccaagcccaccctctgggctgagccaggctctgtgatcatccagggaagtcctgtgaccctcaggtgtcaggggagccttcaggctgaggagtaccatctatatagggaaaacaaatcagcatcctgggttagacggatacaagagcctgggaagaatggccagttccccatcccatccatcacctgggaacacgcagggcggtatcactgtcagtactacagccacaatcactcatcagagtacagtgaccccctggagctggtggtgacaggagcctacagcaaacccaccctctcagctctgcccagccctgtggtgaccttaggagggaacgtgaccctccagtgtgtctcacaggtggcatttgacggcttcattctgtgtaaggaaggagaagatgaacacccacaacgcctgaactcccattcccatgcccgtgggtggtcctgggccatcttctccgtgggccccgtgagcccgagtcgcaggtggtcgtacaggtgctatgcttatgactcgaactctccctatgtgtggtctctacccagtgatctcctggagctcctggtcccaggtgtttctaagaagccatcactctcagtgcagccaggtcctatggtggcccctggggagagcctgaccctccagtgtgtctctgatgtcggctacgacagatttgttctgtataaggagggagaacgtgacttcctccagcgccctggttggcagccccaggctgggctctcccaggccaacttcaccctgggccctgtgagcccctcccacgggggccagtacagatgctacagtgcacacaacctctcctccgagtggtcggcccccagtgaccccctggacatcctgatcacaggacagttctatgacagaccctctctctcggtgcagccggtccccacagtagccccaggaaagaacgtgaccctgctgtgtcagtcacgggggcagttccacactttccttctgaccaaggagggggcaggccatcccccactgcatctgagatcagagcaccaagctcagcagaaccaggctgaattccgcatgggtcctgtgacctcagcccacgtggggacctacagatgctacagctcactcagctccaacccctacctgctgtctctccccagtgaccccctggagctcgtggtctcagaagcagctgagaccctcagcccatcacaaaacaagacagactccacgactacatccctaggccaacacccccaggattacacagtggagaatctcatccgcatgggtgtggctggcttggtcctggtggtcctcgggattctgctatttgaggctcagcacagccagagaagcctacaagatgcagccgggaggtgaacagcagagaggacaatgcatacttcagcgtggtggagcctcagggacagatctgatgatcccaggaggctctggaggacaatctaggacctacattatctggactgtatgctggtcatttctagagacagcaatcaatatttgagtgtaaggaaactgtctggggtgattcctagaagatcattaaactgtggtacatttttttgtctannaannnngncntcncntnncnng

SEQ ID NO: 418601 - DNA, 1544 bp, Homo sapiens
  misc_feature (1521)..(1522): n is a, c, g, or t
  misc_feature (1525)..(1528): n is a, c, g, or t
  misc_feature (1530)..(1530): n is a, c, g, or t
  misc_feature (1532)..(1532): n is a, c, g, or t
  misc_feature (1535)..(1535): n is a, c, g, or t
  misc_feature (1537)..(1537): n is a, c, g, or t
  misc_feature (1539)..(1540): n is a, c, g, or t
  misc_feature (1542)..(1543): n is a, c, g, or t
acggtttggtaggaaggaaacacacactctcaagacagaacaaatatgttttattatagttaatccctgcatttccccttttgagacagggtctcactctgtcactgaggctggaatgctaaggggtgatcatagctccctgcagcctccgcctcccaggccgaagtattcctcccacctcagcctcctgagtagctgggactagagatgtgagctgccatgcctggctaattttttgctttttttatacagacaaggtcttgctatgtggcccagggtaatctgaagctcctggcctctagccttcacccacctcagcctcctgaagtgctgggattccaggcatgagccaccatggtagaccctgcattactcctctgtgctcactgccacacgcagctcaacctgagctacacagccaggtgtcaggtgcgtctctgctgatctgagtctaactgcagcatggacctgggttttccctgaagcatctccagggctggagggacgaccgccatgccctaaaggtatgacagccaggctcctgagagggcagttgcacttcctgtgtggttgcacataacaaaaccccatgacaagaaggatccagcctccgagtgtccacaccctgtgcgtctctctgtcctgccagcactgagggctcatccatccgcagagcagggcagtgggaggagacgccatgacccccatcctcacggtcctgatctgtctcgggctgagtctgggccccaggacccacgtgcaggcagggcacctccccaagcccaccctctgggctgagccaggctctgtgatcatccagggaagtcctgtgaccctcaggtgtcaggggagccttcaggctgaggagtaccatctatatagggaaaacaaatcagcatcctgggttagacggatacaagagcctgggaagaatggccagttccccatcccatccatcacctgggaacacgcagggcggtatcactgtcagtactacagccacaatcactcatcagaagcaccaagctcagcagaaccaggctgaattccgcatgggtcctgtgacctcagcccacgtggggacctacagatgctacagctcactcagctccaacccctacctgctgtctctccccagtgaccccctggagctcgtggtctcagcatccctaggccaacacccccaggattacacagtggagaatctcatccgcatgggtgtggctggcttggtcctggtggtcctcgggattctgctatttgaggctcagcacagccagagaagcctacaagatgcagccgggaggtgaacagcagagaggacaatgcatacttcagcgtggtggagcctcagggacagatctgatgatcccaggaggctctggaggacaatctaggacctacattatctggactgtatgctggtcatttctagagacagcaatcaatatttgagtgtaaggaaactgtctggggtgattcctagaagatcattaaactgtggtacatttttttgtctannaannnngncntcncntnncnng

SEQ ID NO: 418602 - DNA, 3442 bp, Homo sapiens
acaatccagtgtcaagaaagaagtcaacttttcttcccctatttccctgcatttctcctctgtgctcactgccacacgcagctcaacctgagctacacagccagatgcgagatgcttctctgctgatctgagtctgcctgcagcatggaccttggtcttccctgaagcatctccagggctggagggacgactgccatgcaccgagggctcatccatccgcagagcagggcagtgggaggagacgctatgacccccatcgtcacagtcctgatctgtctcagtgagatttgaagagggaggggagcttctaacctaggagggacctcaccccacagccgacctctagtccctaaggagaccccaggggctcacaaagatcccagggaggggaggacctgcccaggcttcaggggcaaattcctcacagggaactctcttccagggctgagtctgggcccccggacccacgtgcaggcagggaccctccccaagcccacactctgggctgagccaggctctgtgatcacccaggggagtcccgtgaccctctggtgtcaggggatcctggagacccaggagtaccgtctgtatagagaaaagaaaacagcaccctggattacacggatcccacaggagattgtgaagaagggccagttccccatcccatccatcacctgggaacacacagggcggtatcgctgtttctacggtagccacactgcaggctggtcagagcccagtgaccccctggagctggtggtgacaggagcctacatcaaacccaccctctcagctctacccagccctgtggtgacctcaggagggaacgtgaccctccattgtgtctcacaggtggcatttggcagcttcattctgtgtaaggaaggagaagatgaacacccacaatgcctgaactcacagccccgtacccatgggtggtcccgggccatcttctctgtgggccccgtgagcccgagtcgcaggtggtcgtacaggtgctatgcttatgactcgaactctccccatgtgtggtctctacccagtgatctcctggagctcctggtcctaggtgtttctaagaagccatcactctcagtgcagccaggtcctatagtggcccctggggagagcctgaccctccagtgtgtttctgatgtcagctacgacagatttgttctgtataaggagggagaacgtgacttcctccagctccctggcccacagccccaggctgggctctcccaggccaacttcaccctgggccctgtgagccgctcctacgggggccagtacagatgctccggtgcatacaacctctcctccgagtggtcggcccccagcgaccccctggacatcctgatcgcaggacagttccgtggcagacccttcatctcggtgcatccgggccccacggtggcctcaggagagaacgtgaccctgctgtgtcagtcatgggggccgttccacactttccttctgaccaaggcgggagcagctgatgcccccctccgtctcagatcaatacacgaatatcctaagtaccaggctgaattccctatgagtcctgtgacctcagcccactcggggacctacaggtgctacggctcactcagctccaacccctacctgctgtctcaccccagtgactccctggagctcatggtctcaggagcagctgagaccctcagcccaccacaaaacaagtccgattccaaggctggagcagctaacaccctcagcccatcacaaaacaagactgcctcacacccccaggattacacagtggagaatctcatccgcatgggcatagctggcttggtcctggtggtcctcgggattctgctatttgaggctcagcacagccagagaagcctctgagatgcagccgggaggtgaacagcagagagaagaatgtacccttcagagtggtggagccttgggaacagatctgatgatgccaggaggttccgggagacaatttagggctgatgctatctggactgtctgccaatcatttttagagggaggaatcagtgttggattgcagagacattttctggagtgatccatgaaggaccattaacatgtgatacctttcctctctattaatgttgacttcccttggttggatcctcttctttccccacccccagacagacatgaggctacatcccacatggcagcgttgggtccacacctctgcacatctgtgtgctctggtccatggtgtgtaacacagtcttctttattactcattgccatactccctggtgtgctttactgagcctccatctcttcaattcagagttccaaacgtgcttcagtaactaaatcaatgggagagtatcggatttcaaccaggaaaagataaatccaccctgatgccctgacaccctctctgaaccctacgagcccttccctccttctcacatgctacctgtgcagcttctccttagatcattgtgtaaccatcactgccatcctgttccacacatggtcatcaccctacacccattcagcagccactccccattccctcttccctccagcacctgctaaccacaaatgtgctttctgtctctacggatttgcctattctgtctgaaaacatttcaatctcctttgacctgtgagctcctcacttcgagacttcctgcctttccaggcagaaccaaagtacaccacgtcaaaagcaatgataggcatttgcagtgtgttggtgatccacgaaaggaaaatcacggaagcaggatagaaatccagctgcagacaagacctcaggtcgatgaatcttgacaagcagttgagctgtttttttctactcacctaggacagtcaggcagaagtatgcaaaatgactggggctgattcttttctgaattgtcgcaaacagcaagaggacttgagtcctagcattaaagagttcaacatgtctaggtccaagaccactgttgtgtttgaaggatgtaaaaccctgctgcataggatggaatatttggagggaggatcctgaaaaacatgagggatcaaatagtcctcaactttctaggacaaagggagcagctatttgccatctaccctccagaataaagaaatcttatcattcaccatctaccctctagaataaagaaatcttatcattcgccatctaccctgtagaataaagaaatcttatcattcaccgtctaccctctagagtaaacaaatcttatcattcaccatctaccctctagaataaagaaatcttatcattcgccatctaccctctagaataaagaaatcttatcattcaccgtctaccctctagagtaaacaaatcttatcattcgccatctaccctctagaatagagaaatcttatcattcatcatctaccctccagaataaagaaatgttatcatttgccatctaccctctagaataaagaaatcttattaaggaca

SEQ ID NO: 418603 - DNA, 3678 bp, Homo sapiens
tgcgcgagagcgcgccctccgcagacaggttgagcgagcgggagaggcccggggcacgtgcagaaaggagccccgcgagtggcgcgccggggatgtgagtgccccttgccctctactgaatccagccccctccccgcccaccgcctccgcctttgcatagatacagtcatctggccagcccccgcccctcctcccggcgtcagcccgccagaggccgcgcggggcccgggcttcggccgatcagcccgggaggccccgccgcgcccccttggcccgcgcgcccgtggtcacagtggaagaggcgcccgcgctgcgctgcccggaggagccgtcgcgcgcccgcttcctgttcggctggttcctgccagctcgaggacaaaacacgcgtgcgcgcggcgggcgagcgcgctcgccgcctcagtcgccagcgccgggcgcagtccgcctttttccggagcagactggccgcggtgctagtcggtagcagcggccgccgcagcggctccgcactggcgaaccgagggcagaaaaaggcggggttgacggctttttggtaggagtgggctggaccggacgccagagacaaaggctcccaaggcaagagggactgtggccctgcgtcggctctgctcggaactgctgaccccaggaatttacgccccttcgtttttctcttctgattcttctcttctcccaagcccgcgtcccctcacgcgtggcctctctccttgccgggagggccgcgatggaggtcccgcccaggctttcccatgtgccgccgccattgttcccctccgctcccgctactttagcctcccgcagcctctcccattggcggccgcggccgccgcggcagctagccccgctcctcccttcgctcgctcccagctccgcccggcagggggcgcgccgggcccagcgccacgtcaccgcccagcagccctcccgattggcgggcggggcggctataaagggagggcgcaggcggcgcccggatctcttccgccgccattttaaatccagctccatacaacgctccgccgccgctgctgccgcgacccggactgcgcgccagcacccccctgccgacagctccgtcactatggaggatatgaacgagtacagcaatatagaggaattcgcagagggatccaagatcaacgcgagcaagaatcagcaggatgacggtaaaatgtttattggaggcttgagctgggatacaagcaaaaaagatctgacagagtacttgtctcgatttggggaagttgtagactgcacaattaaaacagatccagtcactgggagatcaagaggatttggatttgtgcttttcaaagatgctgctagtgttgataaggttttggaactgaaagaacacaaactggatggcaaattgatagatcccaaaagggccaaagctttaaaagggaaagaacctcccaaaaaggtttttgtgggtggattgagcccggatacttctgaagaacaaattaaagaatattttggagcctttggagagattgaaaatattgaacttcccatggatacaaaaacaaatgaaagaagaggattttgttttatcacatatactgatgaagagccagtaaaaaaattgttagaaagcagataccatcaaattggttctgggaagtgtgaaatcaaagttgcacaacccaaagaggtatataggcagcaacagcaacaacaaaaaggtggaagaggtgctgcagctggtggacgaggtggtacgaggggtcgtggccgaggtcagggccaaaactggaaccaaggatttaataactattatgatcaaggatatggaaattacaatagtgcctatggtggtgatcaaaactatagtggctatggcggatatgattatactgggtataactatgggaactatggatatggacagggatatgcagactacagtggccaacagagcacttatggcaaggcatctcgagggggtggcaatcaccaaaacaattaccagccatactaaaggagaacattggagaaaacagcgggaacttcattgcaggccgtgtgtcaccctgaccacgtctatctctgggggtcgcacgttgcgggcagagcgcaaggcatacaccagaaaacgctgtcctgtggaggagatgttaaagtaacccatcttgcaggacgacattgaagattggtcttctgttgatctaagatgattattttgtaaaagactttctagtgtacaagacaccattgtgtccaactgtatatagctgccaattagttttctttgtttttactttgtcctttgctatctgtgttatgactcaatgtggatttgtttatacacattttatttgtatcatttcatgttaaacctcaaataaatgcttccttatgtgattgcttttctgcgtcaggtactacatagctctgtaaaaaatgtaatttaaaataagcaataattaaggcacagttgattttgtagagtattggtccatacagagaaactgtggtcctttataaatagccagccagcgtcaccctcttctccaatttgtaggtgtattttatgctcttaaggcttcatcttctccctgtaactgagatttctaccacacctttgaacaatgttctttcccttctggttatctgaagactgtcctgaaaggaagacataagtgttgtgattagtagaagctttgtaatcataacacaatgagtaattcttgataaaagttcagatacaaaaggagcactgtaaaactggtaggagctatggtttaagagcattggaagtagttacaactcaaggattttggtagaaaggtatgagtttggtcgaaaaattaaaatagtggcaaaataagatttagttgtgttttctcagagccgccacaagattgaacaaaatgttttctgtttgggcatcctgaggaagttgtattagctgttaatgctctgtgagtttagaaaaagtcttgatagtaaatctagtttttgacacagtgcatgaactaagtagttaaatatttacatattcagaaaggaatagtggaaaaggtatcttggttatgacaaagtcattacaaatgtgactaagtcattacaaatgtgactgagtcattacagtggaccctctgggtgcattgaaaagaatccgttttatatccaggtttcagaggacctggaataataaaaagctttggattttgcattcagtgtagttggattttgggaccttggcctcagtgttatttactgggattggcatacgtgttcacaggcagagtagttgatctcacacaacgggtgatctcacaaaactggtaagtttcttatgctcatgagccctccctttttttttttaatttggtgcctgcaactttcttaacaatgattctacttcctgggctatcacattataatgctcttggcctcttttttgctgctgttttgctattcttaaacttaggccaagtaccaatgttggctgttagaagggattctgttcattcaacatgcaactttagggaatggaagtaagttcatttttaagttgtgttgtcagtaggtgcggtgtctagggtagtgaatcctgtaagttcaaatttatgattaggtgacgagttgacattgagattgtccttttccctgatcaaaaaatgaataaagcctttttaaacaaaa

SEQ ID NO: 418604 - DNA, 3573 bp, Homo sapiens
tgcgcgagagcgcgccctccgcagacaggttgagcgagcgggagaggcccggggcacgtgcagaaaggagccccgcgagtggcgcgccggggatgtgagtgccccttgccctctactgaatccagccccctccccgcccaccgcctccgcctttgcatagatacagtcatctggccagcccccgcccctcctcccggcgtcagcccgccagaggccgcgcggggcccgggcttcggccgatcagcccgggaggccccgccgcgcccccttggcccgcgcgcccgtggtcacagtggaagaggcgcccgcgctgcgctgcccggaggagccgtcgcgcgcccgcttcctgttcggctggttcctgccagctcgaggacaaaacacgcgtgcgcgcggcgggcgagcgcgctcgccgcctcagtcgccagcgccgggcgcagtccgcctttttccggagcagactggccgcggtgctagtcggtagcagcggccgccgcagcggctccgcactggcgaaccgagggcagaaaaaggcggggttgacggctttttggtaggagtgggctggaccggacgccagagacaaaggctcccaaggcaagagggactgtggccctgcgtcggctctgctcggaactgctgaccccaggaatttacgccccttcgtttttctcttctgattcttctcttctcccaagcccgcgtcccctcacgcgtggcctctctccttgccgggagggccgcgatggaggtcccgcccaggctttcccatgtgccgccgccattgttcccctccgctcccgctactttagcctcccgcagcctctcccattggcggccgcggccgccgcggcagctagccccgctcctcccttcgctcgctcccagctccgcccggcagggggcgcgccgggcccagcgccacgtcaccgcccagcagccctcccgattggcgggcggggcggctataaagggagggcgcaggcggcgcccggatctcttccgccgccattttaaatccagctccatacaacgctccgccgccgctgctgccgcgacccggactgcgcgccagcacccccctgccgacagctccgtcactatggaggatatgaacgagtacagcaatatagaggaattcgcagagggatccaagatcaacgcgagcaagaatcagcaggatgacggtaaaatgtttattggaggcttgagctgggatacaagcaaaaaagatctgacagagtacttgtctcgatttggggaagttgtagactgcacaattaaaacagatccagtcactgggagatcaagaggatttggatttgtgcttttcaaagatgctgctagtgttgataaggttttggaactgaaagaacacaaactggatggcaaattgatagatcccaaaagggccaaagctttaaaagggaaagaacctcccaaaaaggtttttgtgggtggattgagcccggatacttctgaagaacaaattaaagaatattttggagcctttggagagattgaaaatattgaacttcccatggatacaaaaacaaatgaaagaagaggattttgttttatcacatatactgatgaagagccagtaaaaaaattgttagaaagcagataccatcaaattggttctgggaagtgtgaaatcaaagttgcacaacccaaagaggtatataggcagcaacagcaacaacaaaaaggtggaagaggtgctgcagctggtggacgaggtggtacgaggggtcgtggccgaggtcagggccaaaactggaaccaaggatttaataactattatgatcaaggatatggaaattacaatagtgcctatggtggtgatcaaaactatagtggctatggcggatatgattatactgggtataactatgggaactatggatatggacagggatatgcagactacagtggccaacagagcacttatggcaaggcatctcgagggggtggcaatcaccaaaacaattaccagccatactaaaggagaacattggagaaaacaggaggagatgttaaagtaacccatcttgcaggacgacattgaagattggtcttctgttgatctaagatgattattttgtaaaagactttctagtgtacaagacaccattgtgtccaactgtatatagctgccaattagttttctttgtttttactttgtcctttgctatctgtgttatgactcaatgtggatttgtttatacacattttatttgtatcatttcatgttaaacctcaaataaatgcttccttatgtgattgcttttctgcgtcaggtactacatagctctgtaaaaaatgtaatttaaaataagcaataattaaggcacagttgattttgtagagtattggtccatacagagaaactgtggtcctttataaatagccagccagcgtcaccctcttctccaatttgtaggtgtattttatgctcttaaggcttcatcttctccctgtaactgagatttctaccacacctttgaacaatgttctttcccttctggttatctgaagactgtcctgaaaggaagacataagtgttgtgattagtagaagctttgtaatcataacacaatgagtaattcttgataaaagttcagatacaaaaggagcactgtaaaactggtaggagctatggtttaagagcattggaagtagttacaactcaaggattttggtagaaaggtatgagtttggtcgaaaaattaaaatagtggcaaaataagatttagttgtgttttctcagagccgccacaagattgaacaaaatgttttctgtttgggcatcctgaggaagttgtattagctgttaatgctctgtgagtttagaaaaagtcttgatagtaaatctagtttttgacacagtgcatgaactaagtagttaaatatttacatattcagaaaggaatagtggaaaaggtatcttggttatgacaaagtcattacaaatgtgactaagtcattacaaatgtgactgagtcattacagtggaccctctgggtgcattgaaaagaatccgttttatatccaggtttcagaggacctggaataataaaaagctttggattttgcattcagtgtagttggattttgggaccttggcctcagtgttatttactgggattggcatacgtgttcacaggcagagtagttgatctcacacaacgggtgatctcacaaaactggtaagtttcttatgctcatgagccctccctttttttttttaatttggtgcctgcaactttcttaacaatgattctacttcctgggctatcacattataatgctcttggcctcttttttgctgctgttttgctattcttaaacttaggccaagtaccaatgttggctgttagaagggattctgttcattcaacatgcaactttagggaatggaagtaagttcatttttaagttgtgttgtcagtaggtgcggtgtctagggtagtgaatcctgtaagttcaaatttatgattaggtgacgagttgacattgagattgtccttttccctgatcaaaaaatgaataaagcctttttaaacaaaa

SEQ ID NO: 418605 - DNA, 2287 bp, Homo sapiens
tgcgcgagagcgcgccctccgcagacaggttgagcgagcgggagaggcccggggcacgtgcagaaaggagccccgcgagtggcgcgccggggatgtgagtgccccttgccctctactgaatccagccccctccccgcccaccgcctccgcctttgcatagatacagtcatctggccagcccccgcccctcctcccggcgtcagcccgccagaggccgcgcggggcccgggcttcggccgatcagcccgggaggccccgccgcgcccccttggcccgcgcgcccgtggtcacagtggaagaggcgcccgcgctgcgctgcccggaggagccgtcgcgcgcccgcttcctgttcggctggttcctgccagctcgaggacaaaacacgcgtgcgcgcggcgggcgagcgcgctcgccgcctcagtcgccagcgccgggcgcagtccgcctttttccggagcagactggccgcggtgctagtcggtagcagcggccgccgcagcggctccgcactggcgaaccgagggcagaaaaaggcggggttgacggctttttggtaggagtgggctggaccggacgccagagacaaaggctcccaaggcaagagggactgtggccctgcgtcggctctgctcggaactgctgaccccaggaatttacgccccttcgtttttctcttctgattcttctcttctcccaagcccgcgtcccctcacgcgtggcctctctccttgccgggagggccgcgatggaggtcccgcccaggctttcccatgtgccgccgccattgttcccctccgctcccgctactttagcctcccgcagcctctcccattggcggccgcggccgccgcggcagctagccccgctcctcccttcgctcgctcccagctccgcccggcagggggcgcgccgggcccagcgccacgtcaccgcccagcagccctcccgattggcgggcggggcggctataaagggagggcgcaggcggcgcccggatctcttccgccgccattttaaatccagctccatacaacgctccgccgccgctgctgccgcgacccggactgcgcgccagcacccccctgccgacagctccgtcactatggaggatatgaacgagtacagcaatatagaggaattcgcagagggatccaagatcaacgcgagcaagaatcagcaggatgacggtaaaatgtttattggaggcttgagctgggatacaagcaaaaaagatctgacagagtacttgtctcgatttggggaagttgtagactgcacaattaaaacagatccagtcactgggagatcaagaggatttggatttgtgcttttcaaagatgctgctagtgttgataaggttttggaactgaaagaacacaaactggatggcaaattgatagatcccaaaagggccaaagctttaaaagggaaagaacctcccaaaaaggtttttgtgggtggattgagcccggatacttctgaagaacaaattaaagaatattttggagcctttggagagattgaaaatattgaacttcccatggatacaaaaacaaatgaaagaagaggattttgttttatcacatatactgatgaagagccagtaaaaaaattgttagaaagcagataccatcaaattggttctgggaagtgtgaaatcaaagttgcacaacccaaagaggtatataggcagcaacagcaacaacaaaaaggtggaagaggtgctgcagctggtggacgaggtggtacgaggggtcgtggccgaggtcagggccaaaactggaaccaaggatttaataactattatgatcaaggatatggaaattacaatagtgcctatggtggtgatcaaaactatagtggctatggcggatatgattatactgggtataactatgggaactatggatatggacagggatatgcagactacagtggccaacagagcacttatggcaaggcatctcgagggggtggcaatcaccaaaacaattaccagccatactaaaggagaacattggagaaaacaggaggagatgttaaagtaacccatcttgcaggacgacattgaagattggtcttctgttgatctaagatgattattttgtaaaagactttctagtgtacaagacaccattgtgtccaactgtatatagctgccaattagttttctttgtttttactttgtcctttgctatctgtgttatgactcaatgtggatttgtttatacacattttatttgtatcatttcatgttaaacctcaaataaatgcttccttatgtgat

SEQ ID NO: 418606 - DNA, 581 bp, Homo sapiens
  misc_feature (32)..(32): n is a, c, g, or t
gtgtgctgatgtgatctagaggatcccgggtnatcgatgccacttggagcttggagagattgaaaatattgaacttcccatggatacaaaaacaaatgaaagaagaggattttgttttatcacatatactgatgaagagccagtaaaaaaattgttagaaagcagataccatcaaattggttctgggaagtgtgaaatcaaagttgcacaacccaaagaggtatataggcagcaacagcaacaacaaaaaggtggaagaggtgctgcagctggtggacgaggtggtacgaggggtcgtggccgagcagggccaaaactgcaaatagaggctggatcctactcaccccccatcaccctgcattttacacattgaagtaaaatgttatttttactgtcgttatttttattactttctctccaggtgttctagctgagcgtttaagagcatggactctggaaccagactttgaatccttgctctgccactgcagctgtgtgaccttgagcaagctatctaaatattctgtgcctttgctttgtcatctgtacaatggagatgatgatggtatcaccttcatggg

SEQ ID NO: 418607 - DNA, 301 bp, Homo sapiens
gggcaatgttctcctttagtatggctggtaattggagaaaacaggaggagatgttaaagtaacccatcttgcaggacgacattgaagattggtcttctgttgatctaagatgattattttgtaaaagactttctagtgtacaagacaccattgtgtccaactgtatatagctgccaattagttttctttgtttttactttgtcctttgctatctgtgttatgactcaatgtggatttgtttatacacattttatttgtatcatttcatgttaaacctcaaataaatgcttccttatgtgat

SEQ ID NO: 418608 - DNA, 3855 bp, Homo sapiens
ggccgggtgttaatcggccgaggtacaacgctccgccgccgctgctgccgcgacccggactgcgcgccagcacccccctgccgacagctccgtcactatggaggatatgaacgagtacagcaatatagaggaattcgcagagggatccaagatcaacgcgagcaagaatcagcaggatgacggtaaaatgtttattggaggcttgagctgggatacaagcaaaaaagatctgacagagtacttgtctcgatttggggaagttgtagactgcacaattaaaacagatccagtcactgggagatcaagaggatttggatttgtgcttttcaaagatgctgctagtgttgataaggttttggaactgaaagaacacaaactggatggcaaattgatagatcccaaaagggccaaagctttaaaagggaaagaacctcccaaaaaggtttttgtgggtggattgagcccggatacttctgaagaacaaattaaagaatattttggagcctttggagagattgaaaatattgaacttcccatggatacaaaaacaaatgaaagaagaggattttgttttatcacatatactgatgaagagccagtaaaaaaattgttagaaagcagataccatcaaattggttctgggaagtgtgaaatcaaagttgcacaacccaaagaggtatataggcagcaacagcaacaacaaaaaggtggaagaggtgctgcagctggtggacgaggtggtacgaggggtcgtggccgaggtcagggccaaaactggaaccaaggatttaataactattatgatcaaggatatggaaattacaatagtgcctatggtggtgatcaaaactatagtggctatggcggatatgattatactgggtataactatgggaactatggatatggacagggatatgcagactacagtggccaacagagcacttatggcaaggcatctcgagggggtggcaatcaccaaaacaattaccagccatactaaaggagaacattggagaaaacaggtgtgtataagagtacaggaaaacagtagaaatgtctaatttaatttaaagatcaatagacaaatgaaacgtaaaaacaaaatactatgtagcctgtttttactaaattgttgattttttaattgctttatgagcctgttttgcctaaagtgtctatagatctttaactttaaagtcttatctcactttctttagtattgcagaaaaacttaagagtttttctgtttgcttttgtgtaccaggtggtctagaggaataattaaacattttagaactattaacaggtaaagtactgaaatgggtacaacttaaggaaaacaagaatgttgtcttctaactctgacattataccttgtttgtacccgccagcgggaacttcattgcaggccgtgtgtcaccctgaccacgtctatctctgggggtcgcacgttgcgggcagagcgcaaggcatacaccagaaaacgctgtcctgtggtatggtctcttccaacttcatgtaccagcgtaaagattaaagtggaaaacttcagactttggcttcatttttaatctttttggagattaagtgtctaaacttaacttaaatggttttttacaggagttaaagtacataaatgcctttttacagcttaatcattttggtcttctgtttagtgttgtatttcaattgtggagcctcattttaagtgttcattcttttaagatttaatgcttgctttttctttttatagctaatagtgaaatctacaaaccaaaacaagaacttttaaatctgggatataaattaaagatcatatgcacagatcaatttatgttcttgtaataaacttattagaaattggtgtttgtgatagcattttacttgggttactagagatgcttctagtagaccttaatctagcatagttgaacctctgaatatgggaaggttgtattcccagattctttcctgaatagatttgaatttaatgtcatttgggaactccagggtgagtttattgactacccaaactgtattttaccaataaatatgcatatgatctttaattattgaagaaaataaagtgaggacttaaaacaattcatgaaagtggacctttaaaagcttgtcagagttgcacaaatctaactggtattttgtttttgtttttaggaggagatgttaaagtaacccatcttgcaggacgacattgaagattggtcttctgttgatctaagatgattattttgtaaaagactttctagtgtacaagacaccattgtgtccaactgtatatagctgccaattagttttctttgtttttactttgtcctttgctatctgtgttatgactcaatgtggatttgtttatacacattttatttgtatcatttcatgttaaacctcaaataaatgcttccttatgtgattgcttttctgcgtcaggtactacatagctctgtaaaaaatgtaatttaaaataagcaataattaaggcacagttgattttgtagagtattggtccatacagagaaactgtggtcctttataaatagccagccagcgtcaccctcttctccaatttgtaggtgtattttatgctcttaaggcttcatcttctccctgtaactgagatttctaccacacctttgaacaatgttctttcccttctggttatctgaagactgtcctgaaaggaagacataagtgttgtgattagtagaagctttctagtagaccatatttcttctggattgtaataaaattgttagtagctccttttactttgttcctgtctctggaaagccatttttgaattgctgattactttggctttaatcagtggtcacctagaaaaagctttgtaatcataacacaatgagtaattcttgataaaagttcagatacaaaaggagcactgtaaaactggtaggagctatggtttaagagcattggaagtagttacaactcaaggattttggtagaaaggtatgagtttggtcgaaaaattaaaatagtggcaaaataagatttagttgtgttttctcagagccgccacaagattgaacaaaatgttttctgtttgggcatcctgaggaagttgtattagctgttaatgctctgtgagtttagaaaaagtcttgatagtaaatctagtttttgacacagtgcatgaactaagtagttaaatatttacatattcagaaaggaatagtggaaaaggtatcttggttatgacaaagtcattacaaatgtgactaagtcattacaaatgtgactgagtcattacagtggaccctctgggtgcattgaaaagaatccgttttatatccaggtttcagaggacctggaataataaaaagctttggattttgcattcagtgtagttggattttgggaccttggcctcagtgttatttactgggattggcatacgtgttcacaggcagagtagttgatctcacacaacgggtgatctcacaaaactggtaagtttcttatgctcatgagccctccctttttttttttaatttggtgcctgcaactttcttaacaatgattctacttcctgggctatcacattataatgctcttggcctcttttttgctgctgttttgctattcttaaacttaggccaagtaccaatgttggctgttagaagggattctgttcattcaacatgcaactttagggaatggaagtaagttcatttttaagttgtgttgtcagtaggtgcggtgtctagggtagtgaatcctgtaagttcaaatttatgattaggtgacgagttgacattgagattgtccttttccctgatcaaaaaatgaataaagcctttttaaacaaaa

SEQ ID NO: 418609 - DNA, 2435 bp, Homo sapiens
ggccgggtgttaatcggccgaggtacaacgctccgccgccgctgctgccgcgacccggactgcgcgccagcacccccctgccgacagctccgtcactatggaggatatgaacgagtacagcaatatagaggaattcgcagagggatccaagatcaacgcgagcaagaatcagcaggatgacggtaaaatgtttattggaggcttgagctgggatacaagcaaaaaagatctgacagagtacttgtctcgatttggggaagttgtagactgcacaattaaaacagatccagtcactgggagatcaagaggatttggatttgtgcttttcaaagatgctgctagtgttgataaggttttggaactgaaagaacacaaactggatggcaaattgatagatcccaaaagggccaaagctttaaaagggaaagaacctcccaaaaaggtttttgtgggtggattgagcccggatacttctgaagaacaaattaaagaatattttggagcctttggagagattgaaaatattgaacttcccatggatacaaaaacaaatgaaagaagaggattttgttttatcacatatactgatgaagagccagtaaaaaaattgttagaaagcagataccatcaaattggttctgggaagtgtgaaatcaaagttgcacaacccaaagaggtatataggcagcaacagcaacaacaaaaaggtggaagaggtgctgcagctggtggacgaggtggtacgaggggtcgtggccgaggtcagggccaaaactggaaccaaggatttaataactattatgatcaaggatatggaaattacaatagtgcctatggtggtgatcaaaactatagtggctatggcggatatgattatactgggtataactatgggaactatggatatggacagggatatgcagactacagtggccaacagagcacttatggcaaggcatctcgagggggtggcaatcaccaaaacaattaccagccatactaaaggagaacattggagaaaacaggtgtgtataagagtacaggaaaacagtagaaatgtctaatttaatttaaagatcaatagacaaatgaaacgtaaaaacaaaatactatgtagcctgtttttactaaattgttgattttttaattgctttatgagcctgttttgcctaaagtgtctatagatctttaactttaaagtcttatctcactttctttagtattgcagaaaaacttaagagtttttctgtttgcttttgtgtaccaggtggtctagaggaataattaaacattttagaactattaacaggtaaagtactgaaatgggtacaacttaaggaaaacaagaatgttgtcttctaactctgacattataccttgtttgtacccgccagcgggaacttcattgcaggccgtgtgtcaccctgaccacgtctatctctgggggtcgcacgttgcgggcagagcgcaaggcatacaccagaaaacgctgtcctgtggtatggtctcttccaacttcatgtaccagcgtaaagattaaagtggaaaacttcagactttggcttcatttttaatctttttggagattaagtgtctaaacttaacttaaatggttttttacaggagttaaagtacataaatgcctttttacagcttaatcattttggtcttctgtttagtgttgtatttcaattgtggagcctcattttaagtgttcattcttttaagatttaatgcttgctttttctttttatagctaatagtgaaatctacaaaccaaaacaagaacttttaaatctgggatataaattaaagatcatatgcacagatcaatttatgttcttgtaataaacttattagaaattggtgtttgtgatagcattttacttgggttactagagatgcttctagtagaccttaatctagcatagttgaacctctgaatatgggaaggttgtattcccagattctttcctgaatagatttgaatttaatgtcatttgggaactccagggtgagtttattgactacccaaactgtattttaccaataaatatgcatatgatctttaattattgaagaaaataaagtgaggacttaaaacaattcatgaaagtggacctttaaaagcttgtcagagttgcacaaatctaactggtattttgtttttgtttttaggaggagatgttaaagtaacccatcttgcaggacgacattgaagattggtcttctgttgatctaagatgattattttgtaaaagactttctagtgtacaagacaccattgtgtccaactgtatatagctgccaattagttttctttgtttttactttgtcctttgctatctgtgttatgactcaatgtggatttgtttatacacattttatttgtatcatttcatgttaaacctcaaataaatgcttccttatgtgat

SEQ ID NO: 418610 - DNA, 3835 bp, Homo sapiens
ggccgggtgttaatcggccgaggtacaacgctccgccgccgctgctgccgcgacccggactgcgcgccagcacccccctgccgacagctccgtcactatggaggatatgaacgagtacagcaatatagaggaattcgcagagggatccaagatcaacgcgagcaagaatcagcaggatgacggtaaaatgtttattggaggcttgagctgggatacaagcaaaaaagatctgacagagtacttgtctcgatttggggaagttgtagactgcacaattaaaacagatccagtcactgggagatcaagaggatttggatttgtgcttttcaaagatgctgctagtgttgataaggttttggaactgaaagaacacaaactggatggcaaattgatagatcccaaaagggccaaagctttaaaagggaaagaacctcccaaaaaggtttttgtgggtggattgagcccggatacttctgaagaacaaattaaagaatattttggagcctttggagagattgaaaatattgaacttcccatggatacaaaaacaaatgaaagaagaggattttgttttatcacatatactgatgaagagccagtaaaaaaattgttagaaagcagataccatcaaattggttctgggaagtgtgaaatcaaagttgcacaacccaaagaggtatataggcagcaacagcaacaacaaaaaggtggaagaggtgctgcagctggtggacgaggtggtacgaggggtcgtggccgaggtcagggccaaaactggaaccaaggatttaataactattatgatcaaggatatggaaattacaatagtgcctatggtggtgatcaaaactatagtggctatggcggatatgattatactgggtataactatgggaactatggatatggacagggatatgcagactacagtggccaacagagcacttatggcaaggcatctcgagggggtggcaatcaccaaaacaattaccagccatactaaaggagaacattggagaaaacaggtgtgtataagagtacaggaaaacagtagaaatgtctaatttaatttaaagatcaatagacaaatgaaacgtaaaaacaaaatactatgtagcctgtttttactaaattgttgattttttaattgctttatgagcctgttttgcctaaagtgtctatagatctttaactttaaagtcttatctcactttctttagtattgcagaaaaacttaagagtttttctgtttgcttttgtgtaccaggtggtctagaggaataattaaacattttagaactattaacaggtaaagtactgaaatgggtacaacttaaggaaaacaagaatgttgtcttctaactctgacattataccttgtttgtacccgccagcgggaacttcattgcaggccgtgtgtcaccctgaccacgtctatctctgggggtcgcacgttgcgggcagagcgcaaggcatacaccagaaaacgctgtcctgtggtatggtctcttccaacttcatgtaccagcgtaaagattaaagtggaaaacttcagactttggcttcatttttaatctttttggagattaagtgtctaaacttaacttaaatggttttttacaggagttaaagtacataaatgcctttttacagcttaatcattttggtcttctgtttagtgttgtatttcaattgtggagcctcattttaagtgttcattcttttaagatttaatgcttgctttttctttttatagctaatagtgaaatctacaaaccaaaacaagaacttttaaatctgggatataaattaaagatcatatgcacagatcaatttatgttcttgtaataaacttattagaaattggtgtttgtgatagcattttacttgggttactagagatgcttctagtagaccttaatctagcatagttgaacctctgaatatgggaaggttgtattcccagattctttcctgaatagatttgaatttaatgtcatttgggaactccagggtgagtttattgactacccaaactgtattttaccaataaatatgcatatgatctttaattattgaagaaaataaagtgaggacttaaaacaattcatgaaagtggacctttaaaagcttgtcagagttgcacaaatctaactggtattttgtttttgtttttaggaggagatgttaaagtaacccatcttgcaggacgacattgaagattggtcttctgttgatctaagatgattattttgtaaaagactttctagtgtacaagacaccattgtgtccaactgtatatagctgccaattagttttctttgtttttactttgtcctttgctatctgtgttatgactcaatgtggatttgtttatacacattttatttgtatcatttcatgttaaacctcaaataaatgcttccttatgtgattgcttttctgcgtcaggtactacatagctctgtaaaaaatgtaatttaaaataagcaataattaaggcacagttgattttgtagagtattggtccatacagagaaactgtggtcctttataaatagccagccagcgtcaccctcttctccaatttgtaggtgtattttatgctcttaaggcttcatcttctccctgtaactgagatttctaccacacctttgaacaatgttctttcccttctggttatctgaagactgtcctgaaaggaagacataagtgttgtgattagtagaagctttctagtagaccatatttcttctggattgtaataaaattgttagtagctccttttactttgttcctgtctctggaaagccatttttgaattgctgattactttggctttaatcagtggtcacctagaaaaagctttgtaatcataacacaatgagtaattcttgataaaagttcagatacaaaaggagcactgtaaaactggtaggagctatggtttaagagcattggaagtagttacaactcaaggattttggtagaaaggtatgagtttggtcgaaaaattaaaatagtggcaaaataagatttagttgtgttttctcagagccgccacaagattgaacaaaatgttttctgtttgggcatcctgaggaagttgtattagctgttaatgctctgtgagtttagaaaaagtcttgatagtaaatctagtttttgacacagtgcatgaactaagtagttaaatatttacatattcagaaaggaatagtggaaaaggtatcttggttatgactaagtcattacaaatgtgactgagtcattacagtggaccctctgggtgcattgaaaagaatccgttttatatccaggtttcagaggacctggaataataaaaagctttggattttgcattcagtgtagttggattttgggaccttggcctcagtgttatttactgggattggcatacgtgttcacaggcagagtagttgatctcacacaacgggtgatctcacaaaactggtaagtttcttatgctcatgagccctccctttttttttttaatttggtgcctgcaactttcttaacaatgattctacttcctgggctatcacattataatgctcttggcctcttttttgctgctgttttgctattcttaaacttaggccaagtaccaatgttggctgttagaagggattctgttcattcaacatgcaactttagggaatggaagtaagttcatttttaagttgtgttgtcagtaggtgcggtgtctagggtagtgaatcctgtaagttcaaatttatgattaggtgacgagttgacattgagattgtccttttccctgatcaaaaaatgaataaagcctttttaaacaaaa

SEQ ID NO: 418611 - DNA, 3801 bp, Homo sapiens
ggccgggtgttaatcggccgaggtacaacgctccgccgccgctgctgccgcgacccggactgcgcgccagcacccccctgccgacagctccgtcactatggaggatatgaacgagtacagcaatatagaggaattcgcagagggatccaagatcaacgcgagcaagaatcagcaggatgacggtaaaatgtttattggaggcttgagctgggatacaagcaaaaaagatctgacagagtacttgtctcgatttggggaagttgtagactgcacaattaaaacagatccagtcactgggagatcaagaggatttggatttgtgcttttcaaagatgctgctagtgttgataaggttttggaactgaaagaacacaaactggatggcaaattgatagatcccaaaagggccaaagctttaaaagggaaagaacctcccaaaaaggtttttgtgggtggattgagcccggatacttctgaagaacaaattaaagaatattttggagcctttggagagattgaaaatattgaacttcccatggatacaaaaacaaatgaaagaagaggattttgttttatcacatatactgatgaagagccagtaaaaaaattgttagaaagcagataccatcaaattggttctgggaagtgtgaaatcaaagttgcacaacccaaagaggtatataggcagcaacagcaacaacaaaaaggtggaagaggtgctgcagctggtggacgaggtggtacgaggggtcgtggccgaggtcagggccaaaactggaaccaaggatttaataactattatgatcaaggatatggaaattacaatagtgcctatggtggtgatcaaaactatagtggctatggcggatatgattatactgggtataactatgggaactatggatatggacagggatatgcagactacagtggccaacagagcacttatggcaaggcatctcgagggggtggcaatcaccaaaacaattaccagccatactaaaggagaacattggagaaaacaggtgtgtataagagtacaggaaaacagtagaaatgtctaatttaatttaaagatcaatagacaaatgaaacgtattatgagcctgttttgcctaaagtgtctatagatctttaactttaaagtcttatctcactttctttagtattgcagaaaaacttaagagtttttctgtttgcttttgtgtaccaggtggtctagaggaataattaaacattttagaactattaacaggtaaagtactgaaatgggtacaacttaaggaaaacaagaatgttgtcttctaactctgacattataccttgtttgtacccgccagcgggaacttcattgcaggccgtgtgtcaccctgaccacgtctatctctgggggtcgcacgttgcgggcagagcgcaaggcatacaccagaaaacgctgtcctgtggtatggtctcttccaacttcatgtaccagcgtaaagattaaagtggaaaacttcagactttggcttcatttttaatctttttggagattaagtgtctaaacttaacttaaatggttttttacaggagttaaagtacataaatgcctttttacagcttaatcattttggtcttctgtttagtgttgtatttcaattgtggagcctcattttaagtgttcattcttttaagatttaatgcttgctttttctttttatagctaatagtgaaatctacaaaccaaaacaagaacttttaaatctgggatataaattaaagatcatatgcacagatcaatttatgttcttgtaataaacttattagaaattggtgtttgtgatagcattttacttgggttactagagatgcttctagtagaccttaatctagcatagttgaacctctgaatatgggaaggttgtattcccagattctttcctgaatagatttgaatttaatgtcatttgggaactccagggtgagtttattgactacccaaactgtattttaccaataaatatgcatatgatctttaattattgaagaaaataaagtgaggacttaaaacaattcatgaaagtggacctttaaaagcttgtcagagttgcacaaatctaactggtattttgtttttgtttttaggaggagatgttaaagtaacccatcttgcaggacgacattgaagattggtcttctgttgatctaagatgattattttgtaaaagactttctagtgtacaagacaccattgtgtccaactgtatatagctgccaattagttttctttgtttttactttgtcctttgctatctgtgttatgactcaatgtggatttgtttatacacattttatttgtatcatttcatgttaaacctcaaataaatgcttccttatgtgattgcttttctgcgtcaggtactacatagctctgtaaaaaatgtaatttaaaataagcaataattaaggcacagttgattttgtagagtattggtccatacagagaaactgtggtcctttataaatagccagccagcgtcaccctcttctccaatttgtaggtgtattttatgctcttaaggcttcatcttctccctgtaactgagatttctaccacacctttgaacaatgttctttcccttctggttatctgaagactgtcctgaaaggaagacataagtgttgtgattagtagaagctttctagtagaccatatttcttctggattgtaataaaattgttagtagctccttttactttgttcctgtctctggaaagccatttttgaattgctgattactttggctttaatcagtggtcacctagaaaaagctttgtaatcataacacaatgagtaattcttgataaaagttcagatacaaaaggagcactgtaaaactggtaggagctatggtttaagagcattggaagtagttacaactcaaggattttggtagaaaggtatgagtttggtcgaaaaattaaaatagtggcaaaataagatttagttgtgttttctcagagccgccacaagattgaacaaaatgttttctgtttgggcatcctgaggaagttgtattagctgttaatgctctgtgagtttagaaaaagtcttgatagtaaatctagtttttgacacagtgcatgaactaagtagttaaatatttacatattcagaaaggaatagtggaaaaggtatcttggttatgacaaagtcattacaaatgtgactaagtcattacaaatgtgactgagtcattacagtggaccctctgggtgcattgaaaagaatccgttttatatccaggtttcagaggacctggaataataaaaagctttggattttgcattcagtgtagttggattttgggaccttggcctcagtgttatttactgggattggcatacgtgttcacaggcagagtagttgatctcacacaacgggtgatctcacaaaactggtaagtttcttatgctcatgagccctccctttttttttttaatttggtgcctgcaactttcttaacaatgattctacttcctgggctatcacattataatgctcttggcctcttttttgctgctgttttgctattcttaaacttaggccaagtaccaatgttggctgttagaagggattctgttcattcaacatgcaactttagggaatggaagtaagttcatttttaagttgtgttgtcagtaggtgcggtgtctagggtagtgaatcctgtaagttcaaatttatgattaggtgacgagttgacattgagattgtccttttccctgatcaaaaaatgaataaagcctttttaaacaaaa

SEQ ID NO: 418612 - DNA, 3799 bp, Homo sapiens
ggccgggtgttaatcggccgaggtacaacgctccgccgccgctgctgccgcgacccggactgcgcgccagcacccccctgccgacagctccgtcactatggaggatatgaacgagtacagcaatatagaggaattcgcagagggatccaagatcaacgcgagcaagaatcagcaggatgacggtaaaatgtttattggaggcttgagctgggatacaagcaaaaaagatctgacagagtacttgtctcgatttggggaagttgtagactgcacaattaaaacagatccagtcactgggagatcaagaggatttggatttgtgcttttcaaagatgctgctagtgttgataaggttttggaactgaaagaacacaaactggatggcaaattgatagatcccaaaagggccaaagctttaaaagggaaagaacctcccaaaaaggtttttgtgggtggattgagcccggatacttctgaagaacaaattaaagaatattttggagcctttggagagattgaaaatattgaacttcccatggatacaaaaacaaatgaaagaagaggattttgttttatcacatatactgatgaagagccagtaaaaaaattgttagaaagcagataccatcaaattggttctgggaagtgtgaaatcaaagttgcacaacccaaagaggtatataggcagcaacagcaacaacaaaaaggtggaagaggtgctgcagctggtggacgaggtggtacgaggggtcgtggccgaggtcagggccaaaactggaaccaaggatttaataactattatgatcaaggatatggaaattacaatagtgcctatggtggtgatcaaaactatagtggctatggcggatatgattatactgggtataactatgggaactatggatatggacagggatatgcagactacagtggccaacagagcacttatggcaaggcatctcgagggggtggcaatcaccaaaacaattaccagccatactaaaggagaacattggagaaaacaggtgtgtataagagtacaggaaaacagtagaaatgtctaatttaatttaaagatcaatagacaaatgaaacgtaaaaacaaaatactatgtagcctgtttttactaaattgttgattttttaattgctttatgagcctgttttgcctaaagtgtctatagatctttaactttaaagtcttatctcactttctttagtattgcagaaaaacttaagagtttttctgtttgcttttgtgtaccaggtggtctagaggaataattaaacattttagaactattaacaggtaaagtactgaaatgggtacaacttaaggaaaacaagaatgttgtcttctaactctgacattataccttgtttgtacccgccagcgggaacttcattgcaggccgtgtgtcaccctgaccacgtctatctctgggggtcgcacgttgcgggcagagcgcaaggcatacaccagaaaacgctgtcctgtggtatggtctcttccaacttcatgtaccagcgtaaagattaaagtggaaaacttcagactttggcttcatttttaatctttttggagattaagtgtctaaacttaacttaaatggttttttacaggagttaaagtacataaatgcctttttacagcttaatcattttggtcttctgtttagtgttgtatttcaattgtggagcctcattttaagtgttcattcttttaagatttaatgcttgctttttctttttatagctaatagtgaaatctacaaaccaaaacaagaacttttaaatctgggatataaattaaagatcatatgcacagatcaatttatgttcttgtaataaacttattagaaattggtgtttgtgatagcattttacttgggttactagagatgcttctagtagaccttaatctagcatagttgaacctctgaatatgggaaggttgtattcccagattctttcctgaatagatttgaatttaatgtcatttgggaactccagggtgagtttattgactacccaaactgtattttaccaataaatatgcatatgatctttaattattgaagaaaataaagtgaggacttaaaacaattcatgaaagtggacctttaaaagcttgtcagagttgcacaaatctaactggtattttgtttttgtttttaggaggagatgttaaagtaacccatcttgcaggacgacattgaagattggtcttctgttgatctaagatgattattttgtaaaagactttctagtgtacaagacaccattgtgtccaactgtatatagctgccaattagttttctttgtttttactttgtcctttgctatctgtgttatgactcaatgtggatttgtttatacacattttatttgtatcatttcatgttaaacctcaaataaatgcttccttatgtgattgcttttctgcgtcaggtactacatagctctgtaaaaaatgtaatttaaaataagcaataattaaggcacagttgattttgtagagtattggtccatacagagaaactgtggtcctttataaatagccagccagcgtcaccctcttctccaatttgtaggtgtattttatgctcttaaggcttcatcttctccctgtaactgagatttctaccacacctttgaacaatgttctttcccttctggttatctgaagactgtcctgaaaggaagacataagtgttgtgattagtagaagctttctagtagaccatatttcttctggattgtaataaaattgttagtagctccttttactttgttcctgtctctggaaagccatttttgaattgctgattactttggctttaatcagtggtcacctagaaaaagctttgtaatcataacacaatgagtaattcttgataaaagttcagatacaaaaggagcactgtaaaactggtaggagctatggtttaagagcattggaagtagttacaactcaaggattttggtagaaaggtatgagtttggtcgaaaaattaaaatagtggcaaaataagatttagttgtgttttctcagagccgccacaagattgaacaaaatgttttctgtttgggcatcctgaggaagttgtattagctgttaatgctctgtgagtttagaaaaagtcttgatagtaaatctagtttttgacacagtgcatgaactaagtagttaaatatttacatattcagaaaggaatagtggaaaaggtatcttggttatgacaaagtcattacaaatgtgactaagtcattacaaatgtgactgagtcattacagtggaccctctgggtgctttggattttgcattcagtgtagttggattttgggaccttggcctcagtgttatttactgggattggcatacgtgttcacaggcagagtagttgatctcacacaacgggtgatctcacaaaactggtaagtttcttatgctcatgagccctccctttttttttttaatttggtgcctgcaactttcttaacaatgattctacttcctgggctatcacattataatgctcttggcctcttttttgctgctgttttgctattcttaaacttaggccaagtaccaatgttggctgttagaagggattctgttcattcaacatgcaactttagggaatggaagtaagttcatttttaagttgtgttgtcagtaggtgcggtgtctagggtagtgaatcctgtaagttcaaatttatgattaggtgacgagttgacattgagattgtccttttccctgatcaaaaaatgaataaagcctttttaaacaaaa

SEQ ID NO: 418613 - DNA, 4188 bp, Homo sapiens
ggccgggtgttaatcggccgaggtacaacgctccgccgccgctgctgccgcgacccggactgcgcgccagcacccccctgccgacagctccgtcactatggaggatatgaacgagtacagcaatatagaggaattcgcagagggatccaagatcaacgcgagcaagaatcagcaggatgacggtaaaatgtttattggaggcttgagctgggatacaagcaaaaaagatctgacagagtacttgtctcgatttggggaagttgtagactgcacaattaaaacagatccagtcactgggagatcaagaggatttggatttgtgcttttcaaagatgctgctagtgttgataaggttttggaactgaaagaacacaaactggatggcaaattgatagatcccaaaagggccaaagctttaaaagggaaagaacctcccaaaaaggtttttgtgggtggattgagcccggatacttctgaagaacaaattaaagaatattttggagcctttggagagattgaaaatattgaacttcccatggatacaaaaacaaatgaaagaagaggattttgttttatcacatatactgatgaagagccagtaaaaaaattgttagaaagcagataccatcaaattggttctgggaagtgtgaaatcaaagttgcacaacccaaagaggtatataggcagcaacagcaacaacaaaaaggtggaagaggtgctgcagctggtggacgaggtggtacgaggggtcgtggccgaggtcagggccaaaactggaaccaaggatttaataactattatgatcaaggatatggaaattacaatagtgcctatggtggtgatcaaaactatagtggctatggcggatatgattatactgggtataactatgggaactatggatatggacagggatatgcagactacagtggtaagaatatttaacttaattttataaagcagtggtattaaaattcattgttaacatacaatcctgttctgaaattgtgtgtatgggctttccattaaagtgttcggagttaagtgtttgaggcatgttacaatcataggatgattatactaacatagactggtggttataaatgaactaggatgtatgatttatgagtagcatctaatgggtgctaaaatatcttaatactttttatttagcatgcaaagatttgtagatttaatagtttgtgtttgtaaagaaagttttgtagaaaactatcttaatgagaattctgtgttttcaaaataggccaacagagcacttatggcaaggcatctcgagggggtggcaatcaccaaaacaattaccagccatactaaaggagaacattggagaaaacaggtgtgtataagagtacaggaaaacagtagaaatgtctaatttaatttaaagatcaatagacaaatgaaacgtaaaaacaaaatactatgtagcctgtttttactaaattgttgattttttaattgctttatgagcctgttttgcctaaagtgtctatagatctttaactttaaagtcttatctcactttctttagtattgcagaaaaacttaagagtttttctgtttgcttttgtgtaccaggtggtctagaggaataattaaacattttagaactattaacaggtaaagtactgaaatgggtacaacttaaggaaaacaagaatgttgtcttctaactctgacattataccttgtttgtacccgccagcgggaacttcattgcaggccgtgtgtcaccctgaccacgtctatctctgggggtcgcacgttgcgggcagagcgcaaggcatacaccagaaaacgctgtcctgtggtatggtctcttccaacttcatgtaccagcgtaaagattaaagtggaaaacttcagactttggcttcatttttaatctttttggagattaagtgtctaaacttaacttaaatggttttttacaggagttaaagtacataaatgcctttttacagcttaatcattttggtcttctgtttagtgttgtatttcaattgtggagcctcattttaagtgttcattcttttaagatttaatgcttgctttttctttttatagctaatagtgaaatctacaaaccaaaacaagaacttttaaatctgggatataaattaaagatcatatgcacagatcaatttatgttcttgtaataaacttattagaaattggtgtttgtgatagcattttacttgggttactagagatgcttctagtagaccttaatctagcatagttgaacctctgaatatgggaaggttgtattcccagattctttcctgaatagatttgaatttaatgtcatttgggaactccagggtgagtttattgactacccaaactgtattttaccaataaatatgcatatgatctttaattattgaagaaaataaagtgaggacttaaaacaattcatgaaagtggacctttaaaagcttgtcagagttgcacaaatctaactggtattttgtttttgtttttaggaggagatgttaaagtaacccatcttgcaggacgacattgaagattggtcttctgttgatctaagatgattattttgtaaaagactttctagtgtacaagacaccattgtgtccaactgtatatagctgccaattagttttctttgtttttactttgtcctttgctatctgtgttatgactcaatgtggatttgtttatacacattttatttgtatcatttcatgttaaacctcaaataaatgcttccttatgtgattgcttttctgcgtcaggtactacatagctctgtaaaaaatgtaatttaaaataagcaataattaaggcacagttgattttgtagagtattggtccatacagagaaactgtggtcctttataaatagccagccagcgtcaccctcttctccaatttgtaggtgtattttatgctcttaaggcttcatcttctccctgtaactgagatttctaccacacctttgaacaatgttctttcccttctggttatctgaagactgtcctgaaaggaagacataagtgttgtgattagtagaagctttctagtagaccatatttcttctggattgtaataaaattgttagtagctccttttactttgttcctgtctctggaaagccatttttgaattgctgattactttggctttaatcagtggtcacctagaaaaagctttgtaatcataacacaatgagtaattcttgataaaagttcagatacaaaaggagcactgtaaaactggtaggagctatggtttaagagcattggaagtagttacaactcaaggattttggtagaaaggtatgagtttggtcgaaaaattaaaatagtggcaaaataagatttagttgtgttttctcagagccgccacaagattgaacaaaatgttttctgtttgggcatcctgaggaagttgtattagctgttaatgctctgtgagtttagaaaaagtcttgatagtaaatctagtttttgacacagtgcatgaactaagtagttaaatatttacatattcagaaaggaatagtggaaaaggtatcttggttatgacaaagtcattacaaatgtgactaagtcattacaaatgtgactgagtcattacagtggaccctctgggtgcattgaaaagaatccgttttatatccaggtttcagaggacctggaataataaaaagctttggattttgcattcagtgtagttggattttgggaccttggcctcagtgttatttactgggattggcatacgtgttcacaggcagagtagttgatctcacacaacgggtgatctcacaaaactggtaagtttcttatgctcatgagccctccctttttttttttaatttggtgcctgcaactttcttaacaatgattctacttcctgggctatcacattataatgctcttggcctcttttttgctgctgttttgctattcttaaacttaggccaagtaccaatgttggctgttagaagggattctgttcattcaacatgcaactttagggaatggaagtaagttcatttttaagttgtgttgtcagtaggtgcggtgtctagggtagtgaatcctgtaagttcaaatttatgattaggtgacgagttgacattgagattgtccttttccctgatcaaaaaatgaataaagcctttttaaacaaaa

SEQ ID NO: 418614 - DNA, 4616 bp, Homo sapiens
ggccgggtgttaatcggccgaggtacaacgctccgccgccgctgctgccgcgacccggactgcgcgccagcacccccctgccgacagctccgtcactatggaggatatgaacgagtacagcaatatagaggaattcgcagagggatccaagatcaacgcgagcaagaatcagcaggatgacggtaaaatgtttattggaggcttgagctgggatacaagcaaaaaagatctgacagagtacttgtctcgatttggggaagttgtagactgcacaattaaaacagatccagtcactgggagatcaagaggatttggatttgtgcttttcaaagatgctgctagtgttgataaggttttggaactgaaagaacacaaactggatggcaaattgatagatcccaaaagggccaaagctttaaaagggaaagaacctcccaaaaaggtttttgtgggtggattgagcccggatacttctgaagaacaaattaaagaatattttggagcctttggagagattgaaaatattgaacttcccatggatacaaaaacaaatgaaagaagaggattttgttttatcacatatactgatgaagagccagtaaaaaaattgttagaaagcagataccatcaaattggttctgggaagtgtgaaatcaaagttgcacaacccaaagaggtatataggcagcaacagcaacaacaaaaaggtggaagaggtgctgcagctggtggacgaggtggtacgaggggtcgtggccgaggtcagggccaaaactggaaccaaggatttaataactattatgatcaaggatatggaaattacaatagtgcctatggtggtgatcaaaactatagtggctatggcggatatgattatactgggtataactatgggaactatggatatggacagggatatgcagactacagtggccaacagagcacttatggcaaggcatctcgagggggtggcaatcaccaaaacaattaccagccatactaaaggagaacattggagaaaacaggtgtgtataagagtacaggaaaacagtagaaatgtctaatttaatttaaagatcaatagacaaatgaaacgtaaaaacaaaatactatgtagcctgtttttactaaattgttgattttttaattgctttatgagcctgttttgcctaaagtgtctatagatctttaactttaaagtcttatctcactttctttagtattgcagaaaaacttaagagtttttctgtttgcttttgtgtaccaggtggtctagaggaataattaaacattttagaactattaacaggtaaagtactgaaatgggtacaacttaaggaaaacaagaatgttgtcttctaactctgacattataccttgtttgtacccgccagcgggaacttcattgcaggccgtgtgtcaccctgaccacgtctatctctgggggtcgcacgttgcgggcagagcgcaaggcatacaccagaaaacgctgtcctgtggtatggtctcttccaacttcatgtaccagcgtaaagattaaagtggaaaacttcagactttggcttcatttttaatctttttggagattaagtgtctaaacttaacttaaatggttttttacaggagttaaagtacataaatgcctttttacagcttaatcattttggtcttctgtttagtgttgtatttcaattgtggagcctcattttaagtgttcattcttttaagatttaatgcttgctttttctttttatagctaatagtgaaatctacaaaccaaaacaagaacttttaaatctgggatataaattaaagatcatatgcacagatcaatttatgttcttgtaataaacttattagaaattggtgtttgtgatagcattttacttgggttactagagatgcttctagtagaccttaatctagcatagttgaacctctgaatatgggaaggttgtattcccagattctttcctgaatagatttgaatttaatgtcatttgggaactccagggtgagtttattgactacccaaactgtattttaccaataaatatgcatatgatctttaattattgaagaaaataaagtgaggacttaaaacaattcatgaaagtggacctttaaaagcttgtcagagttgcacaaatctaactggtattttgtttttgtttttaggaggagatgttaaagtaacccatcttgcaggacgacattgaagattggtcttctgttgatctaagatgattattttgtaaaagactttctagtgtacaagacaccattgtgtccaactgtatatagctgccaattagttttctttgtttttactttgtcctttgctatctgtgttatgactcaatgtggatttgtttatacacattttatttgtatcatttcatgttaaacctcaaataaatgcttccttatgtgattgcttttctgcgtcaggtactacatagctctgtaaaaaatgtaatttaaaataagcaataattaaggcacagttgattttgtagagtattggtccatacagagaaactgtggtcctttataaatagccagccagcgtcaccctcttctccaatttgtaggtgtattttatgctcttaaggcttcatcttctccctgtaactgagatttctaccacacctttgaacaatgttctttcccttctggttatctgaagactgtcctgaaaggaagacataagtgttgtgattagtagaagctttctagtagaccatatttcttctggattgtaataaaattgttagtagctccttttactttgttcctgtctctggaaagccatttttgaattgctgattactttggctttaatcagtggtcacctagaaaaagctttgtaatcataacacaatgagtaattcttgataaaagttcagatacaaaaggagcactgtaaaactggtaggagctatggtttaagagcattggaagtagttacaactcaaggattttggtagaaaggtatgagtttggtcgaaaaattaaaatagtggcaaaataagatttagttgtgttttctcagagccgccacaagattgaacaaaatgttttctgtttgggcatcctgaggaagttgtattagctgttaatgctctgtgagtttagaaaaagtcttgatagtaaatctagtttttgacacagtgcatgaactaagtagttaaatatttacatattcagaaaggaatagtggaaaaggtatcttggttatgacaaagtcattacaaatgtgactaagtcattacaaatgtgactgagtcattacagtggaccctctgggtgcattgaaaagaatccgttttatatccaggtttcagaggacctggaataataaaaagctttggattttgcattcagtgtagttggattttgggaccttggcctcagtgttatttactgggattggcatacgtgttcacaggcagagtagttgatctcacacaacgggtgatctcacaaaactggtaagtttcttatgctcatgagccctccctttttttttttaatttggtgcctgcaactttcttaacaatgattctacttcctgggctatcacattataatgctcttggcctcttttttgctgctgttttgctattcttaaacttaggccaagtaccaatgttggctgttagaagggattctgttcattcaacatgcaactttagggaatggaagtaagttcatttttaagttgtgttgtcagtaggtgcggtgtctagggtagtgaatcctgtaagttcaaatttatgattaggtgacgagttgacattgagattgtccttttccctgatcaaaaaatgaataaagcctttttaaacaaaaaaaaaaaaaaaacaaaaaaaaaaaaaacattggggggggccggagaatgaggtggaacgcgtggcacgagaagcagagcaaaccgaccaggacagaaggtacaaagaggggagccggcggagcgcgcgaatggagcaagacaaacacacgaccagaccggacaaagaaacagacaacaagcgaggagaaagaaaggaggcaccagagcgacaccacgaggaagagaagaaacaaaaacaaagagcggagaaaggagcagaagtaaaaaccaaaacacgacggcaacgaaccaacagtaggagaggagggaagcagacaagacaaacgacaagaaaaaacgaacaagacacaaagacacagacaaaagcaagacaaccaagcggaaaggagaagacgagaagagacaaagaagccaaagaaaaaccaatcatcacgaataaggggaacaacgaaggacagaaagagaacaggggggaaggacacgagagcggagcagagcaggtaaaagtgagtgagcaacagaggcaacgcacagcagaggagaacagaagagagagtgaggaagaaggggcgagaagagcgagaaacggaggtgaaggaggcagcacagggcgcgacgcggaacagaggagaaaaggagcggcaccgagcagaggagagggaggaagagagaggcgaggagggacaggagagagagcacgagaggcaagagggcgacagaggagcgaagaggacgaaagaaggagcagagagtagactcg

SEQ ID NO: 418615 - DNA, 1282 bp, Homo sapiens
ggccgggtgttaatcggccgaggtacaacgctccgccgccgctgctgccgcgacccggactgcgcgccagcacccccctgccgacagctccgtcactatggaggatatgaacgagtacagcaatatagaggaattcgcagagggatccaagatcaacgcgagcaagaatcagcaggatgacggtaaaatgtttattggaggcttgagctgggatacaagcaaaaaagatctgacagagtacttgtctcgatttggggaagttgtagactgcacaattaaaacagatccagtcactgggagatcaagaggatttggatttgtgcttttcaaagatgctgctagtgttgataaggttttggaactgaaagaacacaaactggatggcaaattgatagatcccaaaagggccaaagctttaaaagggaaagaacctcccaaaaaggtttttgtgggtggattgagcccggatacttctgaagaacaaattaaagaatattttggagcctttggagagattgaaaatattgaacttcccatggatacaaaaacaaatgaaagaagaggattttgttttatcacatatactgatgaagagccagtaaaaaaattgttagaaagcagataccatcaaattggttctgggaagtgtgaaatcaaagttgcacaacccaaagaggtatataggcagcaacagcaacaacaaaaaggtggaagaggtgctgcagctggtggacgaggtggtacgaggggtcgtggccgaggtcagggccaaaactggaaccaaggatttaataactattatgatcaaggatatggaaattacaatagtgcctatggtggtgatcaaaactatagtggctatggcggatatgattatactgggtataactatgggaactatggatatggacagggatatgcagactacagtggccaacagagcacttatggcaaggcatctcgagggggtggcaatcaccaaaacaattaccagccatactaaaggagaacattggagaaaacaggaggagatgttaaagtaacccatcttgcaggacgacattgaagattggtcttctgttgatctaagatgattattttgtaaaagactttctagtgtacaagacaccattgtgtccaactgtatatagctgccaattagttttctttgtttttactttgtcctttgctatctgtgttatgactcaatgtggatttgtttatacacattttatttgtatcatttcatgttaaacctcaaataaatgcttccttatgtgat

SEQ ID NO: 418616 - DNA, 3196 bp, Homo sapiens
ggccgggtgttaatcggccgaggtacaacgctccgccgccgctgctgccgcgacccggactgcgcgccagcacccccctgccgacagctccgtcactatggaggatatgaacgagtacagcaatatagaggaattcgcagagggatccaagatcaacgcgagcaagaatcagcaggatgacggtaaaatgtttattggaggcttgagctgggatacaagcaaaaaagatctgacagagtacttgtctcgatttggggaagttgtagactgcacaattaaaacagatccagtcactgggagatcaagaggatttggatttgtgcttttcaaagatgctgctagtgttgataaggttttggaactgaaagaacacaaactggatggcaaattgatagatcccaaaagggccaaagctttaaaagggaaagaacctcccaaaaaggtttttgtgggtggattgagcccggatacttctgaagaacaaattaaagaatattttggagcctttggagagattgaaaatattgaacttcccatggatacaaaaacaaatgaaagaagaggattttgttttatcacatatactgatgaagagccagtaaaaaaattgttagaaagcagataccatcaaattggttctgggaagtgtgaaatcaaagttgcacaacccaaagaggtatataggcagcaacagcaacaacaaaaaggtggaagaggtgctgcagctggtggacgaggtggtacgaggggtcgtggccgaggtcagggccaaaactggaaccaaggatttaataactattatgatcaaggatatggaaattacaatagtgcctatggtggtgatcaaaactatagtggctatggcggatatgattatactgggtataactatgggaactatggatatggacagggatatgcagactacagtggccaacagagcacttatggcaaggcatctcgagggggtggcaatcaccaaaacaattaccagccatactaaaggagaacattggagaaaacaggtgtgtataagagtacaggaaaacagtagaaatgtctaatttaatttaaagatcaatagacaaatgaaacgtaaaaacaaaatactatgtagcctgtttttactaaattgttgattttttaattgctttatgagcctgttttgcctaaagtgtctatagatctttaactttaaagtcttatctcactttctttagtattgcagaaaaacttaagagtttttctgtttgcttttgtgtaccaggtggtctagaggaataattaaacattttagaactattaacaggtaaagtactgaaatgggtacaacttaaggaaaacaagaatgttgtcttctaactctgacattataccttgtttgtacccgccagcgggaacttcattgcaggccgtgtgtcaccctgaccacgtctatctctgggggtcgcacgttgcgggcagagcgcaaggcatacaccagaaaacgctgtcctgtggtatggtctcttccaacttcatgtaccagcgtaaagattaaagtggaaaacttcagactttggcttcatttttaatctttttggagattaagtgtctaaacttaacttaaatggttttttacaggagttaaagtacataaatgcctttttacagcttaatcattttggtcttctgtttagtgttgtatttcaattgtggagcctcattttaagtgttcattcttttaagatttaatgcttgctttttctttttatagctaatagtgaaatctacaaaccaaaacaagaacttttaaatctgggatataaattaaagatcatatgcacagatcaatttatgttcttgtaataaacttattagaaattggtgtttgtgatagcattttacttgggttactagagatgcttctagtagaccttaatctagcatagttgaacctctgaatatgggaaggttgtattcccagattctttcctgaatagatttgaatttaatgtcatttgggaactccagggtgagtttattgactacccaaactgtattttaccaataaatatgcatatgatctttaattattgaagaaaataaagtgaggacttaaaacaattcatgaaagtggacctttaaaagcttgtcagagttgcacaaatctaactggtattttgtttttgtttttaggaggagatgttaaagtaacccatcttgcaggacgacattgaagattggtcttctgttgatctaagatgattattttgtaaaagactttctagtgtacaagacaccattgtgtccaactgtatatagctgccaattagttttctttgtttttactttgtcctttgctatctgtgttatgactcaatgtggatttgtttatacacattttatttgtatcatttcatgttaaacctcaaataaatgcttccttatgtgataaaaaaaaaaaacaaaaaaaaaaaaaacattggggggggccggagaatgaggtggaacgcgtggcacgagaagcagagcaaaccgaccaggacagaaggtacaaagaggggagccggcggagcgcgcgaatggagcaagacaaacacacgaccagaccggacaaagaaacagacaacaagcgaggagaaagaaaggaggcaccagagcgacaccacgaggaagagaagaaacaaaaacaaagagcggagaaaggagcagaagtaaaaaccaaaacacgacggcaacgaaccaacagtaggagaggagggaagcagacaagacaaacgacaagaaaaaacgaacaagacacaaagacacagacaaaagcaagacaaccaagcggaaaggagaagacgagaagagacaaagaagccaaagaaaaaccaatcatcacgaataaggggaacaacgaaggacagaaagagaacaggggggaaggacacgagagcggagcagagcaggtaaaagtgagtgagcaacagaggcaacgcacagcagaggagaacagaagagagagtgaggaagaaggggcgagaagagcgagaaacggaggtgaaggaggcagcacagggcgcgacgcggaacagaggagaaaaggagcggcaccgagcagaggagagggaggaagagagaggcgaggagggacaggagagagagcacgagaggcaagagggcgacagaggagcgaagaggacgaaagaaggagcagagagtagactcg

SEQ ID NO: 418617 - DNA, 4744 bp, Homo sapiens
ggccgggtgttaatcggccgaggtacaacgctccgccgccgctgctgccgcgacccggactgcgcgccagcacccccctgccgacagctccgtcactatggaggatatgaacgagtacagcaatatagaggaattcgcagagggatccaagatcaacgcgagcaagaatcagcaggatgacggtaaaatgtttattggaggcttgagctgggatacaagcaaaaaagatctgacagagtacttgtctcgatttggggaagttgtagactgcacaattaaaacagatccagtcactgggagatcaagaggatttggatttgtgcttttcaaagatgctgctagtgttgataaggttttggaactgaaagaacacaaactggatggcaaattgatagatcccaaaagggccaaagctttaaaagggaaagaacctcccaaaaaggtttttgtgggtggattgagcccggatacttctgaagaacaaattaaagaatattttggagcctttggagagattgaaaatattgaacttcccatggatacaaaaacaaatgaaagaagaggattttgttttatcacatatactgatgaagagccagtaaaaaaattgttagaaagcagataccatcaaattggttctgggaagtgtgaaatcaaagttgcacaacccaaagaggtatataggcagcaacagcaacaacaaaaaggtggaagaggtgctgcagctggtggacgaggtggtacgaggggtcgtggccgagaggtgagacttaattcttgaaatatgactccgtggtttatttaagctgtatactgctgaatatgagtagtcctgtaccaaagcaaaactttaaacttaaaaccattccagcggaggggggactgttcagcttagtggaggttgtgtgtggtggttttttgttgtgagctcactggtttcaaaaaactgttaaaagtgtggccactttgacaattagtgtcatcactgataggaaaagtgtaccattacatgatacaccgtggtgtgataggttttcttgggcaggagtccttgttttaaacagaacagtgtacctgtcttcggctttaatggaaaattgaatgattttccattaagtttaggaagtttgatactggcacaattggactttctgcctccttttttataacagctggaaaaatagtttttcaagcagatagcaatatatatgtccattctgccctttaagatttgcagagtgagagacaagaacgcatcattttatgttagaattgggggtcagaagttgtttcctaacaatcattgtgcattgtttcgtcagggccaaaactggaaccaaggatttaataactattatgatcaaggatatggaaattacaatagtgcctatggtggtgatcaaaactatagtggctatggcggatatgattatactgggtataactatgggaactatggatatggacagggatatgcagactacagtggtaagaatatttaacttaattttataaagcagtggtattaaaattcattgttaacatacaatcctgttctgaaattgtgtgtatgggctttccattaaagtgttcggagttaagtgtttgaggcatgttacaatcataggatgattatactaacatagactggtggttataaatgaactaggatgtatgatttatgagtagcatctaatgggtgctaaaatatcttaatactttttatttagcatgcaaagatttgtagatttaatagtttgtgtttgtaaagaaagttttgtagaaaactatcttaatgagaattctgtgttttcaaaataggccaacagagcacttatggcaaggcatctcgagggggtggcaatcaccaaaacaattaccagccatactaaaggagaacattggagaaaacaggtgtgtataagagtacaggaaaacagtagaaatgtctaatttaatttaaagatcaatagacaaatgaaacgtaaaaacaaaatactatgtagcctgtttttactaaattgttgattttttaattgctttatgagcctgttttgcctaaagtgtctatagatctttaactttaaagtcttatctcactttctttagtattgcagaaaaacttaagagtttttctgtttgcttttgtgtaccaggtggtctagaggaataattaaacattttagaactattaacaggtaaagtactgaaatgggtacaacttaaggaaaacaagaatgttgtcttctaactctgacattataccttgtttgtacccgccagcgggaacttcattgcaggccgtgtgtcaccctgaccacgtctatctctgggggtcgcacgttgcgggcagagcgcaaggcatacaccagaaaacgctgtcctgtggtatggtctcttccaacttcatgtaccagcgtaaagattaaagtggaaaacttcagactttggcttcatttttaatctttttggagattaagtgtctaaacttaacttaaatggttttttacaggagttaaagtacataaatgcctttttacagcttaatcattttggtcttctgtttagtgttgtatttcaattgtggagcctcattttaagtgttcattcttttaagatttaatgcttgctttttctttttatagctaatagtgaaatctacaaaccaaaacaagaacttttaaatctgggatataaattaaagatcatatgcacagatcaatttatgttcttgtaataaacttattagaaattggtgtttgtgatagcattttacttgggttactagagatgcttctagtagaccttaatctagcatagttgaacctctgaatatgggaaggttgtattcccagattctttcctgaatagatttgaatttaatgtcatttgggaactccagggtgagtttattgactacccaaactgtattttaccaataaatatgcatatgatctttaattattgaagaaaataaagtgaggacttaaaacaattcatgaaagtggacctttaaaagcttgtcagagttgcacaaatctaactggtattttgtttttgtttttaggaggagatgttaaagtaacccatcttgcaggacgacattgaagattggtcttctgttgatctaagatgattattttgtaaaagactttctagtgtacaagacaccattgtgtccaactgtatatagctgccaattagttttctttgtttttactttgtcctttgctatctgtgttatgactcaatgtggatttgtttatacacattttatttgtatcatttcatgttaaacctcaaataaatgcttccttatgtgattgcttttctgcgtcaggtactacatagctctgtaaaaaatgtaatttaaaataagcaataattaaggcacagttgattttgtagagtattggtccatacagagaaactgtggtcctttataaatagccagccagcgtcaccctcttctccaatttgtaggtgtattttatgctcttaaggcttcatcttctccctgtaactgagatttctaccacacctttgaacaatgttctttcccttctggttatctgaagactgtcctgaaaggaagacataagtgttgtgattagtagaagctttctagtagaccatatttcttctggattgtaataaaattgttagtagctccttttactttgttcctgtctctggaaagccatttttgaattgctgattactttggctttaatcagtggtcacctagaaaaagctttgtaatcataacacaatgagtaattcttgataaaagttcagatacaaaaggagcactgtaaaactggtaggagctatggtttaagagcattggaagtagttacaactcaaggattttggtagaaaggtatgagtttggtcgaaaaattaaaatagtggcaaaataagatttagttgtgttttctcagagccgccacaagattgaacaaaatgttttctgtttgggcatcctgaggaagttgtattagctgttaatgctctgtgagtttagaaaaagtcttgatagtaaatctagtttttgacacagtgcatgaactaagtagttaaatatttacatattcagaaaggaatagtggaaaaggtatcttggttatgacaaagtcattacaaatgtgactaagtcattacaaatgtgactgagtcattacagtggaccctctgggtgcattgaaaagaatccgttttatatccaggtttcagaggacctggaataataaaaagctttggattttgcattcagtgtagttggattttgggaccttggcctcagtgttatttactgggattggcatacgtgttcacaggcagagtagttgatctcacacaacgggtgatctcacaaaactggtaagtttcttatgctcatgagccctccctttttttttttaatttggtgcctgcaactttcttaacaatgattctacttcctgggctatcacattataatgctcttggcctcttttttgctgctgttttgctattcttaaacttaggccaagtaccaatgttggctgttagaagggattctgttcattcaacatgcaactttagggaatggaagtaagttcatttttaagttgtgttgtcagtaggtgcggtgtctagggtagtgaatcctgtaagttcaaatttatgattaggtgacgagttgacattgagattgtccttttccctgatcaaaaaatgaataaagcctttttaaacaaaa

SEQ ID NO: 418618 - DNA, 2807 bp, Homo sapiens
ggccgggtgttaatcggccgaggtacaacgctccgccgccgctgctgccgcgacccggactgcgcgccagcacccccctgccgacagctccgtcactatggaggatatgaacgagtacagcaatatagaggaattcgcagagggatccaagatcaacgcgagcaagaatcagcaggatgacggtaaaatgtttattggaggcttgagctgggatacaagcaaaaaagatctgacagagtacttgtctcgatttggggaagttgtagactgcacaattaaaacagatccagtcactgggagatcaagaggatttggatttgtgcttttcaaagatgctgctagtgttgataaggttttggaactgaaagaacacaaactggatggcaaattgatagatcccaaaagggccaaagctttaaaagggaaagaacctcccaaaaaggtttttgtgggtggattgagcccggatacttctgaagaacaaattaaagaatattttggagcctttggagagattgaaaatattgaacttcccatggatacaaaaacaaatgaaagaagaggattttgttttatcacatatactgatgaagagccagtaaaaaaattgttagaaagcagataccatcaaattggttctgggaagtgtgaaatcaaagttgcacaacccaaagaggtatataggcagcaacagcaacaacaaaaaggtggaagaggtgctgcagctggtggacgaggtggtacgaggggtcgtggccgaggtcagggccaaaactggaaccaaggatttaataactattatgatcaaggatatggaaattacaatagtgcctatggtggtgatcaaaactatagtggctatggcggatatgattatactgggtataactatgggaactatggatatggacagggatatgcagactacagtggccaacagagcacttatggcaaggcatctcgagggggtggcaatcaccaaaacaattaccagccatactaaaggagaacattggagaaaacagcgggaacttcattgcaggccgtgtgtcaccctgaccacgtctatctctgggggtcgcacgttgcgggcagagcgcaaggcatacaccagaaaacgctgtcctgtggaggagatgttaaagtaacccatcttgcaggacgacattgaagattggtcttctgttgatctaagatgattattttgtaaaagactttctagtgtacaagacaccattgtgtccaactgtatatagctgccaattagttttctttgtttttactttgtcctttgctatctgtgttatgactcaatgtggatttgtttatacacattttatttgtatcatttcatgttaaacctcaaataaatgcttccttatgtgattgcttttctgcgtcaggtactacatagctctgtaaaaaatgtaatttaaaataagcaataattaaggcacagttgattttgtagagtattggtccatacagagaaactgtggtcctttataaatagccagccagcgtcaccctcttctccaatttgtaggtgtattttatgctcttaaggcttcatcttctccctgtaactgagatttctaccacacctttgaacaatgttctttcccttctggttatctgaagactgtcctgaaaggaagacataagtgttgtgattagtagaagctttctagtagaccatatttcttctggattgtaataaaattgttagtagctccttttactttgttcctgtctctggaaagccatttttgaattgctgattactttggctttaatcagtggtcacctagaaaaagctttgtaatcataacacaatgagtaattcttgataaaagttcagatacaaaaggagcactgtaaaactggtaggagctatggtttaagagcattggaagtagttacaactcaaggattttggtagaaaggtatgagtttggtcgaaaaattaaaatagtggcaaaataagatttagttgtgttttctcagagccgccacaagattgaacaaaatgttttctgtttgggcatcctgaggaagttgtattagctgttaatgctctgtgagtttagaaaaagtcttgatagtaaatctagtttttgacacagtgcatgaactaagtagttaaatatttacatattcagaaaggaatagtggaaaaggtatcttggttatgacaaagtcattacaaatgtgactaagtcattacaaatgtgactgagtcattacagtggaccctctgggtgcattgaaaagaatccgttttatatccaggtttcagaggacctggaataataaaaagctttggattttgcattcagtgtagttggattttgggaccttggcctcagtgttatttactgggattggcatacgtgttcacaggcagagtagttgatctcacacaacgggtgatctcacaaaactggtaagtttcttatgctcatgagccctccctttttttttttaatttggtgcctgcaactttcttaacaatgattctacttcctgggctatcacattataatgctcttggcctcttttttgctgctgttttgctattcttaaacttaggccaagtaccaatgttggctgttagaagggattctgttcattcaacatgcaactttagggaatggaagtaagttcatttttaagttgtgttgtcagtaggtgcggtgtctagggtagtgaatcctgtaagttcaaatttatgattaggtgacgagttgacattgagattgtccttttccctgatcaaaaaatgaataaagcctttttaaacaaaa

SEQ ID NO: 418619 - DNA, 3794 bp, Homo sapiens
tggagctcaaggatccttaattaaattaatcccccccctacaacgctccgccgccgctgctgccgcgacccggactgcgcgccagcacccccctgccgacagctccgtcactatggaggatatgaacgagtacagcaatatagaggaattcgcagagggatccaagatcaacgcgagcaagaatcagcaggatgacggtaaaatgtttattggaggcttgagctgggatacaagcaaaaaagatctgacagagtacttgtctcgatttggggaagttgtagactgcacaattaaaacagatccagtcactgggagatcaagaggatttggatttgtgcttttcaaagatgctgctagtgttgataagaacctcccaaaaaggtttttgtgggtggattgagcccggatacttctgaagaacaaattaaagaatattttggagcctttggagagattgaaaatattgaacttcccatggatacaaaaacaaatgaaagaagaggattttgttttatcacatatactgatgaagagccagtaaaaaaattgttagaaagcagataccatcaaattggttctgggaagtgtgaaatcaaagttgcacaacccaaagaggtatataggcagcaacagcaacaacaaaaaggtggaagaggtgctgcagctggtggacgaggtggtacgaggggtcgtggccgaggtcagggccaaaactggaaccaaggatttaataactattatgatcaaggatatggaaattacaatagtgcctatggtggtgatcaaaactatagtggctatggcggatatgattatactgggtataactatgggaactatggatatggacagggatatgcagactacagtggccaacagagcacttatggcaaggcatctcgagggggtggcaatcaccaaaacaattaccagccatactaaaggagaacattggagaaaacaggtgtgtataagagtacaggaaaacagtagaaatgtctaatttaatttaaagatcaatagacaaatgaaacgtaaaaacaaaatactatgtagcctgtttttactaaattgttgattttttaattgctttatgagcctgttttgcctaaagtgtctatagatctttaactttaaagtcttatctcactttctttagtattgcagaaaaacttaagagtttttctgtttgcttttgtgtaccaggtggtctagaggaataattaaacattttagaactattaacaggtaaagtactgaaatgggtacaacttaaggaaaacaagaatgttgtcttctaactctgacattataccttgtttgtacccgccagcgggaacttcattgcaggccgtgtgtcaccctgaccacgtctatctctgggggtcgcacgttgcgggcagagcgcaaggcatacaccagaaaacgctgtcctgtggtatggtctcttccaacttcatgtaccagcgtaaagattaaagtggaaaacttcagactttggcttcatttttaatctttttggagattaagtgtctaaacttaacttaaatggttttttacaggagttaaagtacataaatgcctttttacagcttaatcattttggtcttctgtttagtgttgtatttcaattgtggagcctcattttaagtgttcattcttttaagatttaatgcttgctttttctttttatagctaatagtgaaatctacaaaccaaaacaagaacttttaaatctgggatataaattaaagatcatatgcacagatcaatttatgttcttgtaataaacttattagaaattggtgtttgtgatagcattttacttgggttactagagatgcttctagtagaccttaatctagcatagttgaacctctgaatatgggaaggttgtattcccagattctttcctgaatagatttgaatttaatgtcatttgggaactccagggtgagtttattgactacccaaactgtattttaccaataaatatgcatatgatctttaattattgaagaaaataaagtgaggacttaaaacaattcatgaaagtggacctttaaaagcttgtcagagttgcacaaatctaactggtattttgtttttgtttttaggaggagatgttaaagtaacccatcttgcaggacgacattgaagattggtcttctgttgatctaagatgattattttgtaaaagactttctagtgtacaagacaccattgtgtccaactgtatatagctgccaattagttttctttgtttttactttgtcctttgctatctgtgttatgactcaatgtggatttgtttatacacattttatttgtatcatttcatgttaaacctcaaataaatgcttccttatgtgattgcttttctgcgtcaggtactacatagctctgtaaaaaatgtaatttaaaataagcaataattaaggcacagttgattttgtagagtattggtccatacagagaaactgtggtcctttataaatagccagccagcgtcaccctcttctccaatttgtaggtgtattttatgctcttaaggcttcatcttctccctgtaactgagatttctaccacacctttgaacaatgttctttcccttctggttatctgaagactgtcctgaaaggaagacataagtgttgtgattagtagaagctttctagtagaccatatttcttctggattgtaataaaattgttagtagctccttttactttgttcctgtctctggaaagccatttttgaattgctgattactttggctttaatcagtggtcacctagaaaaagctttgtaatcataacacaatgagtaattcttgataaaagttcagatacaaaaggagcactgtaaaactggtaggagctatggtttaagagcattggaagtagttacaactcaaggattttggtagaaaggtatgagtttggtcgaaaaattaaaatagtggcaaaataagatttagttgtgttttctcagagccgccacaagattgaacaaaatgttttctgtttgggcatcctgaggaagttgtattagctgttaatgctctgtgagtttagaaaaagtcttgatagtaaatctagtttttgacacagtgcatgaactaagtagttaaatatttacatattcagaaaggaatagtggaaaaggtatcttggttatgacaaagtcattacaaatgtgactaagtcattacaaatgtgactgagtcattacagtggaccctctgggtgcattgaaaagaatccgttttatatccaggtttcagaggacctggaataataaaaagctttggattttgcattcagtgtagttggattttgggaccttggcctcagtgttatttactgggattggcatacgtgttcacaggcagagtagttgatctcacacaacgggtgatctcacaaaactggtaagtttcttatgctcatgagccctccctttttttttttaatttggtgcctgcaactttcttaacaatgattctacttcctgggctatcacattataatgctcttggcctcttttttgctgctgttttgctattcttaaacttaggccaagtaccaatgttggctgttagaagggattctgttcattcaacatgcaactttagggaatggaagtaagttcatttttaagttgtgttgtcagtaggtgcggtgtctagggtagtgaatcctgtaagttcaaatttatgattaggtgacgagttgacattgagattgtccttttccctgatcaaaaaatgaataaagcctttttaaacaaaa

SEQ ID NO: 418620 - DNA, 3235 bp, Homo sapiens
ggccgggtgttaatcggccgaggtacaacgctccgccgccgctgctgccgcgacccggactgcgcgccagcacccccctgccgacagctccgtcactatggaggatatgaacgagtacagcaatatagaggaattcgcagagggatccaagatcaacgcgagcaagaatcagcaggatgacggtaaaatgtttattggaggcttgagctgggatacaagcaaaaaagatctgacagagtacttgtctcgatttggggaagttgtagactgcacaattaaaacagatccagtcactgggagatcaagaggatttggatttgtgcttttcaaagatgctgctagtgttgataaggttttggaactgaaagaacacaaactggatggcaaattgatagatcccaaaagggccaaagctttaaaagggaaagaacctcccaaaaaggtttttgtgggtggattgagcccggatacttctgaagaacaaattaaagaatattttggagcctttggagagattgaaaatattgaacttcccatggatacaaaaacaaatgaaagaagaggattttgttttatcacatatactgatgaagagccagtaaaaaaattgttagaaagcagataccatcaaattggttctgggaagtgtgaaatcaaagttgcacaacccaaagaggtatataggcagcaacagcaacaacaaaaaggtggaagaggtgctgcagctggtggacgaggtggtacgaggggtcgtggccgaggtcagggccaaaactggaaccaaggatttaataactattatgatcaaggatatggaaattacaatagtgcctatggtggtgatcaaaactatagtggctatggcggatatgattatactgggtataactatgggaactatggatatggacagggatatgcagactacagtggccaacagagcacttatggcaaggcatctcgagggggtggcaatcaccaaaacaattaccagccatactaaaggagaacattggagaaaacaggtgtgtataagagtacaggaaaacagtagaaatgtctaatttaatttaaagatcaatagacaaatgaaacgtaaaaacaaaatactatgtagcctgtttttactaaattgttgattttttaattgctttatgagcctgttttgcctaaagtgtctatagatctttaactttaaagtcttatctcactttctttagtattgcagaaaaacttaagagtttttctgtttgcttttgtgtaccaggtggtctagaggaataattaaacattttagaactattaacaggtaaagtactgaaatgggtacaacttaaggaaaacaagaatgttgtcttctaactctgacattataccttgtttgtacccgccagcgggaacttcattgcaggccgtgtgtcaccctgaccacgtctatctctgggggtcgcacgttgcgggcagagcgcaaggcatacaccagaaaacgctgtcctgtggtatggtctcttccaacttcatgtaccagcgtaaagattaaagtggaaaacttcagactttggcttcatttttaatctttttggagattaagtgtctaaacttaacttaaatggttttttacaggagttaaagtacataaatgcctttttacagcttaatcattttggtcttctgtttagtgttgtatttcaattgtggagcctcattttaagtgttcattcttttaagatttaatgcttgctttttctttttatagctaatagtgaaatctacaaaccaaaacaagaacttttaaatctgggatataaattaaagatcatatgcacagatcaatttatgttcttgtaataaacttattagaaattggtgtttgtgatagcattttacttgggttactagagatgcttctagtagaccttaatctagcatagttgaacctctgaatatgggaaggttgtattcccagattctttcctgaatagatttgaatttaatgtcatttgggaactccagggtgagtttattgactacccaaactgtattttaccaataaatatgcatatgatctttaattattgaagaaaataaagtgaggacttaaaacaattcatgaaagtggacctttaaaagcttgtcagagttgcacaaatctaactggtattttgtttttgtttttaggaggagatgttaaagtaacccatcttgcaggacgacattgaagattggtcttctgttgatctaagatgattattttgtaaaagactttctagtgtacaagacaccattgtgtccaactgtatatagctgccaattagttttctttgtttttactttgtcctttgctatctgtgttatgactcaatgtggatttgtttatacacattttatttgtatcatttcatgttaaacctcaaataaatgcttccttatgtgataaaaaaaaaaaaaaaaaaaaacaacaaaacaaaaaaaaaaaaaaaaaaaaacaaaaaaaaaaaaaacattggggggggccggagaatgaggtggaacgcgtggcacgagaagcagagcaaaccgaccaggacagaaggtacaaagaggggagccggcggagcgcgcgaatggagcaagacaaacacacgaccagaccggacaaagaaacagacaacaagcgaggagaaagaaaggaggcaccagagcgacaccacgaggaagagaagaaacaaaaacaaagagcggagaaaggagcagaagtaaaaaccaaaacacgacggcaacgaaccaacagtaggagaggagggaagcagacaagacaaacgacaagaaaaaacgaacaagacacaaagacacagacaaaagcaagacaaccaagcggaaaggagaagacgagaagagacaaagaagccaaagaaaaaccaatcatcacgaataaggggaacaacgaaggacagaaagagaacaggggggaaggacacgagagcggagcagagcaggtaaaagtgagtgagcaacagaggcaacgcacagcagaggagaacagaagagagagtgaggaagaaggggcgagaagagcgagaaacggaggtgaaggaggcagcacagggcgcgacgcggaacagaggagaaaaggagcggcaccgagcagaggagagggaggaagagagaggcgaggagggacaggagagagagcacgagaggcaagagggcgacagaggagcgaagaggacgaaagaaggagcagagagtagactcg

SEQ ID NO: 418621 - DNA, 2531 bp, Homo sapiens
ggccgggtgttaatcggccgaggtacaacgctccgccgccgctgctgccgcgacccggactgcgcgccagcacccccctgccgacagctccgtcactatggaggatatgaacgagtacagcaatatagaggaattcgcagagggatccaagatcaacgcgagcaagaatcagcaggatgacggtaaaatgtttattggaggcttgagctgggatacaagcaaaaaagatctgacagagtacttgtctcgatttggggaagttgtagactgcacaattaaaacagatccagtcactgggagatcaagaggatttggatttgtgcttttcaaagatgctgctagtgttgataaggttttggaactgaaagaacacaaactggatggcaaattgatagatcccaaaagggccaaagctttaaaagggaaagaacctcccaaaaaggtttttgtgggtggattgagcccggatacttctgaagaacaaattaaagaatattttggagcctttggagagattgaaaatattgaacttcccatggatacaaaaacaaatgaaagaagaggattttgttttatcacatatactgatgaagagccagtaaaaaaattgttagaaagcagataccatcaaattggttctgggaagtgtgaaatcaaagttgcacaacccaaagaggtatataggcagcaacagcaacaacaaaaaggtggaagaggtgctgcagctggtggacgaggtggtacgaggggtcgtggccgaggccaacagagcacttatggcaaggcatctcgagggggtggcaatcaccaaaacaattaccagccatactaaaggagaacattggagaaaacaggaggagatgttaaagtaacccatcttgcaggacgacattgaagattggtcttctgttgatctaagatgattattttgtaaaagactttctagtgtacaagacaccattgtgtccaactgtatatagctgccaattagttttctttgtttttactttgtcctttgctatctgtgttatgactcaatgtggatttgtttatacacattttatttgtatcatttcatgttaaacctcaaataaatgcttccttatgtgattgcttttctgcgtcaggtactacatagctctgtaaaaaatgtaatttaaaataagcaataattaaggcacagttgattttgtagagtattggtccatacagagaaactgtggtcctttataaatagccagccagcgtcaccctcttctccaatttgtaggtgtattttatgctcttaaggcttcatcttctccctgtaactgagatttctaccacacctttgaacaatgttctttcccttctggttatctgaagactgtcctgaaaggaagacataagtgttgtgattagtagaagctttctagtagaccatatttcttctggattgtaataaaattgttagtagctccttttactttgttcctgtctctggaaagccatttttgaattgctgattactttggctttaatcagtggtcacctagaaaaagctttgtaatcataacacaatgagtaattcttgataaaagttcagatacaaaaggagcactgtaaaactggtaggagctatggtttaagagcattggaagtagttacaactcaaggattttggtagaaaggtatgagtttggtcgaaaaattaaaatagtggcaaaataagatttagttgtgttttctcagagccgccacaagattgaacaaaatgttttctgtttgggcatcctgaggaagttgtattagctgttaatgctctgtgagtttagaaaaagtcttgatagtaaatctagtttttgacacagtgcatgaactaagtagttaaatatttacatattcagaaaggaatagtggaaaaggtatcttggttatgacaaagtcattacaaatgtgactaagtcattacaaatgtgactgagtcattacagtggaccctctgggtgcattgaaaagaatccgttttatatccaggtttcagaggacctggaataataaaaagctttggattttgcattcagtgtagttggattttgggaccttggcctcagtgttatttactgggattggcatacgtgttcacaggcagagtagttgatctcacacaacgggtgatctcacaaaactggtaagtttcttatgctcatgagccctccctttttttttttaatttggtgcctgcaactttcttaacaatgattctacttcctgggctatcacattataatgctcttggcctcttttttgctgctgttttgctattcttaaacttaggccaagtaccaatgttggctgttagaagggattctgttcattcaacatgcaactttagggaatggaagtaagttcatttttaagttgtgttgtcagtaggtgcggtgtctagggtagtgaatcctgtaagttcaaatttatgattaggtgacgagttgacattgagattgtccttttccctgatcaaaaaatgaataaagcctttttaaacaaaa

SEQ ID NO: 418622 - DNA, 1756 bp, Homo sapiens
ggccgggtgttaatcggccgaggtacaacgctccgccgccgctgctgccgcgacccggactgcgcgccagcacccccctgccgacagctccgtcactatggaggatatgaacgagtacagcaatatagaggaattcgcagagggatccaagatcaacgcgagcaagaatcagcaggatgacggtaaaatgtttattggaggcttgagctgggatacaagcaaaaaagatctgacagagtacttgtctcgatttggggaagttgtagactgcacaattaaaacagatccagtcactgggagatcaagaggatttggatttgtgcttttcaaagatgctgctagtgttgataaggttttggaactgaaagaacacaaactggatggcaaattgatagatcccaaaagggccaaagctttaaaagggaaagaacctcccaaaaaggtttttgtgggtggattgagcccggatacttctgaagaacaaattaaagaatattttggagcctttggagagattgaaaatattgaacttcccatggatacaaaaacaaatgaaagaagaggattttgttttatcacatatactgatgaagagccagtaaaaaaattgttagaaagcagataccatcaaattggttctgggaagtgtgaaatcaaagttgcacaacccaaagaggtatataggcagcaacagcaacaacaaaaaggtggaagaggtgctgcagctggtggacgaggtggtacgaggggtcgtggccgaggtcagggccaaaactggaaccaaggatttaataactattatgatcaaggatatggaaattacaatagtgcctatggtggtgatcaaaactatagtggctatggcggatatgattatactgggtataactatgggaactatggatatggacagggatatgcagactacagtggccaacagagcacttatggcaaggcatctcgagggggtggcaatcaccaaaacaattaccagccatactaaaggagaacattggagaaaacaggtgtgtataagagtacaggaaaacagtagaaatgtctaatttaatttaaagatcaatagacaaatgaaacgtaaaaacaaaatactatgtagcctgtttttactaaattgttgattttttaattgctttatgagcctgttttgcctaaagtgtctatagatctttaactttaaagtcttatctcactttctttagtattgcagaaaaacttaagagtttttctgtttgcttttgtgtaccaggtggtctagaggaataattaaacattttagaactattaacaggtaaagtactgaaatgggtacaacttaaggaaaacaagaatgttgtcttctaactctgacattataccttgtttgtacccgccagcgggaacttcattgcaggccgtgtgtcaccctgaccacgtctatctctgggggtcgcacgttgcgggcagagcgcaaggcatacaccagaaaacgctgtcctgtggaggagatgttaaagtaacccatcttgcaggacgacattgaagattggtcttctgttgatctaagatgattattttgtaaaagactttctagtgtacaagacaccattgtgtccaactgtatatagctgccaattagttttctttgtttttactttgtcctttgctatctgtgttatgactcaatgtggatttgtttatacacattttatttgtatcatttcatgttaaacctcaaataaatgcttccttatgtgat

SEQ ID NO: 418623 - DNA, 1387 bp, Homo sapiens
ggccgggtgttaatcggccgaggtacaacgctccgccgccgctgctgccgcgacccggactgcgcgccagcacccccctgccgacagctccgtcactatggaggatatgaacgagtacagcaatatagaggaattcgcagagggatccaagatcaacgcgagcaagaatcagcaggatgacggtaaaatgtttattggaggcttgagctgggatacaagcaaaaaagatctgacagagtacttgtctcgatttggggaagttgtagactgcacaattaaaacagatccagtcactgggagatcaagaggatttggatttgtgcttttcaaagatgctgctagtgttgataaggttttggaactgaaagaacacaaactggatggcaaattgatagatcccaaaagggccaaagctttaaaagggaaagaacctcccaaaaaggtttttgtgggtggattgagcccggatacttctgaagaacaaattaaagaatattttggagcctttggagagattgaaaatattgaacttcccatggatacaaaaacaaatgaaagaagaggattttgttttatcacatatactgatgaagagccagtaaaaaaattgttagaaagcagataccatcaaattggttctgggaagtgtgaaatcaaagttgcacaacccaaagaggtatataggcagcaacagcaacaacaaaaaggtggaagaggtgctgcagctggtggacgaggtggtacgaggggtcgtggccgaggtcagggccaaaactggaaccaaggatttaataactattatgatcaaggatatggaaattacaatagtgcctatggtggtgatcaaaactatagtggctatggcggatatgattatactgggtataactatgggaactatggatatggacagggatatgcagactacagtggccaacagagcacttatggcaaggcatctcgagggggtggcaatcaccaaaacaattaccagccatactaaaggagaacattggagaaaacagcgggaacttcattgcaggccgtgtgtcaccctgaccacgtctatctctgggggtcgcacgttgcgggcagagcgcaaggcatacaccagaaaacgctgtcctgtggaggagatgttaaagtaacccatcttgcaggacgacattgaagattggtcttctgttgatctaagatgattattttgtaaaagactttctagtgtacaagacaccattgtgtccaactgtatatagctgccaattagttttctttgtttttactttgtcctttgctatctgtgttatgactcaatgtggatttgtttatacacattttatttgtatcatttcatgttaaacctcaaataaatgcttccttatgtgat

SEQ ID NO: 418624 - DNA, 1487 bp, Homo sapiens
  misc_feature (1352)..(1353): n is a, c, g, or t
  misc_feature (1398)..(1398): n is a, c, g, or t
  misc_feature (1471)..(1471): n is a, c, g, or t
  misc_feature (1487)..(1487): n is a, c, g, or t
ggccgggtgttaatcggccgaggtacaacgctccgccgccgctgctgccgcgacccggactgcgcgccagcacccccctgccgacagctccgtcactatggaggatatgaacgagtacagcaatatagaggaattcgcagagggatccaagatcaacgcgagcaagaatcagcaggatgacggtaaaatgtttattggaggcttgagctgggatacaagcaaaaaagatctgacagagtacttgtctcgatttggggaagttgtagactgcacaattaaaacagatccagtcactgggagatcaagaggatttggatttgtgcttttcaaagatgctgctagtgttgataaggttttggaactgaaagaacacaaactggatggcaaattgatagatcccaaaagggccaaagctttaaaagggaaagaacctcccaaaaaggtttttgtgggtggattgagcccggatacttctgaagaacaaattaaagaatattttggagcctttggagagattgaaaatattgaacttcccatggatacaaaaacaaatgaaagaagaggattttgttttatcacatatactgatgaagagccagtaaaaaaattgttagaaagcagataccatcaaattggttctgggaagtgtgaaatcaaagttgcacaacccaaagaggtatataggcagcaacagcaacaacaaaaaggtggaagaggtgctgcagctggtggacgaggtggtacgaggggtcgtggccgaggtcagggccaaaactggaaccaaggatttaataactattatgatcaaggatatggaaattacaatagtgcctatggtggtgatcaaaactatagtggctatggcggatatgattatactgggtataactatgggaactatggatatggacagggatatgcagactacagtggccaacagagcacttatggcaaggcatctcgagggggtggcaatcaccaaaacaattaccagccatactaaaggagaacattggagaaaacaggtgtgtataagagtacaggaaaacagtagaaatgtctaatttaatttaaagatcaatagacaaatgaaacgtaaaaacaaaatactatgtagcctgtttttactaaattgttgattttttaattgctttatgagcctgttttgcctaaagtgtctatagatctttaactttaaagtcttatctcactttctttagtattgcagaaaaacttaagagtttttctgtttgcttttgtgtaccaggtggtctagaggaataattaaacattttagaactattaacaggtaaagtactgaaatgggtacaacttaaggaagactcattganngcggtgtacctgacacgttattctggggtcgacgtgcggcagacncagggatcacagaaacgctgctggggatgctttcaactatgacagcgaagataagtgaaactaactggctatntatcttggaatagtgn

SEQ ID NO: 418625 - DNA, 2657 bp, Homo sapiens
  misc_feature (610)..(610): n is a, c, g, or t
  misc_feature (645)..(645): n is a, c, g, or t
  misc_feature (649)..(649): n is a, c, g, or t
  misc_feature (651)..(651): n is a, c, g, or t
  misc_feature (679)..(679): n is a, c, g, or t
  misc_feature (700)..(700): n is a, c, g, or t
  misc_feature (714)..(714): n is a, c, g, or t
  misc_feature (720)..(720): n is a, c, g, or t
  misc_feature (722)..(723): n is a, c, g, or t
  misc_feature (732)..(732): n is a, c, g, or t
  misc_feature (734)..(734): n is a, c, g, or t
  misc_feature (739)..(739): n is a, c, g, or t
  misc_feature (750)..(750): n is a, c, g, or t
tggagctcaaggatccttaattaaattaatcccccccctacaacgctccgccgccgctgctgccgcgacccggactgcgcgccagcacccccctgccgacagctccgtcactatggaggatatgaacgagtacagcaatatagaggaattcgcagagggatccaagatcaacgcgagcaagaatcagcaggatgacggtaaaatgtttattggaggcttgagctgggatacaagcaaaaaagatctgacagagtacttgtctcgatttggggaagttgtagactgcacaattaaagttttggaactgaaagaacacaaactggatggcaaattgatagatcccaaaagggccaaagctttaaaagggaaagaacctcccaaaaaggtttttgtgggtggattgagcccggatacttctgaagaacaaattaaagaatattttggagcctttggagagattgaaaatattgaacttcccatggatacaaaaacaaatgaaagaagaggattttgttttatcacatatactgatgaagagccagtaaaaaaattgttagaaagcagataccatcaaattggttctgggaagaccgccccgggaaacggaaancaaagcgcacaacccaaaaaaccaaaaaaccaacnacancnacaacaaaaaagccgaacaccccccccncccggcgcaccaaccggcacnaggggccccgcccnacgccncnnccaagaccngngccanggaaggaaggnccaagaggaacaaggatatggaaattacaatagtgcctatggtggtgatcaaaactatagtggctatggcggatatgattatactgggtataactatgggaactatggatatggacagggatatgcagactacagtggccaacagagcacttatggcaaggcatctcgagggggtggcaatcaccaaaacaattaccagccatactaaaggagaacattggagaaaacaggaggagatgttaaagtaacccatcttgcaggacgacattgaagattggtcttctgttgatctaagatgattattttgtaaaagactttctagtgtacaagacaccattgtgtccaactgtatatagctgccaattagttttctttgtttttactttgtcctttgctatctgtgttatgactcaatgtggatttgtttatacacattttatttgtatcatttcatgttaaacctcaaataaatgcttccttatgtgattgcttttctgcgtcaggtactacatagctctgtaaaaaatgtaatttaaaataagcaataattaaggcacagttgattttgtagagtattggtccatacagagaaactgtggtcctttataaatagccagccagcgtcaccctcttctccaatttgtaggtgtattttatgctcttaaggcttcatcttctccctgtaactgagatttctaccacacctttgaacaatgttctttcccttctggttatctgaagactgtcctgaaaggaagacataagtgttgtgattagtagaagctttctagtagaccatatttcttctggattgtaataaaattgttagtagctccttttactttgttcctgtctctggaaagccatttttgaattgctgattactttggctttaatcagtggtcacctagaaaaagctttgtaatcataacacaatgagtaattcttgataaaagttcagatacaaaaggagcactgtaaaactggtaggagctatggtttaagagcattggaagtagttacaactcaaggattttggtagaaaggtatgagtttggtcgaaaaattaaaatagtggcaaaataagatttagttgtgttttctcagagccgccacaagattgaacaaaatgttttctgtttgggcatcctgaggaagttgtattagctgttaatgctctgtgagtttagaaaaagtcttgatagtaaatctagtttttgacacagtgcatgaactaagtagttaaatatttacatattcagaaaggaatagtggaaaaggtatcttggttatgacaaagtcattacaaatgtgactaagtcattacaaatgtgactgagtcattacagtggaccctctgggtgcattgaaaagaatccgttttatatccaggtttcagaggacctggaataataaaaagctttggattttgcattcagtgtagttggattttgggaccttggcctcagtgttatttactgggattggcatacgtgttcacaggcagagtagttgatctcacacaacgggtgatctcacaaaactggtaagtttcttatgctcatgagccctccctttttttttttaatttggtgcctgcaactttcttaacaatgattctacttcctgggctatcacattataatgctcttggcctcttttttgctgctgttttgctattcttaaacttaggccaagtaccaatgttggctgttagaagggattctgttcattcaacatgcaactttagggaatggaagtaagttcatttttaagttgtgttgtcagtaggtgcggtgtctagggtagtgaatcctgtaagttcaaatttatgattaggtgacgagttgacattgagattgtccttttccctgatcaaaaaatgaataaagcctttttaaacaaaa

SEQ ID NO: 418626 - DNA, 960 bp, Homo sapiens
ggccgggtgttaatcggccgaggtacaacgctccgccgccgctgctgccgcgacccggactgcgcgccagcacccccctgccgacagctccgtcactatggaggatatgaacgagtacagcaatatagaggaattcgcagagggatccaagatcaacgcgagcaagaatcagcaggatgacggtaaaatgtttattggaggcttgagctgggatacaagcaaaaaagatctgacagagtacttgtctcgatttggggaagttgtagactgcacaattaaaacagatccagtcactgggagatcaagaggatttggatttgtgcttttcaaagatgctgctagtgttgataaggttttggaactgaaagaacacaaactggatggcaaattgatagatcccaaaagggccaaagctttaaaagggaaagaacctcccaaaaaggtttttgtgggtggattgagcccggatacttctgaagaacaaattaaagaatattttggagcctttggagagattgaaaatattgaacttcccatggatacaaaaacaaatgaaagaagaggattttgttttatcacatatactgatgaagagccagtaaaaaaattgttagaaagcagataccatcaaattggttctgggaagtgtgaaatcaaagttgcacaacccaaagaggtatataggcagcaacagcaacaacaaaaaggtggaagaggtgctgcagctggtggacgaggtggtacgaggggtcgtggccgaggtcagggccaaaactggaaccaaggatttaataactattatgatcaaggatatggaaattacaatagtgcctatggtggtgatcaaaactatagtggctatggcggatatgattatactgggtataactatgggaactatggatatggacagggatatgcagactacagtgcgctcgtaggaggggatcctctaaatca

SEQ ID NO: 418627 - DNA, 1189 bp, Homo sapiens
ggccgggtgttaatcggccgaggtacaacgctccgccgccgctgctgccgcgacccggactgcgcgccagcacccccctgccgacagctccgtcactatggaggatatgaacgagtacagcaatatagaggaattcgcagagggatccaagatcaacgcgagcaagaatcagcaggatgacggtaaaatgtttattggaggcttgagctgggatacaagcaaaaaagatctgacagagtacttgtctcgatttggggaagttgtagactgcacaattaaaacagatccagtcactgggagatcaagaggatttggatttgtgcttttcaaagatgctgctagtgttgataaggttttggaactgaaagaacacaaactggatggcaaattgatagatcccaaaagggccaaagctttaaaagggaaagaacctcccaaaaaggtttttgtgggtggattgagcccggatacttctgaagaacaaattaaagaatattttggagcctttggagagattgaaaatattgaacttcccatggatacaaaaacaaatgaaagaagaggattttgttttatcacatatactgatgaagagccagtaaaaaaattgttagaaagcagataccatcaaattggttctgggaagtgtgaaatcaaagttgcacaacccaaagaggtatataggcagcaacagcaacaacaaaaaggtggaagaggtgctgcagctggtggacgaggtggtacgaggggtcgtggccgaggtcagggccaaaactggaaccaaggatttaataactattatgatcaaggatatggaaattacaatagtgcctatggtggccaacagagcacttatggcaaggcatctcgagggggtggcaatcaccaaaacaattaccagccatactaaaggagaacattggagaaaacaggaggagatgttaaagtaacccatcttgcaggacgacattgaagattggtcttctgttgatctaagatgattattttgtaaaagactttctagtgtacaagacaccattgtgtccaactgtatatagctgccaattagttttctttgtttttactttgtcctttgctatctgtgttatgactcaatgtggatttgtttatacacattttatttgtatcatttcatgttaaacctcaaataaatgcttccttatgtgat

SEQ ID NO: 418628 - DNA, 1111 bp, Homo sapiens
ggccgggtgttaatcggccgaggtacaacgctccgccgccgctgctgccgcgacccggactgcgcgccagcacccccctgccgacagctccgtcactatggaggatatgaacgagtacagcaatatagaggaattcgcagagggatccaagatcaacgcgagcaagaatcagcaggatgacggtaaaatgtttattggaggcttgagctgggatacaagcaaaaaagatctgacagagtacttgtctcgatttggggaagttgtagactgcacaattaaaacagatccagtcactgggagatcaagaggatttggatttgtgcttttcaaagatgctgctagtgttgataaggttttggaactgaaagaacacaaactggatggcaaattgatagatcccaaaagggccaaagctttaaaagggaaagaacctcccaaaaaggtttttgtgggtggattgagcccggatacttctgaagaacaaattaaagaatattttggagcctttggagagattgaaaatattgaacttcccatggatacaaaaacaaatgaaagaagaggattttgttttatcacatatactgatgaagagccagtaaaaaaattgttagaaagcagataccatcaaattggttctgggaagtgtgaaatcaaagttgcacaacccaaagaggtatataggcagcaacagcaacaacaaaaaggtggaagaggtgctgcagctggtggacgaggtggtacgaggggtcgtggccgaggccaacagagcacttatggcaaggcatctcgagggggtggcaatcaccaaaacaattaccagccatactaaaggagaacattggagaaaacaggaggagatgttaaagtaacccatcttgcaggacgacattgaagattggtcttctgttgatctaagatgattattttgtaaaagactttctagtgtacaagacaccattgtgtccaactgtatatagctgccaattagttttctttgtttttactttgtcctttgctatctgtgttatgactcaatgtggatttgtttatacacattttatttgtatcatttcatgttaaacctcaaataaatgcttccttatgtgat

SEQ ID NO: 418629 - DNA, 741 bp, Homo sapiens
ggccgggtgttaatcggccgaggtacaacgctccgccgccgctgctgccgcgacccggactgcgcgccagcacccccctgccgacagctccgtcactatggaggatatgaacgagtacagcaatatagaggaattcgcagagggatccaagatcaacgcgagcaagaatcagcaggatgacggtaaaatgtttattggaggcttgagctgggatacaagcaaaaaagatctgacagagtacttgtctcgatttggggaagttgtagactgcacaattaaaacagatccagtcactgggagatcaagaggatttggatttgtgcttttcaaagatgctgctagtgttgataaggttttggaactgaaagaacacaaactggatggcaaattgatagatcccaaaagggccaaagctttaaaagggaaagaacctcccaaaaaggtttttgtgggtggattgagcccggatacttctgaagaacaaattaaagaatattttggagcctttggagagattgaaaatattgaacttcccatggatacaaaaacaaatgaaagaagaggattttgttttatcacatatactgatgaagagccagtaaaaaaattgttagaaagcagataccatcaaattggttctgggaagtgtgaaatcaaagttgcacaacccaaagaggtatataggcagcaacagcaacaacaaaaaggtggaagagagaacccaccaacaatcacatcatg

SEQ ID NO: 418630 - DNA, 681 bp, Homo sapiens
ggccgggtgttaatcggccgaggtacaacgctccgccgccgctgctgccgcgacccggactgcgcgccagcacccccctgccgacagctccgtcactatggaggatatgaacgagtacagcaatatagaggaattcgcagagggatccaagatcaacgcgagcaagaatcagcaggatgacggtaaaatgtttattggaggcttgagctgggatacaagcaaaaaagatctgacagagtacttgtctcgatttggggaagttgtagactgcacaattaaaacagatccagtcactgggagatcaagaggatttggatttgtgcttttcaaagatgctgctagtgttgataaggttttggaactgaaagaacacaaactggatggcaaattgatagatcccaaaagggccaaagctttaaaagggaaagaacctcccaaaaaggtttttgtgggtggattgagcccggatacttctgaagaacaaattaaagaatattttggagcctttggagagattgaaaatattgaacttcccatggatacaaaaacaaatgaaagaagaggattttgttttatcacatatactgatgaagagccagtaaaaaaattgttagaaagcagataccatcaaattggttctgggaaggcagcacacgattcgccgaggtcctctagtcagct

SEQ ID NO: 418631 - DNA, 2392 bp, Homo sapiens
tgcgcgagagcgcgccctccgcagacaggttgagcgagcgggagaggcccggggcacgtgcagaaaggagccccgcgagtggcgcgccggggatgtgagtgccccttgccctctactgaatccagccccctccccgcccaccgcctccgcctttgcatagatacagtcatctggccagcccccgcccctcctcccggcgtcagcccgccagaggccgcgcggggcccgggcttcggccgatcagcccgggaggccccgccgcgcccccttggcccgcgcgcccgtggtcacagtggaagaggcgcccgcgctgcgctgcccggaggagccgtcgcgcgcccgcttcctgttcggctggttcctgccagctcgaggacaaaacacgcgtgcgcgcggcgggcgagcgcgctcgccgcctcagtcgccagcgccgggcgcagtccgcctttttccggagcagactggccgcggtgctagtcggtagcagcggccgccgcagcggctccgcactggcgaaccgagggcagaaaaaggcggggttgacggctttttggtaggagtgggctggaccggacgccagagacaaaggctcccaaggcaagagggactgtggccctgcgtcggctctgctcggaactgctgaccccaggaatttacgccccttcgtttttctcttctgattcttctcttctcccaagcccgcgtcccctcacgcgtggcctctctccttgccgggagggccgcgatggaggtcccgcccaggctttcccatgtgccgccgccattgttcccctccgctcccgctactttagcctcccgcagcctctcccattggcggccgcggccgccgcggcagctagccccgctcctcccttcgctcgctcccagctccgcccggcagggggcgcgccgggcccagcgccacgtcaccgcccagcagccctcccgattggcgggcggggcggctataaagggagggcgcaggcggcgcccggatctcttccgccgccattttaaatccagctccatacaacgctccgccgccgctgctgccgcgacccggactgcgcgccagcacccccctgccgacagctccgtcactatggaggatatgaacgagtacagcaatatagaggaattcgcagagggatccaagatcaacgcgagcaagaatcagcaggatgacggtaaaatgtttattggaggcttgagctgggatacaagcaaaaaagatctgacagagtacttgtctcgatttggggaagttgtagactgcacaattaaaacagatccagtcactgggagatcaagaggatttggatttgtgcttttcaaagatgctgctagtgttgataaggttttggaactgaaagaacacaaactggatggcaaattgatagatcccaaaagggccaaagctttaaaagggaaagaacctcccaaaaaggtttttgtgggtggattgagcccggatacttctgaagaacaaattaaagaatattttggagcctttggagagattgaaaatattgaacttcccatggatacaaaaacaaatgaaagaagaggattttgttttatcacatatactgatgaagagccagtaaaaaaattgttagaaagcagataccatcaaattggttctgggaagtgtgaaatcaaagttgcacaacccaaagaggtatataggcagcaacagcaacaacaaaaaggtggaagaggtgctgcagctggtggacgaggtggtacgaggggtcgtggccgaggtcagggccaaaactggaaccaaggatttaataactattatgatcaaggatatggaaattacaatagtgcctatggtggtgatcaaaactatagtggctatggcggatatgattatactgggtataactatgggaactatggatatggacagggatatgcagactacagtggccaacagagcacttatggcaaggcatctcgagggggtggcaatcaccaaaacaattaccagccatactaaaggagaacattggagaaaacagcgggaacttcattgcaggccgtgtgtcaccctgaccacgtctatctctgggggtcgcacgttgcgggcagagcgcaaggcatacaccagaaaacgctgtcctgtggaggagatgttaaagtaacccatcttgcaggacgacattgaagattggtcttctgttgatctaagatgattattttgtaaaagactttctagtgtacaagacaccattgtgtccaactgtatatagctgccaattagttttctttgtttttactttgtcctttgctatctgtgttatgactcaatgtggatttgtttatacacattttatttgtatcatttcatgttaaacctcaaataaatgcttccttatgtgat

SEQ ID NO: 418632 - DNA, 733 bp, Homo sapiens
tctatattgctgtactcgttcatatcctgcatagtgacggagctgtcggcaggggggtgctggcgcgcagtccgggtcgaggcagcagcggcggcggagcgttgtatggagtaaaatgtttattggaggcttgagctgggatacaagcaaaaaagatctgacagagtacttgtctcgatttggggaagttgtagactgcacaattaaaacagatccagtcactgggagatcaagaggatttggatttgtgcttttcaaagatgctgctagtgttgataaggttttggaactgaaagaacacaaactggatggcaaattgatagatcccaaaagggccaaagctttaaaagggaaagaacctcccaaaaaggtttttgtgggtggattgagcccggatacttctgaagaacaaattaaagaatattttggagcctttggagagattgaaaatattgaacttcccatggatacaaaaacaaatgaaagaagaggattttgttttatcacatatactgatgaagagccagtaaaaaaattgttagaaagcagataccatcaaattggttctgggaagtgtgaaatcaaagttgcacaacccaaagaggtatataggcagcaacagcaacaacaaaaaggtggaagaggtgctgcagctggtggacgaggtggtacgaggggtcgtggccgagcagggccaaaactggacgcgaattcgcgcttattttaatatctc

SEQ ID NO: 418633 - DNA, 3870 bp, Homo sapiens
tggagctcaaggatccttaattaaattaatcccccccctacaacgctccgccgccgctgctgccgcgacccggactgcgcgccagcacccccctgccgacagctccgtcactatggaggatatgaacgagtacagcaatatagaggaattcgcagagggatccaagatcaacgcgagcaagaatcagcaggatgacggtaaaatgtttattggaggcttgagctgggatacaagcaaaaaagatctgacagagtacttgtctcgatttggggaagttgtagactgcacaattaaaacagatccagtcactgggagatcaagaggatttggatttgtgcttttcaaagatgctgctagtgttgataaggttttggaactgaaagaacacaaactggatggcaaattgatagatcccaaaagggccaaagctttaaaagggaaagaacctcccaaaaaggtttttgtgggtggattgagcccggatacttctgaagaacaaattaaagaatattttggagcctttggagagattgaaaatattgaacttcccatggatacaaaaacaaatgaaagaagaggattttgttttatcacatatactgatgaagagccagtaaaaaaattgttagaaagcagataccatcaaattggttctgggaagtgtgaaatcaaagttgcacaacccaaagaggtatataggcagcaacagcaacaacaaaaaggtggaagaggtgctgcagctggtggacgaggtggtacgaggggtcgtggccgaggtcagggccaaaactggaaccaaggatttaataactattatgatcaaggatatggaaattacaatagtgcctatggtggtgatcaaaactatagtggctatggcggatatgattatactgggtataactatgggaactatggatatggacagggatatgcagactacagtggccaacagagcacttatggcaaggcatctcgagggggtggcaatcaccaaaacaattaccagccatactaaaggagaacattggagaaaacaggtgtgtataagagtacaggaaaacagtagaaatgtctaatttaatttaaagatcaatagacaaatgaaacgtaaaaacaaaatactatgtagcctgtttttactaaattgttgattttttaattgctttatgagcctgttttgcctaaagtgtctatagatctttaactttaaagtcttatctcactttctttagtattgcagaaaaacttaagagtttttctgtttgcttttgtgtaccaggtggtctagaggaataattaaacattttagaactattaacaggtaaagtactgaaatgggtacaacttaaggaaaacaagaatgttgtcttctaactctgacattataccttgtttgtacccgccagcgggaacttcattgcaggccgtgtgtcaccctgaccacgtctatctctgggggtcgcacgttgcgggcagagcgcaaggcatacaccagaaaacgctgtcctgtggtatggtctcttccaacttcatgtaccagcgtaaagattaaagtggaaaacttcagactttggcttcatttttaatctttttggagattaagtgtctaaacttaacttaaatggttttttacaggagttaaagtacataaatgcctttttacagcttaatcattttggtcttctgtttagtgttgtatttcaattgtggagcctcattttaagtgttcattcttttaagatttaatgcttgctttttctttttatagctaatagtgaaatctacaaaccaaaacaagaacttttaaatctgggatataaattaaagatcatatgcacagatcaatttatgttcttgtaataaacttattagaaattggtgtttgtgatagcattttacttgggttactagagatgcttctagtagaccttaatctagcatagttgaacctctgaatatgggaaggttgtattcccagattctttcctgaatagatttgaatttaatgtcatttgggaactccagggtgagtttattgactacccaaactgtattttaccaataaatatgcatatgatctttaattattgaagaaaataaagtgaggacttaaaacaattcatgaaagtggacctttaaaagcttgtcagagttgcacaaatctaactggtattttgtttttgtttttaggaggagatgttaaagtaacccatcttgcaggacgacattgaagattggtcttctgttgatctaagatgattattttgtaaaagactttctagtgtacaagacaccattgtgtccaactgtatatagctgccaattagttttctttgtttttactttgtcctttgctatctgtgttatgactcaatgtggatttgtttatacacattttatttgtatcatttcatgttaaacctcaaataaatgcttccttatgtgattgcttttctgcgtcaggtactacatagctctgtaaaaaatgtaatttaaaataagcaataattaaggcacagttgattttgtagagtattggtccatacagagaaactgtggtcctttataaatagccagccagcgtcaccctcttctccaatttgtaggtgtattttatgctcttaaggcttcatcttctccctgtaactgagatttctaccacacctttgaacaatgttctttcccttctggttatctgaagactgtcctgaaaggaagacataagtgttgtgattagtagaagctttctagtagaccatatttcttctggattgtaataaaattgttagtagctccttttactttgttcctgtctctggaaagccatttttgaattgctgattactttggctttaatcagtggtcacctagaaaaagctttgtaatcataacacaatgagtaattcttgataaaagttcagatacaaaaggagcactgtaaaactggtaggagctatggtttaagagcattggaagtagttacaactcaaggattttggtagaaaggtatgagtttggtcgaaaaattaaaatagtggcaaaataagatttagttgtgttttctcagagccgccacaagattgaacaaaatgttttctgtttgggcatcctgaggaagttgtattagctgttaatgctctgtgagtttagaaaaagtcttgatagtaaatctagtttttgacacagtgcatgaactaagtagttaaatatttacatattcagaaaggaatagtggaaaaggtatcttggttatgacaaagtcattacaaatgtgactaagtcattacaaatgtgactgagtcattacagtggaccctctgggtgcattgaaaagaatccgttttatatccaggtttcagaggacctggaataataaaaagctttggattttgcattcagtgtagttggattttgggaccttggcctcagtgttatttactgggattggcatacgtgttcacaggcagagtagttgatctcacacaacgggtgatctcacaaaactggtaagtttcttatgctcatgagccctccctttttttttttaatttggtgcctgcaactttcttaacaatgattctacttcctgggctatcacattataatgctcttggcctcttttttgctgctgttttgctattcttaaacttaggccaagtaccaatgttggctgttagaagggattctgttcattcaacatgcaactttagggaatggaagtaagttcatttttaagttgtgttgtcagtaggtgcggtgtctagggtagtgaatcctgtaagttcaaatttatgattaggtgacgagttgacattgagattgtccttttccctgatcaaaaaatgaataaagcctttttaaacaaaa

SEQ ID NO: 418634 - DNA, 2568 bp, Homo sapiens
ggccgggtgttaatcggccgaggtacaacgctccgccgccgctgctgccgcgacccggactgcgcgccagcacccccctgccgacagctccgtcactatggaggatatgaacgagtacagcaatatagaggaattcgcagagggatccaagatcaacgcgagcaagaatcagcaggatgacggtaaaatgtttattggaggcttgagctgggatacaagcaaaaaagatctgacagagtacttgtctcgatttggggaagttgtagactgcacaattaaaacagatccagtcactgggagatcaagaggatttggatttgtgcttttcaaagatgctgctagtgttgataaggttttggaactgaaagaacacaaactggatggcaaattgatagatcccaaaagggccaaagctttaaaagggaaagaacctcccaaaaaggtttttgtgggtggattgagcccggatacttctgaagaacaaattaaagaatattttggagcctttggagagattgaaaatattgaacttcccatggatacaaaaacaaatgaaagaagaggattttgttttatcacatatactgatgaagagccagtaaaaaaattgttagaaagcagataccatcaaattggttctgggaagtgtgaaatcaaagttgcacaacccaaagaggtatataggcagcaacagcaacaacaaaaaggtggaagaggtgctgcagctggtggacgaggtggtacgaggggtcgtggccgaggtcagggccaaaactggaaccaaggatttaataactattatgatcaaggatatggaaattacaatagtgcctatggtggtgatcaaaactatagtggctatggcggatatgattatactgggtataactatgggaactatggatatggacagggatatgcagactacagtggccaacagagcacttatggcaaggcatctcgagggggtggcaatcaccaaaacaattaccagccatactaaaggagaacattggagaaaacaggaggagatgttaaagtaacccatcttgcaggacgacattgaagattggtcttctgttgatctaagatgattattttgtaaaagactttctagtgtacaagacaccattgtgtccaactgtatatagctgccaattagttttctttgtttttactttgtcctttgctatctgtgttatgactcaatgtggatttgtttatacacattttatttgtatcatttcatgttaaacctcaaataaatgcttccttatgtgattgcttttctgcgtcaggtactacatagctctgtaaaaaatgtaatttaaaataagcaataattaaggcacagttgattttgtagagtattggtccatacagagaaactgtggtcctttataaatagccagccagcgtcaccctcttctccaatttgtaggtgtattttatgctcttaaggcttcatcttctccctgtaactgagatttctaccacacctttgaacaatgttctttcccttctggttatctgaagactgtcctgaaaggaagacataagtgttgtgattagtagaagctttgtaatcataacacaatgagtaattcttgataaaagttcagatacaaaaggagcactgtaaaactggtaggagctatggtttaagagcattggaagtagttacaactcaaggattttggtagaaaggtatgagtttggtcgaaaaattaaaatagtggcaaaataagatttagttgtgttttctcagagccgccacaagattgaacaaaatgttttctgtttgggcatcctgaggaagttgtattagctgttaatgctctgtgagtttagaaaaagtcttgatagtaaatctagtttttgacacagtgcatgaactaagtagttaaatatttacatattcagaaaggaatagtggaaaaggtatcttggttatgacaaagtcattacaaatgtgactaagtcattacaaatgtgactgagtcattacagtggaccctctgggtgcattgaaaagaatccgttttatatccaggtttcagaggacctggaataataaaaagctttggattttgcattcagtgtagttggattttgggaccttggcctcagtgttatttactgggattggcatacgtgttcacaggcagagtagttgatctcacacaacgggtgatctcacaaaactggtaagtttcttatgctcatgagccctccctttttttttttaatttggtgcctgcaactttcttaacaatgattctacttcctgggctatcacattataatgctcttggcctcttttttgctgctgttttgctattcttaaacttaggccaagtaccaatgttggctgttagaagggattctgttcattcaacatgcaactttagggaatggaagtaagttcatttttaagttgtgttgtcagtaggtgcggtgtctagggtagtgaatcctgtaagttcaaatttatgattaggtgacgagttgacattgagattgtccttttccctgatcaaaaaatgaataaagcctttttaaacaaaa

SEQ ID NO: 418635 - DNA, 2702 bp, Homo sapiens
ggccgggtgttaatcggccgaggtacaacgctccgccgccgctgctgccgcgacccggactgcgcgccagcacccccctgccgacagctccgtcactatggaggatatgaacgagtacagcaatatagaggaattcgcagagggatccaagatcaacgcgagcaagaatcagcaggatgacggtaaaatgtttattggaggcttgagctgggatacaagcaaaaaagatctgacagagtacttgtctcgatttggggaagttgtagactgcacaattaaaacagatccagtcactgggagatcaagaggatttggatttgtgcttttcaaagatgctgctagtgttgataaggttttggaactgaaagaacacaaactggatggcaaattgatagatcccaaaagggccaaagctttaaaagggaaagaacctcccaaaaaggtttttgtgggtggattgagcccggatacttctgaagaacaaattaaagaatattttggagcctttggagagattgaaaatattgaacttcccatggatacaaaaacaaatgaaagaagaggattttgttttatcacatatactgatgaagagccagtaaaaaaattgttagaaagcagataccatcaaattggttctgggaagtgtgaaatcaaagttgcacaacccaaagaggtatataggcagcaacagcaacaacaaaaaggtggaagaggtgctgcagctggtggacgaggtggtacgaggggtcgtggccgaggtcagggccaaaactggaaccaaggatttaataactattatgatcaaggatatggaaattacaatagtgcctatggtggtgatcaaaactatagtggctatggcggatatgattatactgggtataactatgggaactatggatatggacagggatatgcagactacagtggccaacagagcacttatggcaaggcatctcgagggggtggcaatcaccaaaacaattaccagccatactaaaggagaacattggagaaaacaggaggagatgttaaagtaacccatcttgcaggacgacattgaagattggtcttctgttgatctaagatgattattttgtaaaagactttctagtgtacaagacaccattgtgtccaactgtatatagctgccaattagttttctttgtttttactttgtcctttgctatctgtgttatgactcaatgtggatttgtttatacacattttatttgtatcatttcatgttaaacctcaaataaatgcttccttatgtgattgcttttctgcgtcaggtactacatagctctgtaaaaaatgtaatttaaaataagcaataattaaggcacagttgattttgtagagtattggtccatacagagaaactgtggtcctttataaatagccagccagcgtcaccctcttctccaatttgtaggtgtattttatgctcttaaggcttcatcttctccctgtaactgagatttctaccacacctttgaacaatgttctttcccttctggttatctgaagactgtcctgaaaggaagacataagtgttgtgattagtagaagctttctagtagaccatatttcttctggattgtaataaaattgttagtagctccttttactttgttcctgtctctggaaagccatttttgaattgctgattactttggctttaatcagtggtcacctagaaaaagctttgtaatcataacacaatgagtaattcttgataaaagttcagatacaaaaggagcactgtaaaactggtaggagctatggtttaagagcattggaagtagttacaactcaaggattttggtagaaaggtatgagtttggtcgaaaaattaaaatagtggcaaaataagatttagttgtgttttctcagagccgccacaagattgaacaaaatgttttctgtttgggcatcctgaggaagttgtattagctgttaatgctctgtgagtttagaaaaagtcttgatagtaaatctagtttttgacacagtgcatgaactaagtagttaaatatttacatattcagaaaggaatagtggaaaaggtatcttggttatgacaaagtcattacaaatgtgactaagtcattacaaatgtgactgagtcattacagtggaccctctgggtgcattgaaaagaatccgttttatatccaggtttcagaggacctggaataataaaaagctttggattttgcattcagtgtagttggattttgggaccttggcctcagtgttatttactgggattggcatacgtgttcacaggcagagtagttgatctcacacaacgggtgatctcacaaaactggtaagtttcttatgctcatgagccctccctttttttttttaatttggtgcctgcaactttcttaacaatgattctacttcctgggctatcacattataatgctcttggcctcttttttgctgctgttttgctattcttaaacttaggccaagtaccaatgttggctgttagaagggattctgttcattcaacatgcaactttagggaatggaagtaagttcatttttaagttgtgttgtcagtaggtgcggtgtctagggtagtgaatcctgtaagttcaaatttatgattaggtgacgagttgacattgagattgtccttttccctgatcaaaaaatgaataaagcctttttaaacaaaa

SEQ ID NO: 418636 - DNA, 4475 bp, Homo sapiens
ggccgggtgttaatcggccgaggtacaacgctccgccgccgctgctgccgcgacccggactgcgcgccagcacccccctgccgacagctccgtcactatggaggatatgaacgagtacagcaatatagaggaattcgcagagggatccaagatcaacgcgagcaagaatcagcaggatgacggtaaaatgtttattggaggcttgagctgggatacaagcaaaaaagatctgacagagtacttgtctcgatttggggaagttgtagactgcacaattaaaacagatccagtcactgggagatcaagaggatttggatttgtgcttttcaaagatgctgctagtgttgataaggttttggaactgaaagaacacaaactggatggcaaattgatagatcccaaaagggccaaagctttaaaagggaaagaacctcccaaaaaggtttttgtgggtggattgagcccggatacttctgaagaacaaattaaagaatattttggagcctttggagagattgaaaatattgaacttcccatggatacaaaaacaaatgaaagaagaggattttgttttatcacatatactgatgaagagccagtaaaaaaattgttagaaagcagataccatcaaattggttctgggaagtgtgaaatcaaagttgcacaacccaaagaggtatataggcagcaacagcaacaacaaaaaggtggaagaggtgctgcagctggtggacgaggtggtacgaggggtcgtggccgaggtcagggccaaaactggaaccaaggatttaataactattatgatcaaggatatggaaattacaatagtgcctatggtggtgatcaaaactatagtggctatggcggatatgattatactgggtataactatgggaactatggatatggacagggatatgcagactacagtggccaacagagcacttatggcaaggcatctcgagggggtggcaatcaccaaaacaattaccagccatactaaaggagaacattggagaaaacaggtgtgtataagagtacaggaaaacagtagaaatgtctaatttaatttaaagatcaatagacaaatgaaacgtaaaaacaaaatactatgtagcctgtttttactaaattgttgattttttaattgctttatgagcctgttttgcctaaagtgtctatagatctttaactttaaagtcttatctcactttctttagtattgcagaaaaacttaagagtttttctgtttgcttttgtgtaccaggtggtctagaggaataattaaacattttagaactattaacaggtaaagtactgaaatgggtacaacttaaggaaaacaagaatgttgtcttctaactctgacattataccttgtttgtacccgccagcgggaacttcattgcaggccgtgtgtcaccctgaccacgtctatctctgggggtcgcacgttgcgggcagagcgcaaggcatacaccagaaaacgctgtcctgtggtatggtctcttccaacttcatgtaccagcgtaaagattaaagtggaaaacttcagactttggcttcatttttaatctttttggagattaagtgtctaaacttaacttaaatggttttttacaggagttaaagtacataaatgcctttttacagcttaatcattttggtcttctgtttagtgttgtatttcaattgtggagcctcattttaagtgttcattcttttaagatttaatgcttgctttttctttttatagctaatagtgaaatctacaaaccaaaacaagaacttttaaatctgggatataaattaaagatcatatgcacagatcaatttatgttcttgtaataaacttattagaaattggtgtttgtgatagcattttacttgggttactagagatgcttctagtagaccttaatctagcatagttgaacctctgaatatgggaaggttgtattcccagattctttcctgaatagatttgaatttaatgtcatttgggaactccagggtgagtttattgactacccaaactgtattttaccaataaatatgcatatgatctttaattattgaagaaaataaagtgaggacttaaaacaattcatgaaagtggacctttaaaagcttgtcagagttgcacaaatctaactggtattttgtttttgtttttaggaggagatgttaaagtaacccatcttgcaggacgacattgaagattggtcttctgttgatctaagatgattattttgtaaaagactttctagtgtacaagacaccattgtgtccaactgtatatagctgccaattagttttctttgtttttactttgtcctttgctatctgtgttatgactcaatgtggatttgtttatacacattttatttgtatcatttcatgttaaacctcaaataaatgcttccttatgtgattgcttttctgcgtcaggtactacatagctctgtaaaaaatgtaatttaaaataagcaataattaaggcacagttgattttgtagagtattggtccatacagagaaactgtggtcctttataaatagccagccagcgtcaccctcttctccaatttgtaggtgtattttatgctcttaaggcttcatcttctccctgtaactgagatttctaccacacctttgaacaatgttctttcccttctggttatctgaagactgtcctgaaaggaagacataagtgttgtgattagtagaagctttctagtagaccatatttcttctggattgtaataaaattgttagtagctccttttactttgttcctgtctctggaaagccatttttgaattgctgattactttggctttaatcagtggtcacctagaaaaagctttgtaatcataacacaatgagtaattcttgataaaagttcagatacaaaaggagcactgtaaaactggtaggagctatggtttaagagcattggaagtagttacaactcaaggattttggtagaaaggtatgagtttggtcgaaaaattaaaatagtggcaaaataagatttagttgtgttttctcagagccgccacaagattgaacaaaatgttttctgtttgggcatcctgaggaagttgtattagctgttaatgctctgtgagtttagaaaaagtcttgatagtaaatctagtttttgacacagtgcatgaactaagtagttaaatatttacatattcagaaaggaatagtggaaaaggtatcttggttatgacaaagtcattacaaatgtgactaagtcattacaaatgtgactgagtcattacagtggaccctctgggtgcattgaaaagaatccgttttatatccaggtttcagaggacctggaataataaaaagctttggattttgcattcagtgtagttggattttgggaccttggcctcagtgttatttactgggattggcatacgtgttcacaggcagagtagttgatctcacacaacgggtgatctcacaaaactggtaagtttcttatgctcatgagccctccctttttttttttaatttggtgcctgcaactttcttaacaatgattctacttcctgggctatcacattataatgctcttggcctcttttttgctgctgttttgctattcttaaacttaggccaagtaccaatgttggctgttagaagggattctgttcattcaacatgcaactttagggaatggaagtaagttcatttttaagttgtgttgtcagtaggtgcggtgtctagggtagtgaatcctgtaagttcaaatttatgattaggtgacgagttgacattgagattgtccttttccctgatcaaaaaatgaataaagcctttttaaacaaaatccaaacttttaatcaagtcttgatatgtatgactgagaaaaaatacactacatctagagatgattgagatgttttgcaaagaattgaagggggagtgagaattggtttttcttgcaggggctttgaactctagatttaattcagatttcagggtctatcagttcaccaactgatgcaaatttgaacagatactctaaggctaagtgtcctaggttggatgaactgaagctactatcaagatctcgttcccaaggattaatttagaacaaagtaattggacaagtttattggggaggggatagaaatgaattctaaagtacctataacaaatactctgtgtatgttttttacatcgtatttgccttttacattgtttagaccaaattctgtgtgatgttatcctcgggaagaggatagaaattaattctaaagtacctataacaaatgctcggtttgtatatgtttttatacatcgtatttgccttttgcattgttcagaccaaattctgtgtgatgttatcctaacaaaacaccttagtaatttctttggttaacatgttaatctgtaatctcacttttataagatgaggactattaaaatgagatgtctgttgggatg

SEQ ID NO: 418637 - DNA, 3486 bp, Homo sapiens
ggccgggtgttaatcggccgaggtacaacgctccgccgccgctgctgccgcgacccggactgcgcgccagcacccccctgccgacagctccgtcactatggaggatatgaacgagtacagcaatatagaggaattcgcagagggatccaagatcaacgcgagcaagaatcagcaggatgacggtaaaatgtttattggaggcttgagctgggatacaagcaaaaaagatctgacagagtacttgtctcgatttggggaagttgtagactgcacaattaaaacagatccagtcactgggagatcaagaggatttggatttgtgcttttcaaagatgctgctagtgttgataaggttttggaactgaaagaacacaaactggatggcaaattgatagatcccaaaagggccaaagctttaaaagggaaagaacctcccaaaaaggtttttgtgggtggattgagcccggatacttctgaagaacaaattaaagaatattttggagcctttggagagattgaaaatattgaacttcccatggatacaaaaacaaatgaaagaagaggattttgttttatcacatatactgatgaagagccagtaaaaaaattgttagaaagcagataccatcaaattggttctgggaagtgtgaaatcaaagttgcacaacccaaagaggtatataggcagcaacagcaacaacaaaaaggtggaagaggtgctgcagctggtggacgaggtggtacgaggggtcgtggccgaggtcagggccaaaactggaaccaaggatttaataactattatgatcaaggatatggaaattacaatagtgcctatggtggtgatcaaaactatagtggctatggcggatatgattatactgggtataactatgggaactatggatatggacagggatatgcagactacagtggccaacagagcacttatggcaaggcatctcgagggggtggcaatcaccaaaacaattaccagccatactaaaggagaacattggagaaaacagcgggaacttcattgcaggccgtgtgtcaccctgaccacgtctatctctgggggtcgcacgttgcgggcagagcgcaaggcatacaccagaaaacgctgtcctgtggtatggtctcttccaacttcatgtaccagcgtaaagattaaagtggaaaacttcagactttggcttcatttttaatctttttggagattaagtgtctaaacttaacttaaatggttttttacaggagttaaagtacataaatgcctttttacagcttaatcattttggtcttctgtttagtgttgtatttcaattgtggagcctcattttaagtgttcattcttttaagatttaatgcttgctttttctttttatagctaatagtgaaatctacaaaccaaaacaagaacttttaaatctgggatataaattaaagatcatatgcacagatcaatttatgttcttgtaataaacttattagaaattggtgtttgtgatagcattttacttgggttactagagatgcttctagtagaccttaatctagcatagttgaacctctgaatatgggaaggttgtattcccagattctttcctgaatagatttgaatttaatgtcatttgggaactccagggtgagtttattgactacccaaactgtattttaccaataaatatgcatatgatctttaattattgaagaaaataaagtgaggacttaaaacaattcatgaaagtggacctttaaaagcttgtcagagttgcacaaatctaactggtattttgtttttgtttttaggaggagatgttaaagtaacccatcttgcaggacgacattgaagattggtcttctgttgatctaagatgattattttgtaaaagactttctagtgtacaagacaccattgtgtccaactgtatatagctgccaattagttttctttgtttttactttgtcctttgctatctgtgttatgactcaatgtggatttgtttatacacattttatttgtatcatttcatgttaaacctcaaataaatgcttccttatgtgattgcttttctgcgtcaggtactacatagctctgtaaaaaatgtaatttaaaataagcaataattaaggcacagttgattttgtagagtattggtccatacagagaaactgtggtcctttataaatagccagccagcgtcaccctcttctccaatttgtaggtgtattttatgctcttaaggcttcatcttctccctgtaactgagatttctaccacacctttgaacaatgttctttcccttctggttatctgaagactgtcctgaaaggaagacataagtgttgtgattagtagaagctttctagtagaccatatttcttctggattgtaataaaattgttagtagctccttttactttgttcctgtctctggaaagccatttttgaattgctgattactttggctttaatcagtggtcacctagaaaaagctttgtaatcataacacaatgagtaattcttgataaaagttcagatacaaaaggagcactgtaaaactggtaggagctatggtttaagagcattggaagtagttacaactcaaggattttggtagaaaggtatgagtttggtcgaaaaattaaaatagtggcaaaataagatttagttgtgttttctcagagccgccacaagattgaacaaaatgttttctgtttgggcatcctgaggaagttgtattagctgttaatgctctgtgagtttagaaaaagtcttgatagtaaatctagtttttgacacagtgcatgaactaagtagttaaatatttacatattcagaaaggaatagtggaaaaggtatcttggttatgacaaagtcattacaaatgtgactaagtcattacaaatgtgactgagtcattacagtggaccctctgggtgcattgaaaagaatccgttttatatccaggtttcagaggacctggaataataaaaagctttggattttgcattcagtgtagttggattttgggaccttggcctcagtgttatttactgggattggcatacgtgttcacaggcagagtagttgatctcacacaacgggtgatctcacaaaactggtaagtttcttatgctcatgagccctccctttttttttttaatttggtgcctgcaactttcttaacaatgattctacttcctgggctatcacattataatgctcttggcctcttttttgctgctgttttgctattcttaaacttaggccaagtaccaatgttggctgttagaagggattctgttcattcaacatgcaactttagggaatggaagtaagttcatttttaagttgtgttgtcagtaggtgcggtgtctagggtagtgaatcctgtaagttcaaatttatgattaggtgacgagttgacattgagattgtccttttccctgatcaaaaaatgaataaagcctttttaaacaaaa

SEQ ID NO: 418638 - DNA, 3176 bp, Homo sapiens
ggccgggtgttaatcggccgaggtacaacgctccgccgccgctgctgccgcgacccggactgcgcgccagcacccccctgccgacagctccgtcactatggaggatatgaacgagtacagcaatatagaggaattcgcagagggatccaagatcaacgcgagcaagaatcagcaggatgacggtaaaatgtttattggaggcttgagctgggatacaagcaaaaaagatctgacagagtacttgtctcgatttggggaagttgtagactgcacaattaaaacagatccagtcactgggagatcaagaggatttggatttgtgcttttcaaagatgctgctagtgttgataaggttttggaactgaaagaacacaaactggatggcaaattgatagatcccaaaagggccaaagctttaaaagggaaagaacctcccaaaaaggtttttgtgggtggattgagcccggatacttctgaagaacaaattaaagaatattttggagcctttggagagattgaaaatattgaacttcccatggatacaaaaacaaatgaaagaagaggattttgttttatcacatatactgatgaagagccagtaaaaaaattgttagaaagcagataccatcaaattggttctgggaagtgtgaaatcaaagttgcacaacccaaagaggtatataggcagcaacagcaacaacaaaaaggtggaagaggtgctgcagctggtggacgaggtggtacgaggggtcgtggccgaggtcagggccaaaactggaaccaaggatttaataactattatgatcaaggatatggaaattacaatagtgcctatggtggtgatcaaaactatagtggctatggcggatatgattatactgggtataactatgggaactatggatatggacagggatatgcagactacagtggccaacagagcacttatggcaaggcatctcgagggggtggcaatcaccaaaacaattaccagccatactaaaggagaacattggagaaaacaggtgtgtataagagtacaggaaaacagtagaaatgtctaatttaatttaaagatcaatagacaaatgaaacgtaaaaacaaaatactatgtagcctgtttttactaaattgttgattttttaattgctttatgagcctgttttgcctaaagtgtctatagatctttaactttaaagtcttatctcactttctttagtattgcagaaaaacttaagagtttttctgtttgcttttgtgtaccaggtggtctagaggaataattaaacattttagaactattaacaggtaaagtactgaaatgggtacaacttaaggaaaacaagaatgttgtcttctaactctgacattataccttgtttgtacccgccagcgggaacttcattgcaggccgtgtgtcaccctgaccacgtctatctctgggggtcgcacgttgcgggcagagcgcaaggcatacaccagaaaacgctgtcctgtggaggagatgttaaagtaacccatcttgcaggacgacattgaagattggtcttctgttgatctaagatgattattttgtaaaagactttctagtgtacaagacaccattgtgtccaactgtatatagctgccaattagttttctttgtttttactttgtcctttgctatctgtgttatgactcaatgtggatttgtttatacacattttatttgtatcatttcatgttaaacctcaaataaatgcttccttatgtgattgcttttctgcgtcaggtactacatagctctgtaaaaaatgtaatttaaaataagcaataattaaggcacagttgattttgtagagtattggtccatacagagaaactgtggtcctttataaatagccagccagcgtcaccctcttctccaatttgtaggtgtattttatgctcttaaggcttcatcttctccctgtaactgagatttctaccacacctttgaacaatgttctttcccttctggttatctgaagactgtcctgaaaggaagacataagtgttgtgattagtagaagctttctagtagaccatatttcttctggattgtaataaaattgttagtagctccttttactttgttcctgtctctggaaagccatttttgaattgctgattactttggctttaatcagtggtcacctagaaaaagctttgtaatcataacacaatgagtaattcttgataaaagttcagatacaaaaggagcactgtaaaactggtaggagctatggtttaagagcattggaagtagttacaactcaaggattttggtagaaaggtatgagtttggtcgaaaaattaaaatagtggcaaaataagatttagttgtgttttctcagagccgccacaagattgaacaaaatgttttctgtttgggcatcctgaggaagttgtattagctgttaatgctctgtgagtttagaaaaagtcttgatagtaaatctagtttttgacacagtgcatgaactaagtagttaaatatttacatattcagaaaggaatagtggaaaaggtatcttggttatgacaaagtcattacaaatgtgactaagtcattacaaatgtgactgagtcattacagtggaccctctgggtgcattgaaaagaatccgttttatatccaggtttcagaggacctggaataataaaaagctttggattttgcattcagtgtagttggattttgggaccttggcctcagtgttatttactgggattggcatacgtgttcacaggcagagtagttgatctcacacaacgggtgatctcacaaaactggtaagtttcttatgctcatgagccctccctttttttttttaatttggtgcctgcaactttcttaacaatgattctacttcctgggctatcacattataatgctcttggcctcttttttgctgctgttttgctattcttaaacttaggccaagtaccaatgttggctgttagaagggattctgttcattcaacatgcaactttagggaatggaagtaagttcatttttaagttgtgttgtcagtaggtgcggtgtctagggtagtgaatcctgtaagttcaaatttatgattaggtgacgagttgacattgagattgtccttttccctgatcaaaaaatgaataaagcctttttaaacaaaa

SEQ ID NO: 418639 - DNA, 4411 bp, Homo sapiens
ggccgggtgttaatcggccgaggtacaacgctccgccgccgctgctgccgcgacccggactgcgcgccagcacccccctgccgacagctccgtcactatggaggatatgaacgagtacagcaatatagaggaattcgcagagggatccaagatcaacgcgagcaagaatcagcaggatgacggtaaaatgtttattggaggcttgagctgggatacaagcaaaaaagatctgacagagtacttgtctcgatttggggaagttgtagactgcacaattaaaacagatccagtcactgggagatcaagaggatttggatttgtgcttttcaaagatgctgctagtgttgataaggttttggaactgaaagaacacaaactggatggcaaattgatagatcccaaaagggccaaagctttaaaagggaaagaacctcccaaaaaggtttttgtgggtggattgagcccggatacttctgaagaacaaattaaagaatattttggagcctttggagagattgaaaatattgaacttcccatggatacaaaaacaaatgaaagaagaggattttgttttatcacatatactgatgaagagccagtaaaaaaattgttagaaagcagataccatcaaattggttctgggaagtgtgaaatcaaagttgcacaacccaaagaggtatataggcagcaacagcaacaacaaaaaggtggaagaggtgctgcagctggtggacgaggtggtacgaggggtcgtggccgagaggtgagacttaattcttgaaatatgactccgtggtttatttaagctgtatactgctgaatatgagtagtcctgtaccaaagcaaaactttaaacttaaaaccattccagcggaggggggactgttcagcttagtggaggttgtgtgtggtggttttttgttgtgagctcactggtttcaaaaaactgttaaaagtgtggccactttgacaattagtgtcatcactgataggaaaagtgtaccattacatgatacaccgtggtgtgataggttttcttgggcaggagtccttgttttaaacagaacagtgtacctgtcttcggctttaatggaaaattgaatgattttccattaagtttaggaagtttgatactggcacaattggactttctgcctccttttttataacagctggaaaaatagtttttcaagcagatagcaatatatatgtccattctgccctttaagatttgcagagtgagagacaagaacgcatcattttatgttagaattgggggtcagaagttgtttcctaacaatcattgtgcattgtttcgtcagggccaaaactggaaccaaggatttaataactattatgatcaaggatatggaaattacaatagtgcctatggtggtgatcaaaactatagtggctatggcggatatgattatactgggtataactatgggaactatggatatggacagggatatgcagactacagtggccaacagagcacttatggcaaggcatctcgagggggtggcaatcaccaaaacaattaccagccatactaaaggagaacattggagaaaacaggtgtgtataagagtacaggaaaacagtagaaatgtctaatttaatttaaagatcaatagacaaatgaaacgtaaaaacaaaatactatgtagcctgtttttactaaattgttgattttttaattgctttatgagcctgttttgcctaaagtgtctatagatctttaactttaaagtcttatctcactttctttagtattgcagaaaaacttaagagtttttctgtttgcttttgtgtaccaggtggtctagaggaataattaaacattttagaactattaacaggtaaagtactgaaatgggtacaacttaaggaaaacaagaatgttgtcttctaactctgacattataccttgtttgtacccgccagcgggaacttcattgcaggccgtgtgtcaccctgaccacgtctatctctgggggtcgcacgttgcgggcagagcgcaaggcatacaccagaaaacgctgtcctgtggtatggtctcttccaacttcatgtaccagcgtaaagattaaagtggaaaacttcagactttggcttcatttttaatctttttggagattaagtgtctaaacttaacttaaatggttttttacaggagttaaagtacataaatgcctttttacagcttaatcattttggtcttctgtttagtgttgtatttcaattgtggagcctcattttaagtgttcattcttttaagatttaatgcttgctttttctttttatagctaatagtgaaatctacaaaccaaaacaagaacttttaaatctgggatataaattaaagatcatatgcacagatcaatttatgttcttgtaataaacttattagaaattggtgtttgtgatagcattttacttgggttactagagatgcttctagtagaccttaatctagcatagttgaacctctgaatatgggaaggttgtattcccagattctttcctgaatagatttgaatttaatgtcatttgggaactccagggtgagtttattgactacccaaactgtattttaccaataaatatgcatatgatctttaattattgaagaaaataaagtgaggacttaaaacaattcatgaaagtggacctttaaaagcttgtcagagttgcacaaatctaactggtattttgtttttgtttttaggaggagatgttaaagtaacccatcttgcaggacgacattgaagattggtcttctgttgatctaagatgattattttgtaaaagactttctagtgtacaagacaccattgtgtccaactgtatatagctgccaattagttttctttgtttttactttgtcctttgctatctgtgttatgactcaatgtggatttgtttatacacattttatttgtatcatttcatgttaaacctcaaataaatgcttccttatgtgattgcttttctgcgtcaggtactacatagctctgtaaaaaatgtaatttaaaataagcaataattaaggcacagttgattttgtagagtattggtccatacagagaaactgtggtcctttataaatagccagccagcgtcaccctcttctccaatttgtaggtgtattttatgctcttaaggcttcatcttctccctgtaactgagatttctaccacacctttgaacaatgttctttcccttctggttatctgaagactgtcctgaaaggaagacataagtgttgtgattagtagaagctttctagtagaccatatttcttctggattgtaataaaattgttagtagctccttttactttgttcctgtctctggaaagccatttttgaattgctgattactttggctttaatcagtggtcacctagaaaaagctttgtaatcataacacaatgagtaattcttgataaaagttcagatacaaaaggagcactgtaaaactggtaggagctatggtttaagagcattggaagtagttacaactcaaggattttggtagaaaggtatgagtttggtcgaaaaattaaaatagtggcaaaataagatttagttgtgttttctcagagccgccacaagattgaacaaaatgttttctgtttgggcatcctgaggaagttgtattagctgttaatgctctgtgagtttagaaaaagtcttgatagtaaatctagtttttgacacagtgcatgaactaagtagttaaatatttacatattcagaaaggaatagtggaaaaggtatcttggttatgacaaagtcattacaaatgtgactaagtcattacaaatgtgactgagtcattacagtggaccctctgggtgcattgaaaagaatccgttttatatccaggtttcagaggacctggaataataaaaagctttggattttgcattcagtgtagttggattttgggaccttggcctcagtgttatttactgggattggcatacgtgttcacaggcagagtagttgatctcacacaacgggtgatctcacaaaactggtaagtttcttatgctcatgagccctccctttttttttttaatttggtgcctgcaactttcttaacaatgattctacttcctgggctatcacattataatgctcttggcctcttttttgctgctgttttgctattcttaaacttaggccaagtaccaatgttggctgttagaagggattctgttcattcaacatgcaactttagggaatggaagtaagttcatttttaagttgtgttgtcagtaggtgcggtgtctagggtagtgaatcctgtaagttcaaatttatgattaggtgacgagttgacattgagattgtccttttccctgatcaaaaaatgaataaagcctttttaaacaaaa

SEQ ID NO: 418640 - DNA, 3684 bp, Homo sapiens
ggccgggtgttaatcggccgaggtacaacgctccgccgccgctgctgccgcgacccggactgcgcgccagcacccccctgccgacagctccgtcactatggaggatatgaacgagtacagcaatatagaggaattcgcagagggatccaagatcaacgcgagcaagaatcagcaggatgacggtaaaatgtttattggaggcttgagctgggatacaagcaaaaaagatctgacagagtacttgtctcgatttggggaagttgtagactgcacaattaaaacagatccagtcactgggagatcaagaggatttggatttgtgcttttcaaagatgctgctagtgttgataaggttttggaactgaaagaacacaaactggatggcaaattgatagatcccaaaagggccaaagctttaaaagggaaagaacctcccaaaaaggtttttgtgggtggattgagcccggatacttctgaagaacaaattaaagaatattttggagcctttggagagattgaaaatattgaacttcccatggatacaaaaacaaatgaaagaagaggattttgttttatcacatatactgatgaagagccagtaaaaaaattgttagaaagcagataccatcaaattggttctgggaagtgtgaaatcaaagttgcacaacccaaagaggtatataggcagcaacagcaacaacaaaaaggtggaagaggtgctgcagctggtggacgaggtggtacgaggggtcgtggccgaggccaacagagcacttatggcaaggcatctcgagggggtggcaatcaccaaaacaattaccagccatactaaaggagaacattggagaaaacaggtgtgtataagagtacaggaaaacagtagaaatgtctaatttaatttaaagatcaatagacaaatgaaacgtaaaaacaaaatactatgtagcctgtttttactaaattgttgattttttaattgctttatgagcctgttttgcctaaagtgtctatagatctttaactttaaagtcttatctcactttctttagtattgcagaaaaacttaagagtttttctgtttgcttttgtgtaccaggtggtctagaggaataattaaacattttagaactattaacaggtaaagtactgaaatgggtacaacttaaggaaaacaagaatgttgtcttctaactctgacattataccttgtttgtacccgccagcgggaacttcattgcaggccgtgtgtcaccctgaccacgtctatctctgggggtcgcacgttgcgggcagagcgcaaggcatacaccagaaaacgctgtcctgtggtatggtctcttccaacttcatgtaccagcgtaaagattaaagtggaaaacttcagactttggcttcatttttaatctttttggagattaagtgtctaaacttaacttaaatggttttttacaggagttaaagtacataaatgcctttttacagcttaatcattttggtcttctgtttagtgttgtatttcaattgtggagcctcattttaagtgttcattcttttaagatttaatgcttgctttttctttttatagctaatagtgaaatctacaaaccaaaacaagaacttttaaatctgggatataaattaaagatcatatgcacagatcaatttatgttcttgtaataaacttattagaaattggtgtttgtgatagcattttacttgggttactagagatgcttctagtagaccttaatctagcatagttgaacctctgaatatgggaaggttgtattcccagattctttcctgaatagatttgaatttaatgtcatttgggaactccagggtgagtttattgactacccaaactgtattttaccaataaatatgcatatgatctttaattattgaagaaaataaagtgaggacttaaaacaattcatgaaagtggacctttaaaagcttgtcagagttgcacaaatctaactggtattttgtttttgtttttaggaggagatgttaaagtaacccatcttgcaggacgacattgaagattggtcttctgttgatctaagatgattattttgtaaaagactttctagtgtacaagacaccattgtgtccaactgtatatagctgccaattagttttctttgtttttactttgtcctttgctatctgtgttatgactcaatgtggatttgtttatacacattttatttgtatcatttcatgttaaacctcaaataaatgcttccttatgtgattgcttttctgcgtcaggtactacatagctctgtaaaaaatgtaatttaaaataagcaataattaaggcacagttgattttgtagagtattggtccatacagagaaactgtggtcctttataaatagccagccagcgtcaccctcttctccaatttgtaggtgtattttatgctcttaaggcttcatcttctccctgtaactgagatttctaccacacctttgaacaatgttctttcccttctggttatctgaagactgtcctgaaaggaagacataagtgttgtgattagtagaagctttctagtagaccatatttcttctggattgtaataaaattgttagtagctccttttactttgttcctgtctctggaaagccatttttgaattgctgattactttggctttaatcagtggtcacctagaaaaagctttgtaatcataacacaatgagtaattcttgataaaagttcagatacaaaaggagcactgtaaaactggtaggagctatggtttaagagcattggaagtagttacaactcaaggattttggtagaaaggtatgagtttggtcgaaaaattaaaatagtggcaaaataagatttagttgtgttttctcagagccgccacaagattgaacaaaatgttttctgtttgggcatcctgaggaagttgtattagctgttaatgctctgtgagtttagaaaaagtcttgatagtaaatctagtttttgacacagtgcatgaactaagtagttaaatatttacatattcagaaaggaatagtggaaaaggtatcttggttatgacaaagtcattacaaatgtgactaagtcattacaaatgtgactgagtcattacagtggaccctctgggtgcattgaaaagaatccgttttatatccaggtttcagaggacctggaataataaaaagctttggattttgcattcagtgtagttggattttgggaccttggcctcagtgttatttactgggattggcatacgtgttcacaggcagagtagttgatctcacacaacgggtgatctcacaaaactggtaagtttcttatgctcatgagccctccctttttttttttaatttggtgcctgcaactttcttaacaatgattctacttcctgggctatcacattataatgctcttggcctcttttttgctgctgttttgctattcttaaacttaggccaagtaccaatgttggctgttagaagggattctgttcattcaacatgcaactttagggaatggaagtaagttcatttttaagttgtgttgtcagtaggtgcggtgtctagggtagtgaatcctgtaagttcaaatttatgattaggtgacgagttgacattgagattgtccttttccctgatcaaaaaatgaataaagcctttttaaacaaaa

SEQ ID NO: 418641 - DNA, 2810 bp, Homo sapiens
ggccgggtgttaatcggccgaggtacaacgctccgccgccgctgctgccgcgacccggactgcgcgccagcacccccctgccgacagctccgtcactatggaggatatgaacgagtacagcaatatagaggaattcgcagagggatccaagatcaacgcgagcaagaatcagcaggatgacggtaaaatgtttattggaggcttgagctgggatacaagcaaaaaagatctgacagagtacttgtctcgatttggggaagttgtagactgcacaattaaaacagatccagtcactgggagatcaagaggatttggatttgtgcttttcaaagatgctgctagtgttgataaggttttggaactgaaagaacacaaactggatggcaaattgatagatcccaaaagggccaaagctttaaaagggaaagaacctcccaaaaaggtttttgtgggtggattgagcccggatacttctgaagaacaaattaaagaatattttggagcctttggagagattgaaaatattgaacttcccatggatacaaaaacaaatgaaagaagaggattttgttttatcacatatactgatgaagagccagtaaaaaaattgttagaaagcagataccatcaaattggttctgggaagtgtgaaatcaaagttgcacaacccaaagaggtatataggcagcaacagcaacaacaaaaaggtggaagaggtgctgcagctggtggacgaggtggtacgaggggtcgtggccgaggtcagggccaaaactggaaccaaggatttaataactattatgatcaaggatatggaaattacaatagtgcctatggtggtgatcaaaactatagtggctatggcggatatgattatactgggtataactatgggaactatggatatggacagggatatgcagactacagtggccaacagagcacttatggcaaggcatctcgagggggtggcaatcaccaaaacaattaccagccatactaaaggagaacattggagaaaacaggtgtgtataagagtacaggaaaacagtagaaatgtctaatttaatttaaagatcaatagacaaatgaaacgtaaaaacaaaatactatgtagcctgtttttactaaattgttgattttttaattgctttatgagcctgttttgcctaaagtgtctatagatctttaactttaaagtcttatctcactttctttagtattgcagaaaaacttaagagtttttctgtttgcttttgtgtaccaggtggtctagaggaataattaaacattttagaactattaacaggtaaagtactgaaatgggtacaacttaaggaaaacaagaatgttgtcttctaactctgacattataccttgtttgtacccgccagcgggaacttcattgcaggccgtgtgtcaccctgaccacgtctatctctgggggtcgcacgttgcgggcagagcgcaaggcatacaccagaaaacgctgtcctgtggtatggtctcttccaacttcatgtaccagcgtaaagattaaagtggaaaacttcagactttggcttcatttttaatctttttggagattaagtgtctaaacttaacttaaatggttttttacaggagttaaagtacataaatgcctttttacagcttaatcattttggtcttctgtttagtgttgtatttcaattgtggagcctcattttaagtgttcattcttttaagatttaatgcttgctttttctttttatagctaatagtgaaatctacaaaccaaaacaagaacttttaaatctgggatataaattaaagatcatatgcacagatcaatttatgttcttgtaataaacttattagaaattggtgtttgtgatagcattttacttgggttactagagatgcttctagtagaccttaatctagcatagttgaacctctgaatatgggaaggttgtattcccagattctttcctgaatagatttgaatttaatgtcatttgggaactccagggtgagtttattgactacccaaactgtattttaccaataaatatgcatatgatctttaattattgaagaaaataaagtgaggacttaaaacaattcatgaaagtggacctttaaaagcttgtcagagttgcacaaatctaactggtattttgtttttgtttttaggaggagatgttaaagtaacccatcttgcaggacgacattgaagattggtcttctgttgatctaagatgattattttgtaaaagactttctagtgtacaagacaccattgtgtccaactgtatatagctgccaattagttttctttgtttttactttgtcctttgctatctgtgttatgactcaatgtggatttgtttatacacattttatttgtatcatttcatgttaaacctcaaataaatgcttccttatgtgattgcttttctgcgtcaggtactacatagctctgtaaaaaatgtaatttaaaataagcaataattaaggcacagttgattttgtagagtattggtccatacagagaaactgtggtcctttataaatagccagccagcgtcaccctcttctccaatttgtaggtgtattttatgctcttaaggcttcatcttctccctgtaactgagatttctaccacacctttgaacaatgttctttcccttctggttatctgaagactgtcctgaaaggaagacataagtgttgtgattagtagaagctttctagtagaccatatttcttctggattgtaataaaattgttagtagctccttttaaaaaaaacacaacacaaaaac

SEQ ID NO: 418642 - DNA, 3356 bp, Homo sapiens
atggggactcgggatagtccaggtacttctgcttcacaaactcatcagtgactgagcttcttcacgtcccaccagagtgaatgatgtatcctgagagaagaaaaagaaaaataaataaacaaataaattcacgtcaaggcatatggcacttcccagtatgtgggcagaggcatttccaacgatggaaacagaggtttccatgcacaacgagggaagcgtccatagaagcccaagcagacactgcagagagggcagcagcagagtcagggccaaaactggaaccaaggatttaataactattatgatcaaggatatggaaattacaatagtgcctatggtggtgatcaaaactatagtggctatggcggatatgattatactgggtataactatgggaactatggatatggacagggatatgcagactacagtggccaacagagcacttatggcaaggcatctcgagggggtggcaatcaccaaaacaattaccagccatactaaaggagaacattggagaaaacaggtgtgtataagagtacaggaaaacagtagaaatgtctaatttaatttaaagatcaatagacaaatgaaacgtaaaaacaaaatactatgtagcctgtttttactaaattgttgattttttaattgctttatgagcctgttttgcctaaagtgtctatagatctttaactttaaagtcttatctcactttctttagtattgcagaaaaacttaagagtttttctgtttgcttttgtgtaccaggtggtctagaggaataattaaacattttagaactattaacaggtaaagtactgaaatgggtacaacttaaggaaaacaagaatgttgtcttctaactctgacattataccttgtttgtacccgccagcgggaacttcattgcaggccgtgtgtcaccctgaccacgtctatctctgggggtcgcacgttgcgggcagagcgcaaggcatacaccagaaaacgctgtcctgtggtatggtctcttccaacttcatgtaccagcgtaaagattaaagtggaaaacttcagactttggcttcatttttaatctttttggagattaagtgtctaaacttaacttaaatggttttttacaggagttaaagtacataaatgcctttttacagcttaatcattttggtcttctgtttagtgttgtatttcaattgtggagcctcattttaagtgttcattcttttaagatttaatgcttgctttttctttttatagctaatagtgaaatctacaaaccaaaacaagaacttttaaatctgggatataaattaaagatcatatgcacagatcaatttatgttcttgtaataaacttattagaaattggtgtttgtgatagcattttacttgggttactagagatgcttctagtagaccttaatctagcatagttgaacctctgaatatgggaaggttgtattcccagattctttcctgaatagatttgaatttaatgtcatttgggaactccagggtgagtttattgactacccaaactgtattttaccaataaatatgcatatgatctttaattattgaagaaaataaagtgaggacttaaaacaattcatgaaagtggacctttaaaagcttgtcagagttgcacaaatctaactggtattttgtttttgtttttaggaggagatgttaaagtaacccatcttgcaggacgacattgaagattggtcttctgttgatctaagatgattattttgtaaaagactttctagtgtacaagacaccattgtgtccaactgtatatagctgccaattagttttctttgtttttactttgtcctttgctatctgtgttatgactcaatgtggatttgtttatacacattttatttgtatcatttcatgttaaacctcaaataaatgcttccttatgtgattgcttttctgcgtcaggtactacatagctctgtaaaaaatgtaatttaaaataagcaataattaaggcacagttgattttgtagagtattggtccatacagagaaactgtggtcctttataaatagccagccagcgtcaccctcttctccaatttgtaggtgtattttatgctcttaaggcttcatcttctccctgtaactgagatttctaccacacctttgaacaatgttctttcccttctggttatctgaagactgtcctgaaaggaagacataagtgttgtgattagtagaagctttctagtagaccatatttcttctggattgtaataaaattgttagtagctccttttactttgttcctgtctctggaaagccatttttgaattgctgattactttggctttaatcagtggtcacctagaaaaagctttgtaatcataacacaatgagtaattcttgataaaagttcagatacaaaaggagcactgtaaaactggtaggagctatggtttaagagcattggaagtagttacaactcaaggattttggtagaaaggtatgagtttggtcgaaaaattaaaatagtggcaaaataagatttagttgtgttttctcagagccgccacaagattgaacaaaatgttttctgtttgggcatcctgaggaagttgtattagctgttaatgctctgtgagtttagaaaaagtcttgatagtaaatctagtttttgacacagtgcatgaactaagtagttaaatatttacatattcagaaaggaatagtggaaaaggtatcttggttatgacaaagtcattacaaatgtgactaagtcattacaaatgtgactgagtcattacagtggaccctctgggtgcattgaaaagaatccgttttatatccaggtttcagaggacctggaataataaaaagctttggattttgcattcagtgtagttggattttgggaccttggcctcagtgttatttactgggattggcatacgtgttcacaggcagagtagttgatctcacacaacgggtgatctcacaaaactggtaagtttcttatgctcatgagccctccctttttttttttaatttggtgcctgcaactttcttaacaatgattctacttcctgggctatcacattataatgctcttggcctcttttttgctgctgttttgctattcttaaacttaggccaagtaccaatgttggctgttagaagggattctgttcattcaacatgcaactttagggaatggaagtaagttcatttttaagttgtgttgtcagtaggtgcggtgtctagggtagtgaatcctgtaagttcaaatttatgattaggtgacgagttgacattgagattgtccttttccctgatcaaaaaatgaataaagcctttttaaacaaaa

SEQ ID NO: 418643 - DNA, 2636 bp, Homo sapiens
ggccgggtgttaatcggccgaggtacaacgctccgccgccgctgctgccgcgacccggactgcgcgccagcacccccctgccgacagctccgtcactatggaggatatgaacgagtacagcaatatagaggaattcgcagagggatccaagatcaacgcgagcaagaatcagcaggatgacggtaaaatgtttattggaggcttgagctgggatacaagcaaaaaagatctgacagagtacttgtctcgatttggggaagttgtagactgcacaattaaaacagatccagtcactgggagatcaagaggatttggatttgtgcttttcaaagatgctgctagtgttgataaggttttggaactgaaagaacacaaactggatggcaaattgatagatcccaaaagggccaaagctttaaaagggaaagaacctcccaaaaaggtttttgtgggtggattgagcccggatacttctgaagaacaaattaaagaatattttggagcctttggagagattgaaaatattgaacttcccatggatacaaaaacaaatgaaagaagaggattttgttttatcacatatactgatgaagagccagtaaaaaaattgttagaaagcagataccatcaaattggttctgggaagtgtgaaatcaaagttgcacaacccaaagaggtatataggcagcaacagcaacaacaaaaaggtggaagaggtgctgcagctggtggacgaggtggtacgaggggtcgtggccgaggccaacagagcacttatggcaaggcatctcgagggggtggcaatcaccaaaacaattaccagccatactaaaggagaacattggagaaaacagcgggaacttcattgcaggccgtgtgtcaccctgaccacgtctatctctgggggtcgcacgttgcgggcagagcgcaaggcatacaccagaaaacgctgtcctgtggaggagatgttaaagtaacccatcttgcaggacgacattgaagattggtcttctgttgatctaagatgattattttgtaaaagactttctagtgtacaagacaccattgtgtccaactgtatatagctgccaattagttttctttgtttttactttgtcctttgctatctgtgttatgactcaatgtggatttgtttatacacattttatttgtatcatttcatgttaaacctcaaataaatgcttccttatgtgattgcttttctgcgtcaggtactacatagctctgtaaaaaatgtaatttaaaataagcaataattaaggcacagttgattttgtagagtattggtccatacagagaaactgtggtcctttataaatagccagccagcgtcaccctcttctccaatttgtaggtgtattttatgctcttaaggcttcatcttctccctgtaactgagatttctaccacacctttgaacaatgttctttcccttctggttatctgaagactgtcctgaaaggaagacataagtgttgtgattagtagaagctttctagtagaccatatttcttctggattgtaataaaattgttagtagctccttttactttgttcctgtctctggaaagccatttttgaattgctgattactttggctttaatcagtggtcacctagaaaaagctttgtaatcataacacaatgagtaattcttgataaaagttcagatacaaaaggagcactgtaaaactggtaggagctatggtttaagagcattggaagtagttacaactcaaggattttggtagaaaggtatgagtttggtcgaaaaattaaaatagtggcaaaataagatttagttgtgttttctcagagccgccacaagattgaacaaaatgttttctgtttgggcatcctgaggaagttgtattagctgttaatgctctgtgagtttagaaaaagtcttgatagtaaatctagtttttgacacagtgcatgaactaagtagttaaatatttacatattcagaaaggaatagtggaaaaggtatcttggttatgacaaagtcattacaaatgtgactaagtcattacaaatgtgactgagtcattacagtggaccctctgggtgcattgaaaagaatccgttttatatccaggtttcagaggacctggaataataaaaagctttggattttgcattcagtgtagttggattttgggaccttggcctcagtgttatttactgggattggcatacgtgttcacaggcagagtagttgatctcacacaacgggtgatctcacaaaactggtaagtttcttatgctcatgagccctccctttttttttttaatttggtgcctgcaactttcttaacaatgattctacttcctgggctatcacattataatgctcttggcctcttttttgctgctgttttgctattcttaaacttaggccaagtaccaatgttggctgttagaagggattctgttcattcaacatgcaactttagggaatggaagtaagttcatttttaagttgtgttgtcagtaggtgcggtgtctagggtagtgaatcctgtaagttcaaatttatgattaggtgacgagttgacattgagattgtccttttccctgatcaaaaaatgaataaagcctttttaaacaaaa

SEQ ID NO: 418644 - DNA, 2363 bp, Homo sapiens
ggccgggtgttaatcggccgaggtacaacgctccgccgccgctgctgccgcgacccggactgcgcgccagcacccccctgccgacagctccgtcactatggaggatatgaacgagtacagcaatatagaggaattcgcagagggatccaagatcaacgcgagcaagaatcagcaggatgacggtaaaatgtttattggaggcttgagctgggatacaagcaaaaaagatctgacagagtacttgtctcgatttggggaagttgtagactgcacaattaaaacagatccagtcactgggagatcaagaggatttggatttgtgcttttcaaagatgctgctagtgttgataaggttttggaactgaaagaacacaaactggatggcaaattgatagatcccaaaagggccaaagctttaaaagggaaagaacctcccaaaaaggtttttgtgggtggattgagcccggatacttctgaagaacaaattaaagaatattttggagcctttggagagattgaaaatattgaacttcccatggatacaaaaacaaatgaaagaagaggattttgttttatcacatatactgatgaagagccagtaaaaaaattgttagaaagcagataccatcaaattggttctgggaagagttgcacaaatctaactggtattttgtttttgtttttaggaggagatgttaaagtaacccatcttgcaggacgacattgaagattggtcttctgttgatctaagatgattattttgtaaaagactttctagtgtacaagacaccattgtgtccaactgtatatagctgccaattagttttctttgtttttactttgtcctttgctatctgtgttatgactcaatgtggatttgtttatacacattttatttgtatcatttcatgttaaacctcaaataaatgcttccttatgtgattgcttttctgcgtcaggtactacatagctctgtaaaaaatgtaatttaaaataagcaataattaaggcacagttgattttgtagagtattggtccatacagagaaactgtggtcctttataaatagccagccagcgtcaccctcttctccaatttgtaggtgtattttatgctcttaaggcttcatcttctccctgtaactgagatttctaccacacctttgaacaatgttctttcccttctggttatctgaagactgtcctgaaaggaagacataagtgttgtgattagtagaagctttctagtagaccatatttcttctggattgtaataaaattgttagtagctccttttactttgttcctgtctctggaaagccatttttgaattgctgattactttggctttaatcagtggtcacctagaaaaagctttgtaatcataacacaatgagtaattcttgataaaagttcagatacaaaaggagcactgtaaaactggtaggagctatggtttaagagcattggaagtagttacaactcaaggattttggtagaaaggtatgagtttggtcgaaaaattaaaatagtggcaaaataagatttagttgtgttttctcagagccgccacaagattgaacaaaatgttttctgtttgggcatcctgaggaagttgtattagctgttaatgctctgtgagtttagaaaaagtcttgatagtaaatctagtttttgacacagtgcatgaactaagtagttaaatatttacatattcagaaaggaatagtggaaaaggtatcttggttatgacaaagtcattacaaatgtgactaagtcattacaaatgtgactgagtcattacagtggaccctctgggtgcattgaaaagaatccgttttatatccaggtttcagaggacctggaataataaaaagctttggattttgcattcagtgtagttggattttgggaccttggcctcagtgttatttactgggattggcatacgtgttcacaggcagagtagttgatctcacacaacgggtgatctcacaaaactggtaagtttcttatgctcatgagccctccctttttttttttaatttggtgcctgcaactttcttaacaatgattctacttcctgggctatcacattataatgctcttggcctcttttttgctgctgttttgctattcttaaacttaggccaagtaccaatgttggctgttagaagggattctgttcattcaacatgcaactttagggaatggaagtaagttcatttttaagttgtgttgtcagtaggtgcggtgtctagggtagtgaatcctgtaagttcaaatttatgattaggtgacgagttgacattgagattgtccttttccctgatcaaaaaatgaataaagcctttttaaacaaaa

SEQ ID NO: 418645 - DNA, 1023 bp, Homo sapiens
ggccgggtgttaatcggccgaggtacaacgctccgccgccgctgctgccgcgacccggactgcgcgccagcacccccctgccgacagctccgtcactatggaggatatgaacgagtacagcaatatagaggaattcgcagagggatccaagatcaacgcgagcaagaatcagcaggatgacggtaaaatgtttattggaggcttgagctgggatacaagcaaaaaagatctgacagagtacttgtctcgatttggggaagttgtagactgcacaattaaaacagatccagtcactgggagatcaagaggatttggatttgtgcttttcaaagatgctgctagtgttgataaggttttggaactgaaagaacacaaactggatggcaaattgatagatcccaaaagggccaaagctttaaaagggaaagaacctcccaaaaaggtttttgtgggtggattgagcccggatacttctgaagaacaaattaaagaatattttggagcctttggagagattgaaaatattgaacttcccatggatacaaaaacaaatgaaagaagaggattttgttttatcacatatactgatgaagagccagtaaaaaaattgttagaaagcagataccatcaaattggttctgggaagtgtgaaatcaaagttgcacaacccaaagaggtatataggcagcaacagcaacaacaaaaaggtggaagaggtgctgcagctggtggacgaggtggtacgaggggtcgtggccgaggtcagggccaaaactggaaccaaggatttaataactattatgatcaaggatatggaaattacaatagtgcctatggtggtgatcaaaactatagtggctatggcggatatgattatactgggtataactatgggaactatggatatggacagggatatgcagactacagtggccaacagagcacttatggcaaggcatctcgagggggtggcaatcaccaaaacaattaccagcctgggtgacagagcgagactccctctca

SEQ ID NO: 418646 - DNA, 1294 bp, Homo sapiens
  misc_feature (667)..(667): n is a, c, g, or t
  misc_feature (702)..(702): n is a, c, g, or t
  misc_feature (706)..(706): n is a, c, g, or t
  misc_feature (708)..(708): n is a, c, g, or t
  misc_feature (736)..(736): n is a, c, g, or t
  misc_feature (757)..(757): n is a, c, g, or t
  misc_feature (771)..(771): n is a, c, g, or t
  misc_feature (777)..(777): n is a, c, g, or t
  misc_feature (779)..(780): n is a, c, g, or t
  misc_feature (789)..(789): n is a, c, g, or t
  misc_feature (791)..(791): n is a, c, g, or t
  misc_feature (796)..(796): n is a, c, g, or t
  misc_feature (807)..(807): n is a, c, g, or t
ggccgggtgttaatcggccgaggtacaacgctccgccgccgctgctgccgcgacccggactgcgcgccagcacccccctgccgacagctccgtcactatggaggatatgaacgagtacagcaatatagaggaattcgcagagggatccaagatcaacgcgagcaagaatcagcaggatgacggtaaaatgtttattggaggcttgagctgggatacaagcaaaaaagatctgacagagtacttgtctcgatttggggaagttgtagactgcacaattaaaacagatccagtcactgggagatcaagaggatttggatttgtgcttttcaaagatgctgctagtgttgataaggttttggaactgaaagaacacaaactggatggcaaattgatagatcccaaaagggccaaagctttaaaagggaaagaacctcccaaaaaggtttttgtgggtggattgagcccggatacttctgaagaacaaattaaagaatattttggagcctttggagagattgaaaatattgaacttcccatggatacaaaaacaaatgaaagaagaggattttgttttatcacatatactgatgaagagccagtaaaaaaattgttagaaagcagataccatcaaattggttctgggaagaccgccccgggaaacggaaancaaagcgcacaacccaaaaaaccaaaaaaccaacnacancnacaacaaaaaagccgaacaccccccccncccggcgcaccaaccggcacnaggggccccgcccnacgccncnnccaagaccngngccanggaaggaaggnccaagaggaacaaggatatggaaattacaatagtgcctatggtggtgatcaaaactatagtggctatggcggatatgattatactgggtataactatgggaactatggatatggacagggatatgcagactacagtggccaacagagcacttatggcaaggcatctcgagggggtggcaatcaccaaaacaattaccagccatactaaaggagaacattggagaaaacaggaggagatgttaaagtaacccatcttgcaggacgacattgaagattggtcttctgttgatctaagatgattattttgtaaaagactttctagtgtacaagacaccattgtgtccaactgtatatagctgccaattagttttctttgtttttactttgtcctttgctatctgtgttatgactcaatgtggatttgtttatacacattttatttgtatcatttcatgttaaacctcaaataaatgcttccttatgtgat

SEQ ID NO: 418647 - DNA, 863 bp, Homo sapiens
  misc_feature (765)..(765): n is a, c, g, or t
  misc_feature (773)..(773): n is a, c, g, or t
  misc_feature (780)..(780): n is a, c, g, or t
  misc_feature (794)..(794): n is a, c, g, or t
  misc_feature (806)..(806): n is a, c, g, or t
  misc_feature (811)..(811): n is a, c, g, or t
  misc_feature (815)..(815): n is a, c, g, or t
  misc_feature (850)..(850): n is a, c, g, or t
ggccgggtgttaatcggccgaggtacaacgctccgccgccgctgctgccgcgacccggactgcgcgccagcacccccctgccgacagctccgtcactatggaggatatgaacgagtacagcaatatagaggaattcgcagagggatccaagatcaacgcgagcaagaatcagcaggatgacggtaaaatgtttattggaggcttgagctgggatacaagcaaaaaagatctgacagagtacttgtctcgatttggggaagttgtagactgcacaattaaaacagatccagtcactgggagatcaagaggatttggatttgtgcttttcaaagatgctgctagtgttgataaggttttggaactgaaagaacacaaactggatggcaaattgatagatcccaaaagggccaaagctttaaaagggaaagaacctcccaaaaaggtttttgtgggtggattgagcccggatacttctgaagaacaaattaaagaatattttggagcctttggagagattgaaaatattgaacttcccatggatacaaaaacaaatgaaagaagaggattttgttttatcacatatactgatgaagagccagtaaaaaaattgttagaaagcagataccatcaaattggttctgggaagtgtgaaatcaaagttgcacaacccaaagaggtatataggcagcaacagcaacaacaaaaaggtggaagaggtgctgcagctggtggacgaggtggtacgaggggtcgtggccgagcaanggggtccntgggccnaaggtcaagggccnaaaactgggaanccaanggantttaaataaacctaattatggatccaaagggattnttgggaaaaattt

SEQ ID NO: 418648 - DNA, 774 bp, Homo sapiens
  misc_feature (649)..(649): n is a, c, g, or t
  misc_feature (655)..(656): n is a, c, g, or t
  misc_feature (662)..(662): n is a, c, g, or t
  misc_feature (670)..(670): n is a, c, g, or t
  misc_feature (674)..(675): n is a, c, g, or t
  misc_feature (678)..(678): n is a, c, g, or t
  misc_feature (681)..(681): n is a, c, g, or t
  misc_feature (684)..(684): n is a, c, g, or t
  misc_feature (691)..(691): n is a, c, g, or t
  misc_feature (696)..(696): n is a, c, g, or t
  misc_feature (713)..(713): n is a, c, g, or t
  misc_feature (720)..(720): n is a, c, g, or t
  misc_feature (722)..(722): n is a, c, g, or t
  misc_feature (730)..(730): n is a, c, g, or t
ggccgggtgttaatcggccgaggtacaacgctccgccgccgctgctgccgcgacccggactgcgcgccagcacccccctgccgacagctccgtcactatggaggatatgaacgagtacagcaatatagaggaattcgcagagggatccaagatcaacgcgagcaagaatcagcaggatgacggtaaaatgtttattggaggcttgagctgggatacaagcaaaaaagatctgacagagtacttgtctcgatttggggaagttgtagactgcacaattaaaacagatccagtcactgggagatcaagaggatttggatttgtgcttttcaaagatgctgctagtgttgataaggttttggaactgaaagaacacaaactggatggcaaattgatagatcccaaaagggccaaagctttaaaagggaaagaacctcccaaaaaggtttttgtgggtggattgagcccggatacttctgaagaacaaattaaagaatattttggagcctttggagagattgaaaatattgaacttcccatggatacaaaaacaaatgaaagaagaggattttgttttatcacatatactgatgaagagccagtaaaaaaattgttagaaagcagataccatcaaattggttctgggaagganatcaanntgcacnccaaaggntatnngcnganagnacacaanggganagtgctgcgggggcagngccaggncnggcggtcnggcaagaccggtaacttgcaggagaacaagcatggggcaaaggc

SEQ ID NO: 418649 - DNA, 1562 bp, Homo sapiens
tggagctcaaggatccttaattaaattaatcccccccctacaacgctccgccgccgctgctgccgcgacccggactgcgcgccagcacccccctgccgacagctccgtcactatggaggatatgaacgagtacagcaatatagaggaattcgcagagggatccaagatcaacgcgagcaagaatcagcaggatgacggtaaaatgtttattggaggcttgagctgggatacaagcaaaaaagatctgacagagtacttgtctcgatttggggaagttgtagactgcacaattaaaacagatccagtcactgggagatcaagaggatttggatttgtgcttttcaaagatgctgctagtgttgataagatttactgggattggcatacgtgttcacaggcagagtagttgatctcacacaacgggtgatctcacaaaactggtaagtttcttatgctcatgagccctccctttttttttttaatttggtgcctgcaactttcttaacaatgattctacttcctgggctatcacattataatgctcttggcctcttttttgctgctgttttgctattcttaaacttaggccaagtaccaatgttggctgttagaagggattctgttcattcaacatgcaactttagggaatggaagtaagttcatttttaagttgtgttgtcagtaggtgcggtgtctagggtagtgaatcctgtaagttcaaatttatgattaggtgacgagttgacattgagattgtccttttccctgatcaaaaaatgaataaagcctttttaaacaaaaaaaaaaaaaaaacaaaaaaaaaaaaaacattggggggggccggagaatgaggtggaacgcgtggcacgagaagcagagcaaaccgaccaggacagaaggtacaaagaggggagccggcggagcgcgcgaatggagcaagacaaacacacgaccagaccggacaaagaaacagacaacaagcgaggagaaagaaaggaggcaccagagcgacaccacgaggaagagaagaaacaaaaacaaagagcggagaaaggagcagaagtaaaaaccaaaacacgacggcaacgaaccaacagtaggagaggagggaagcagacaagacaaacgacaagaaaaaacgaacaagacacaaagacacagacaaaagcaagacaaccaagcggaaaggagaagacgagaagagacaaagaagccaaagaaaaaccaatcatcacgaataaggggaacaacgaaggacagaaagagaacaggggggaaggacacgagagcggagcagagcaggtaaaagtgagtgagcaacagaggcaacgcacagcagaggagaacagaagagagagtgaggaagaaggggcgagaagagcgagaaacggaggtgaaggaggcagcacagggcgcgacgcggaacagaggagaaaaggagcggcaccgagcagaggagagggaggaagagagaggcgaggagggacaggagagagagcacgagaggcaagagggcgacagaggagcgaagaggacgaaagaaggagcagagagtagactcg

SEQ ID NO: 418650 - DNA, 487 bp, Homo sapiens
gagtatctctccagttattcccagattcactagtgatccttaaagtctctattcagggagaggaagacactttccatctcagagatagactcgtgttaccttgatggatattggatttgtctaagtctcttctaccattttttgaaactacaatactggaacatccaggaactggagttattctacgctaatggattggaaagaatgttgggaaaggacatcttaaatcttttctaactatgccctaaactgcagaactcaaaggaaatatagtgccattgttagtagtcattctagatgaattgggagtatctctccagttattcccagattcactagtgatccttaaagtctctattcagggagaggaagacactttccatctcagagatagactcgtgttaccttgatggatattggatttgtctaagtctcttctagaaaaaataaattctagattattatttatatgtgtcatttcaaagct

SEQ ID NO: 418651 - DNA, 939 bp, Homo sapiens
ggaaaatgggctcctgcgcgcgcgcactcgccgagtcttccggcgggtccgcccagttccgttcctgctccgcttgaggagaagcgccaagtgcgcatggggacgctatagcaattcgtttgctgtccttcctctccttcgaagatgacaaggcctaccatcgtttcttcctgcctttgggccgtcaggcagttggttgggacccgctccaaccctcggttcttcctgcaatacagtggatacaatttgtcatggctactctgagataagaccacttttttatctgagcttctgtgacctgctcctgggactttgctggctcacggagacacttctctatggagcttcagtagcaaataaggacatcatctgctataacctacaagcagttggacagatattctacatttcctcatttctctacaccgtcaattacatctggtatttgtacacagagctgaggatgaaacacacccagagtggacagagcacatctccactggtgatagattatacttgtcgagtttgtcaaatggcctttgttttctcaagcctgatacctctgctattgatgacacctgtattctgtctgggaaatactagtgaatgtttccaaaacttcagtcagagccacaagtgtatcttgatgcactcaccaccatcagccatggctgaacttccaccttctgccaacacatctgtctgtagcacactttatttttatggtatcgccattttcctgggcagctttgtactcagcctccttaccattatggtcttacttatccgagcccagacattgtataagaagtttgtgaagtcaactggctttctggggagtgaacagtgggcagtgattcacattgtggaccaacgggtgcgcttctacccagtggccttcttttgctgctggggcccagggtaggtacttaacaagaa

SEQ ID NO: 418652 - DNA, 447 bp, Homo sapiens
tcactgatggattttattatgcctattgtttccattctgataatgctcagacgtgtgtggaggaacctgatacttcagacagtcagggctgacaagaaggtttacactttgtgtattcacagctgtcattctaatgatcataaagctgactaagccacaggacaccaagcttcacatggccctttatgttctccaggtaacaccttcaacattcagtatctctgttcttacacccgcttatcctattttcttatactacctttactcggtaaggatgattttttccctccgggtacttctacattgcaaaagagaaaatgtattatttacactcagttatgaagaatgtgaaaattttctcaaagtcgaggtagataatgttgtaaaagtacctccatgcattccagagcgtatatatctctggtcaacttcattttactgatgtgt

SEQ ID NO: 418653 - DNA, 1806 bp, Homo sapiens
ggaaaatgggctcctgcgcgcgcgcactcgccgagtcttccggcgggtccgcccagttccgttcctgctccgcttgaggagaagcgccaagtgcgcatggggacgctatagcaattcgtttgctgtccttcctctccttcgaagatgacaaggcctaccatcgtttcttcctgcctttgggccgtcaggcagttggttgggacccgctccaaccctcgacagagcaggattcagtataggaggagcccagctgggataggggtggagccacctgttcactgcttcaggattcagaacctgactaggaaggatcggctgctcaagggtagctgggactgaagtccctatgacctttccactagacgctagcattctggaggacagttgggacttgttttctctcccaggtttcttttttcttaaactcctggcctcaagtgatcgtcttagcctcggcctcttcaaagtgtcgggattacaggttcttcctgcaatacagtggatacaatttgtcatggctactctgagataagaccacttttttatctgagcttctgtgacctgctcctgggactttgctggctcacggagacacttctctatggagcttcagtagcaaataaggacatcatctgctataacctacaagcagttggacagatattctacatttcctcatttctctacaccgtcaattacatctggtatttgtacacagagctgaggatgaaacacacccagagtggacagagcacatctccactggtgatagattatacttgtcgagtttgtcaaatggcctttgttttctcaagcctgatacctctgctattgatgacacctgtattctgtctgggaaatactagtgaatgtttccaaaacttcagtcagagccacaagtgtatcttgatgcactcaccaccatcagccatggctgaacttccaccttctgccaacacatctgtctgtagcacactttatttttatggtatcgccattttcctgggcagctttgtactcagcctccttaccattatggtcttacttatccgagcccagacattgtataagaagtttgtgaagtcaactggctttctggggagtgaacagtgggcagtgattcacattgtggaccaacgggtgcgcttctacccagtggccttcttttgctgctggggcccagctgtcattctaatgatcataaagctgactaagccacaggacaccaagcttcacatggccctttatgttctccaggctctaacggcaacatctcagggtctactcaactgtggagtatatggctggacgcagcacaaattccaccaactaaagcaggaggctcggcgtgatgcagatacccagacaccattattatgctcacagaagagattctatagcaggggcttaaattcactggaatccaccctgacttttcctgccagtacttctaccattttttgaaactacaatactggaacatccaggaactggagttattctacgctaatggattggaaagaatgttgggaaaggacatcttaaatcttttctaactatgccctaaactgcagaactcaaaggaaatatagtgccattgttagtagtcattctagatgaattgggagtatctctccagttattcccagattcactagtgatccttaaagtctctattcagggagaggaagacactttccatctcagagatagactcgtgttaccttgatggatattggatttgtctaagtctcttctagaaaaaataaattctagattattatttatatgtgtcatttcaaagct

SEQ ID NO: 418654 - DNA, 1543 bp, Homo sapiens
ggaaaatgggctcctgcgcgcgcgcactcgccgagtcttccggcgggtccgcccagttccgttcctgctccgcttgaggagaagcgccaagtgcgcatggggacgctatagcaattcgtttgctgtccttcctctccttcgaagatgacaaggcctaccatcgtttcttcctgcctttgggccgtcaggcagttggttgggacccgctccaaccctcggttcttcctgcaatacagtggatacaatttgtcatggctactctgagataagaccacttttttatctgagcttctgtgacctgctcctgggactttgctggctcacggagacacttctctatggagcttcagtagcaaataaggacatcatctgctataacctacaagcagttggacagatattctacatttcctcatttctctacaccgtcaattacatctggtatttgtacacagagctgaggatgaaacacacccagagtggacagagcacatctccactggtgatagattatacttgtcgagtttgtcaaatggcctttgttttctcaagcctgatacctctgctattgatgacacctgtattctgtctgggaaatactagtgaatgtttccaaaacttcagtcagagccacaagtgtatcttgatgcactcaccaccatcagccatggctgaacttccaccttctgccaacacatctgtctgtagcacactttatttttatggtatcgccattttcctgggcagctttgtactcagcctccttaccattatggtcttacttatccgagcccagacattgtataagaagtttgtgaagtcaactggctttctggggagtgaacagtgggcagtgattcacattgtggaccaacgggtgcgcttctacccagtggccttcttttgctgctggggcccagctgtcattctaatgatcataaagctgactaagccacaggacaccaagcttcacatggccctttatgttctccaggctctaacggcaacatctcagggtctactcaactgtggagtatatggctggacgcagcacaaattccaccaactaaagcaggaggctcggcgtgatgcagatacccagacaccattattatgctcacagaagagattctatagcaggggcttaaattcactggaatccaccctgacttttcctgccagtacttctaccattttttgaaactacaatactggaacatccaggaactggagttattctacgctaatggattggaaagaatgttgggaaaggacatcttaaatcttttctaactatgccctaaactgcagaactcaaaggaaatatagtgccattgttagtagtcattctagatgaattgggagtatctctccagttattcccagattcactagtgatccttaaagtctctattcagggagaggaagacactttccatctcagagatagactcgtgttaccttgatggatattggatttgtctaagtctcttctagaaaaaataaattctagattattatttatatgtgtcatttcaaagct

SEQ ID NO: 418655 - DNA, 1279 bp, Homo sapiens
tctagaggatcactcacgccatgtcacaaggtgaagtcaactggctttctggggagtgaacagtgggcagtgattcacattgtggaccaacgggtgcgcttctacccagtgaccttcttttgctagctggggcatattctacatttcctcatttctctacaccgtcaattacatctggtatttgtacacagagctgaggatgaaacacacccagagtggacagagcacatctccactggtgatagattatacttgtcgagtttgtcaaatggcctttgttttctcaagcctgatacctctgctattgatgacacctgtattctgtctgggaaatactagtgaatgtttccaaaacttcagtcagagccacaagtgtatcttgatgcactcaccaccatcagccatggctgaacttccaccttctgccaacacatctgtctgtagcacactttatttttatggtatcgccattttcctgggcagctttgtactcagcctccttaccattatggtcttacttatccgagcccagacattgtataagaagtttgtgaagtcaactggctttctggggagtgaacagtgggcagtgattcacattgtggaccaacgggtgcgcttctacccagtggccttcttttgctgctggggcccagctgtcattctaatgatcataaagctgactaagccacaggacaccaagcttcacatggccctttatgttctccaggctctaacggcaacatctcagggtctactcaactgtggagtatatggctggacgcagcacaaattccaccaactaaagcaggaggctcggcgtgatgcagatacccagacaccattattatgctcacagaagagattctatagcaggggcttaaattcactggaatccaccctgacttttcctgccagtacttctaccattttttgaaactacaatactggaacatccaggaactggagttattctacgctaatggattggaaagaatgttgggaaaggacatcttaaatcttttctaactatgccctaaactgcagaactcaaaggaaatatagtgccattgttagtagtcattctagatgaattgggagtatctctccagttattcccagattcactagtgatccttaaagtctctattcagggagaggaagacactttccatctcagagatagactcgtgttaccttgatggatattggatttgtctaagtctcttctagaaaaaataaattctagattattatttatatgtgtcatttcaaagct

SEQ ID NO: 418656 - DNA, 1468 bp, Homo sapiens
ggaaaatgggctcctgcgcgcgcgcactcgccgagtcttccggcgggtccgcccagttccgttcctgctccgcttgaggagaagcgccaagtgcgcatggggacgctatagcaattcgtttgctgtccttcctctccttcgaagatgacaaggcctaccatcgtttcttcctgcctttgggccgtcaggcagttggttgggacccgctccaaccctcggttcttcctgcaatacagtggatacaatttgtcatggctactctgagtgttataggttcaagttcacttattgcctatgctgtattccataatatacagaaatctccagagataagaccacttttttatctgagcttctgtgacctgctcctgggactttgctggctcacggagacacttctctatggagcttcagtagcaaataaggacatcatctgctataacctacaagcagttggacagatattctacatttcctcatttctctacaccgtcaattacatctggtatttgtacacagagctgaggatgaaacacacccagagtggacagagcacatctccactggtgatagattatacttgtcgagtttgtcaaatggcctttgttttctcaagcctgatacctctgctattgatgacacctgtattctgtctgggaaatactagtgaatgtttccaaaacttcagtcagagccacaagtcttacttatccgagcccagacattgtataagaagtttgtgaagtcaactggctttctggggagtgaacagtgggcagtgattcacattgtggaccaacgggtgcgcttctacccagtggccttcttttgctgctggggcccagctgtcattctaatgatcataaagctgactaagccacaggacaccaagcttcacatggccctttatgttctccaggctctaacggcaacatctcagggtctactcaactgtggagtatatggctggacgcagcacaaattccaccaactaaagcaggaggctcggcgtgatgcagatacccagacaccattattatgctcacagaagagattctatagcaggggcttaaattcactggaatccaccctgacttttcctgccagtacttctaccattttttgaaactacaatactggaacatccaggaactggagttattctacgctaatggattggaaagaatgttgggaaaggacatcttaaatcttttctaactatgccctaaactgcagaactcaaaggaaatatagtgccattgttagtagtcattctagatgaattgggagtatctctccagttattcccagattcactagtgatccttaaagtctctattcagggagaggaagacactttccatctcagagatagactcgtgttaccttgatggatattggatttgtctaagtctcttctagaaaaaataaattctagattattatttatatgtgtcatttcaaagct

SEQ ID NO: 418657 - DNA, 1565 bp, Homo sapiens
ggaaaatgggctcctgcgcgcgcgcactcgccgagtcttccggcgggtccgcccagttccgttcctgctccgcttgaggagaagcgccaagtgcgcatggggacgctatagcaattcgtttgctgtccttcctctccttcgaagatgacaaggcctaccatcgtttcttcctgcctttgggccgtcaggcagttggttgggacccgctccaaccctcggttcttcctgcaatacagtggatacaatttgtcatggctactctgagataagaccacttttttatctgagcttctgtgacctgctcctgggactttgctggctcacggagacacttctctatggagcttcagtagcaaataaggacatcatctgctataacctacaagcagttggacagatattctacatttcctcatttctctacaccgtcaattacatctggtatttgtacacagagctgaggatgaaacacacccagagtggacagagcacatctccactggtgatagattatacttgtcgagtttgtcaaatggcctttgttttctcaagcctgatacctctgctattgatgacacctgtattctgtctgggaaatactagtgaatgtttccaaaacttcagtcagagccacaagtgtatcttgatgcactcaccaccatcagccatggctgaacttccaccttctgccaacacatctgtctgtagcacactttatttttatggtcttacttatccgagcccagacattgtataagaagtttgtgaagtcaactggctttctggggagtgaacagtgggcagtgattcacattgtggaccaacgggtgcgcttctacccagtggccttcttttgctgctggggcccagacgtgtgtggaggaacctgatacttcagacagtcagggctgacaagaaggtttacactttgtgtattcacagctgtcattctaatgatcataaagctgactaagccacaggacaccaagcttcacatggccctttatgttctccaggctctaacggcaacatctcagggtctactcaactgtggagtatatggctggacgcagcacaaattccaccaactaaagcaggaggctcggcgtgatgcagatacccagacaccattattatgctcacagaagagattctatagcaggggcttaaattcactggaatccaccctgacttttcctgccagtacttctaccattttttgaaactacaatactggaacatccaggaactggagttattctacgctaatggattggaaagaatgttgggaaaggacatcttaaatcttttctaactatgccctaaactgcagaactcaaaggaaatatagtgccattgttagtagtcattctagatgaattgggagtatctctccagttattcccagattcactagtgatccttaaagtctctattcagggagaggaagacactttccatctcagagatagactcgtgttaccttgatggatattggatttgtctaagtctcttctagaaaaaataaattctagattattatttatatgtgtcatttcaaagct

SEQ ID NO: 418658 - DNA, 885 bp, Homo sapiens
tggatttaagaagatttttgggctatctgactattccgatgagacagttttctcaagggtaccctggaaaatgaggcaataagggggggcactgaagctatttcattgtccctatgtatatactaagaagtatgaccaactctcagtcatccgtaacagtgtagtgtagacagtgagttcaggatgaactagaaaaatataaaaaactgatgtcagatcttcatgtttgagatagagaaaatataacaatgctttatgaataaggggagtgagaattattccctggatccctgaaaacctgaagcatgggctgcatcaccccttcatctcctccaggctctaacggcaacatctcagggtctactcaactgtggagtatatggctggacgcagcacaaattccaccaactaaagcaggaggctcggcgtgatgcagatacccagacaccattattatgctcacagaagagattctatagcaggggcttaaattcactggaatccaccctgacttttcctgccagtacttctaccattttttgaaactacaatactggaacatccaggaactggagttattctacgctaatggattggaaagaatgttgggaaaggacatcttaaatcttttctaactatgccctaaactgcagaactcaaaggaaatatagtgccattgttagtagtcattctagatgaattgggagtatctctccagttattcccagattcactagtgatccttaaagtctctattcagggagaggaagacactttccatctcagagatagactcgtgttaccttgatggatattggatttgtctaagtctcttctagaaaaaataaattctagattattatttatatgtgtcatttcaaagct

SEQ ID NO: 418659 - DNA, 1033 bp, Homo sapiens
ggaaaatgggctcctgcgcgcgcgcactcgccgagtcttccggcgggtccgcccagttccgttcctgctccgcttgaggagaagcgccaagtgcgcatggggacgctatagcaattcgtttgctgtccttcctctccttcgaagatgacaaggcctaccatcgtttcttcctgcctttgggccgtcaggcagttggttgggacccgctccaaccctcggttcttcctgcaatacagtggatacaatttgtcatggctactctgagtgttataggttcaagttcacttattgcctatgctgtattccataatatacagaaatctccagagataagaccacttttttatctgagcttctgtgacctgctcctgggactttgctggctcacggagacacttctctatggagcttcagtagcaaataaggacatcatctgctataacctacaagcagttggacagatattctacatttcctcatttctctacaccgtcaattacatctggtatttgtacacagagctgaggatgaaacacacccagagtggacagagcacatctccactggtgatagattatacttgtcgagtttgtcaaatggcctttgttttctcaagcctgatacctctgctattgatgacacctgtattctgtctgggaaatactagtgaatgtttccaaaacttcagtcagagccacaagtgtatcttgatgcactcaccaccatcagccatggctgaacttccaccttctgccaacacatctgtctgtagcacactttatttttatggtatcgccattttcctgggcagctttgtactcagcctccttaccattatggggcggtgtctcggtctgttgcccgggctggagtgcagtggcgcatctcggctcactgcaacctctgcctcccgggttcgggcggttctcctgcctcggcctcctgagtggctggaattggaggcgcatgccgccacgactggctaatttttgtgttttttgtgacatggcgtgagggatcctctagaacagcc

SEQ ID NO: 418660 - DNA, 1629 bp, Homo sapiens
  misc_feature (1156)..(1156): n is a, c, g, or t
  misc_feature (1165)..(1165): n is a, c, g, or t
  misc_feature (1169)..(1170): n is a, c, g, or t
  misc_feature (1177)..(1177): n is a, c, g, or t
  misc_feature (1180)..(1180): n is a, c, g, or t
  misc_feature (1182)..(1182): n is a, c, g, or t
  misc_feature (1200)..(1200): n is a, c, g, or t
  misc_feature (1209)..(1209): n is a, c, g, or t
  misc_feature (1229)..(1229): n is a, c, g, or t
  misc_feature (1243)..(1243): n is a, c, g, or t
  misc_feature (1270)..(1270): n is a, c, g, or t
  misc_feature (1281)..(1283): n is a, c, g, or t
  misc_feature (1285)..(1285): n is a, c, g, or t
ggaaaatgggctcctgcgcgcgcgcactcgccgagtcttccggcgggtccgcccagttccgttcctgctccgcttgaggagaagcgccaagtgcgcatggggacgctatagcaattcgtttgctgtccttcctctccttcgaagatgacaaggcctaccatcgtttcttcctgcctttgggccgtcaggcagttggttgggacccgctccaaccctcggttcttcctgcaatacagtggatacaatttgtcatggctactctgagtgttataggttcaagttcacttattgcctatgctgtattccataatatacagaaatctccagagataagaccacttttttatctgagcttctgtgacctgctcctgggactttgctggctcacggagacacttctctatggagcttcagtagcaaataaggacatcatctgctataacctacaagcagttggacagatattctacatttcctcatttctctacaccgtcaattacatctggtatttgtacacagagctgaggatgaaacacacccagagtggacagagcacatctccactggtgatagattatacttgtcgagtttgtcaaatggcctttgttttctcaagcctgatacctctgctattgatgacacctgtattctgtctgggaaatactagtgaatgtttccaaaacttcagtcagagccacaagtgtatcttgatgcactcaccaccatcagccatggctgaacttccaccttctgccaacacatctgtctgtagcacactttatttttatggtcttacttatccgagcccagacattgtataagaagtttgtgaagtcaactggctttctggggagtgaacagtgggcagtgattcacattgtggaccaacgggtgcgcttctacccagtggccttcttttgctgctggggcccagacgtgtgtggaggaacctgatacttcagacagtcagggctgacaagaaggtttacactttgtgtattcacagctgtcattctaatgatcataaagctgactaagccacaggacaccaagcttcacatggccctttatgttctccaggctctaacggcaacatctcagggtctactcaactgtggagtatatggctggacgcagcacaaattccccccccccnccccggccncccnncctgacnccncnccccccccccccctcttncgccccccnccccccccccctcccaggcncccccccccccccnaccccccccccccccccccccccagcncctctcccccnnncngacaccccaatactggaacatccaggaactggagttattctacgctaatggattggaaagaatgttgggaaaggacatcttaaatcttttctaactatgccctaaactgcagaactcaaaggaaatatagtgccattgttagtagtcattctagatgaattgggagtatctctccagttattcccagattcactagtgatccttaaagtctctattcagggagaggaagacactttccatctcagagatagactcgtgttaccttgatggatattggatttgtctaagtctcttctagaaaaaataaattctagattattatttatatgtgtcatttcaaagct

SEQ ID NO: 418661 - DNA, 1352 bp, Homo sapiens
ggaaaatgggctcctgcgcgcgcgcactcgccgagtcttccggcgggtccgcccagttccgttcctgctccgcttgaggagaagcgccaagtgcgcatggggacgctatagcaattcgtttgctgtccttcctctccttcgaagatgacaaggcctaccatcgtttcttcctgcctttgggccgtcaggcagttggttgggacccgctccaaccctcggttcttcctgcaatacagtggatacaatttgtcatggctactctgagtgttataggttcaagttcacttattgcctatgctgtattccataatatacagaaatctccagagataagaccacttttttatctgagcttctgtgacctgctcctgggactttgctggctcacggagacacttctctatggagcttcagtagcaaataaggacatcatctgctataacctacaagcagttggacagatattctacatttcctcatttctctacaccgtcaattacatctggtatttgtacacagagctgaggatgaaacacacccagagtggacagagcacatctccactggtgatagattatacttgtcgagtttgtcaaatggcctttgttttctcaagcctgatacctctgctattgatgacacctgtattctgtctgggaaatactagtgaatgtttccaaaacttcagtcagagccacaagtgtatcttgatgcactcaccaccatcagccatggctgaacttccaccttctgccaacacatctgtctgtagcacactttatttttatggtatcgccattttcctgggcagctttgtactcagcctccttaccattatggtatggtaccaccctaccttcctttgtggagagatgaggaaatgaaggggatgggccagtattcccaggacctgggaaagatggggcagagaggcacttcttgtggtcctagaactaagaaagtagctaggagatcttgacaatataattactgcctcagacttttgcacttccccaaatcaaatgataagagagagaaaagagcttgtatttattaggtgaaaattatgctcactctacaactagtataggcttcatcaatcccctatggccagaaaactcatatgtgccaaatatatcctttacatagttaggatgacactctgaaacatagaacatatgctttgattactttccatattaactaatttccttttattctaaacaaaaaaggggccgcaaattcccaggccagtcgtcccgtctgaaaggcccaagggggatataaaagggcggtaacggggaaagggtttgcgcacttgtggtgacccaaggaatgtgctctcgcttagc

SEQ ID NO: 418662 - DNA, 256 bp, Homo sapiens
ctgggaaatactagtgaatgtttccaaaacttcagtcagagccacaagtaagtaagaactaaatgtataattttcatggcagactacacctatttgtttctataaatagagctggaaaaagactttccacataattctgaccaaagtgctaatattagaaatgggctaaggaacaagatgtagtaaaggctgaaaatatataagtaaaagtgtaacacaaaatgactacaagataatgtgtctgtgggggagagac

SEQ ID NO: 418663 - DNA, 1502 bp, Homo sapiens
ggaaaatgggctcctgcgcgcgcgcactcgccgagtcttccggcgggtccgcccagttccgttcctgctccgcttgaggagaagcgccaagtgcgcatggggacgctatagcaattcgtttgctgtccttcctctccttcgaagatgacaaggcctaccatcgtttcttcctgcctttgggccgtcaggcagttggttgggacccgctccaaccctcggttcttcctgcaatacagtggatacaatttgtcatggctactctgagtgttataggttcaagttcacttattgcctatgctgtattccataatatacagaaatctccagagataagaccacttttttatctgagcttctgtgacctgctcctgggactttgctggctcacggagacacttctctatggagcttcagtagcaaataaggacatcatctgctataacctacaagcagttggacaggtgatagattatacttgtcgagtttgtcaaatggcctttgttttctcaagcctgatacctctgctattgatgacacctgtattctgtctgggaaatactagtgaatgtttccaaaacttcagtcagagccacaagtgtatcttgatgcactcaccaccatcagccatggctgaacttccaccttctgccaacacatctgtctgtagcacactttatttttatggtatcgccattttcctgggcagctttgtactcagcctccttaccattatggtcttacttatccgagcccagacattgtataagaagtttgtgaagtcaactggctttctggggagtgaacagtgggcagtgattcacattgtggaccaacgggtgcgcttctacccagtggccttcttttgctgctggggcccagctgtcattctaatgatcataaagctgactaagccacaggacaccaagcttcacatggccctttatgttctccaggctctaacggcaacatctcagggtctactcaactgtggagtatatggctggacgcagcacaaattccaccaactaaagcaggaggctcggcgtgatgcagatacccagacaccattattatgctcacagaagagattctatagcaggggcttaaattcactggaatccaccctgacttttcctgccagtacttctaccattttttgaaactacaatactggaacatccaggaactggagttattctacgctaatggattggaaagaatgttgggaaaggacatcttaaatcttttctaactatgccctaaactgcagaactcaaaggaaatatagtgccattgttagtagtcattctagatgaattgggagtatctctccagttattcccagattcactagtgatccttaaagtctctattcagggagaggaagacactttccatctcagagatagactcgtgttaccttgatggatattggatttgtctaagtctcttctagaaaaaataaattctagattattatttatatgtgtcatttcaaagct

SEQ ID NO: 418664 - DNA, 1607 bp, Homo sapiens
ggaaaatgggctcctgcgcgcgcgcactcgccgagtcttccggcgggtccgcccagttccgttcctgctccgcttgaggagaagcgccaagtgcgcatggggacgctatagcaattcgtttgctgtccttcctctccttcgaagatgacaaggcctaccatcgtttcttcctgcctttgggccgtcaggcagttggttgggacccgctccaaccctcggttcttcctgcaatacagtggatacaatttgtcatggctactctgagtgttataggttcaagttcacttattgcctatgctgtattccataatatacagaaatctccagagataagaccacttttttatctgagcttctgtgacctgctcctgggactttgctggctcacggagacacttctctatggagcttcagtagcaaataaggacatcatctgctataacctacaagcagttggacagatattctacatttcctcatttctctacaccgtcaattacatctggtatttgtacacagagctgaggatgaaacacacccagagtggacagagcacatctccactggtgatagattatacttgtcgagtttgtcaaatggcctttgttttctcaagcctgatacctctgctattgatgacacctgtattctgtctgggaaatactagtgaatgtttccaaaacttcagtcagagccacaagtgtatcttgatgcactcaccaccatcagccatggctgaacttccaccttctgccaacacatctgtctgtagcacactttatttttatggtatcgccattttcctgggcagctttgtactcagcctccttaccattatggtcttacttatccgagcccagacattgtataagaagtttgtgaagtcaactggctttctggggagtgaacagtgggcagtgattcacattgtggaccaacgggtgcgcttctacccagtggccttcttttgctgctggggcccagctgtcattctaatgatcataaagctgactaagccacaggacaccaagcttcacatggccctttatgttctccaggctctaacggcaacatctcagggtctactcaactgtggagtatatggctggacgcagcacaaattccaccaactaaagcaggaggctcggcgtgatgcagatacccagacaccattattatgctcacagaagagattctatagcaggggcttaaattcactggaatccaccctgacttttcctgccagtacttctaccattttttgaaactacaatactggaacatccaggaactggagttattctacgctaatggattggaaagaatgttgggaaaggacatcttaaatcttttctaactatgccctaaactgcagaactcaaaggaaatatagtgccattgttagtagtcattctagatgaattgggagtatctctccagttattcccagattcactagtgatccttaaagtctctattcagggagaggaagacactttccatctcagagatagactcgtgttaccttgatggatattggatttgtctaagtctcttctagaaaaaataaattctagattattatttatatgtgtcatttcaaagct

SEQ ID NO: 418665 - DNA, 1667 bp, Homo sapiens
ggaaaatgggctcctgcgcgcgcgcactcgccgagtcttccggcgggtccgcccagttccgttcctgctccgcttgaggagaagcgccaagtgcgcatggggacgctatagcaattcgtttgctgtccttcctctccttcgaagatgacaaggcctaccatcgtttcttcctgcctttgggccgtcaggcagttggttgggacccgctccaaccctcggttcttcctgcaatacagtggatacaatttgtcatggctactctgagtgttataggttcaagttcacttattgcctatgctgtattccataatatacagaaatctccagagataagaccacttttttatctgagcttctgtgacctgctcctgggactttgctggctcacggagacacttctctatggagcttcagtagcaaataaggacatcatctgctataacctacaagcagttggacaggggagacggggtttcgccatgtttgccaggctggtcctgaatgcctgacctcaagtgattcaccgcttgggcctcccaaagtgctgggattacaggtgtgagccactgcacctggcctccttaaatgtatctttatggcctaattttcacctttgcacccagttggtgatagattatacttgtcgagtttgtcaaatggcctttgttttctcaagcctgatacctctgctattgatgacacctgtattctgtctgggaaatactagtgaatgtttccaaaacttcagtcagagccacaagtgtatcttgatgcactcaccaccatcagccatggctgaacttccaccttctgccaacacatctgtctgtagcacactttatttttatggtatcgccattttcctgggcagctttgtactcagcctccttaccattatggtcttacttatccgagcccagacattgtataagaagtttgtgaagtcaactggctttctggggagtgaacagtgggcagtgattcacattgtggaccaacgggtgcgcttctacccagtggccttcttttgctgctggggcccagctgtcattctaatgatcataaagctgactaagccacaggacaccaagcttcacatggccctttatgttctccaggctctaacggcaacatctcagggtctactcaactgtggagtatatggctggacgcagcacaaattccaccaactaaagcaggaggctcggcgtgatgcagatacccagacaccattattatgctcacagaagagattctatagcaggggcttaaattcactggaatccaccctgacttttcctgccagtacttctaccattttttgaaactacaatactggaacatccaggaactggagttattctacgctaatggattggaaagaatgttgggaaaggacatcttaaatcttttctaactatgccctaaactgcagaactcaaaggaaatatagtgccattgttagtagtcattctagatgaattgggagtatctctccagttattcccagattcactagtgatccttaaagtctctattcagggagaggaagacactttccatctcagagatagactcgtgttaccttgatggatattggatttgtctaagtctcttctagaaaaaataaattctagattattatttatatgtgtcatttcaaagct

SEQ ID NO: 418666 - DNA, 1774 bp, Homo sapiens
ggaaaatgggctcctgcgcgcgcgcactcgccgagtcttccggcgggtccgcccagttccgttcctgctccgcttgaggagaagcgccaagtgcgcatggggacgctatagcaattcgtttgctgtccttcctctccttcgaagatgacaaggcctaccatcgtttcttcctgcctttgggccgtcaggcagttggttgggacccgctccaaccctcggttcttcctgcaatacagtggatacaatttgtcatggctactctgagataagaccacttttttatctgagcttctgtgacctgctcctgggactttgctggctcacggagacacttctctatggagcttcagtagcaaataagggcacccattccaattcctgtggcttaaattaaaacccttaaccaaaaatgcaagtttggacaggggagacggggtttcgccatgtttgccaggctggtcctgaatgcctgacctcaagtgattcaccgcttgggcctcccaaagtgctgggattacaggtgtgagccactgcacctggcctccttaaatgtatctttatggcctaattttcacctttgcacccagttgatattcctacatttcccctccaattttccttccttaacaaccccgggctccagaatttttaacccattttcctggggcaaattgtgtaaccaccagagctgaggatgaaacacacccagagtggacagagcacatctccactggtgatagattatacttgtcgagtttgtcaaatggcctttgttttctcaagcctgatacctctgctattgatgacacctgtattctgtctgggaaatactagtgaatgtttccaaaacttcagtcagagccacaagtgtatcttgatgcactcaccaccatcagccatggctgaacttccaccttctgccaacacatctgtctgtagcacactttatttttatggtatcgccattttcctgggcagctttgtactcagcctccttaccattatggtcttacttatccgagcccagacattgtataagaagtttgtgaagtcaactggctttctggggagtgaacagtgggcagtgattcacattgtggaccaacgggtgcgcttctacccagtggccttcttttgctgctggggcccagctgtcattctaatgatcataaagctgactaagccacaggacaccaagcttcacatggccctttatgttctccaggctctaacggcaacatctcagggtctactcaactgtggagtatatggctggacgcagcacaaattccaccaactaaagcaggaggctcggcgtgatgcagatacccagacaccattattatgctcacagaagagattctatagcaggggcttaaattcactggaatccaccctgacttttcctgccagtacttctaccattttttgaaactacaatactggaacatccaggaactggagttattctacgctaatggattggaaagaatgttgggaaaggacatcttaaatcttttctaactatgccctaaactgcagaactcaaaggaaatatagtgccattgttagtagtcattctagatgaattgggagtatctctccagttattcccagattcactagtgatccttaaagtctctattcagggagaggaagacactttccatctcagagatagactcgtgttaccttgatggatattggatttgtctaagtctcttctagaaaaaataaattctagattattatttatatgtgtcatttcaaagct

SEQ ID NO: 418667 - DNA, 1404 bp, Homo sapiens
ggaaaatgggctcctgcgcgcgcgcactcgccgagtcttccggcgggtccgcccagttccgttcctgctccgcttgaggagaagcgccaagtgcgcatggggacgctatagcaattcgtttgctgtccttcctctccttcgaagatgacaaggcctaccatcgtttcttcctgcctttgggccgtcaggcagttggttgggacccgctccaaccctcggttcttcctgcaatacagtggatacaatttgtcatggctactctgagataagaccacttttttatctgagcttctgtgacctgctcctgggactttgctggctcacggagacacttctctatggagcttcagtagcaaataaggacatcatctgctataacctacaagcagttggacagatattctacatttcctcatttctctacaccgtcaattacatctggtatttgtacacagagctgaggatgaaacacacccagagtggacagagcacatctccactggtgatagattatacttgtcgagtttgtcaaatggcctttgttttctcaagcctgatacctctgctattgatgacacctgtattctgtctgggaaatactagtgaatgtttccaaaacttcagtcagagccacaagtcttacttatccgagcccagacattgtataagaagtttgtgaagtcaactggctttctggggagtgaacagtgggcagtgattcacattgtggaccaacgggtgcgcttctacccagtggccttcttttgctgctggggcccagctgtcattctaatgatcataaagctgactaagccacaggacaccaagcttcacatggccctttatgttctccaggctctaacggcaacatctcagggtctactcaactgtggagtatatggctggacgcagcacaaattccaccaactaaagcaggaggctcggcgtgatgcagatacccagacaccattattatgctcacagaagagattctatagcaggggcttaaattcactggaatccaccctgacttttcctgccagtacttctaccattttttgaaactacaatactggaacatccaggaactggagttattctacgctaatggattggaaagaatgttgggaaaggacatcttaaatcttttctaactatgccctaaactgcagaactcaaaggaaatatagtgccattgttagtagtcattctagatgaattgggagtatctctccagttattcccagattcactagtgatccttaaagtctctattcagggagaggaagacactttccatctcagagatagactcgtgttaccttgatggatattggatttgtctaagtctcttctagaaaaaataaattctagattattatttatatgtgtcatttcaaagct

SEQ ID NO: 418668 - DNA, 1375 bp, Homo sapiens
ggaaaatgggctcctgcgcgcgcgcactcgccgagtcttccggcgggtccgcccagttccgttcctgctccgcttgaggagaagcgccaagtgcgcatggggacgctatagcaattcgtttgctgtccttcctctccttcgaagatgacaaggcctaccatcgtttcttcctgcctttgggccgtcaggcagttggttgggacccgctccaaccctcggttcttcctgcaatacagtggatacaatttgtcatggctactctgagtgttataggttcaagttcacttattgcctatgctgtattccataatatacagaaatctccagagataagaccacttttttatctgagcttctgtgacctgctcctgggactttgctggctcacggagacacttctctatggagcttcagtagcaaataaggacatcatctgctataacctacaagcagttggacagatattctacatttcctcatttctctacaccgtcaattacatctggtatttgtacacagagctgaggatgaaacacacccagagtggacagagcacatctccactggtgatagattatacttgtcgagtttgtcaaatggcctttgttttctcaagcctgatacctctgctattgatgacacctgtattctgtctgggaaatactagtgaatgtttccaaaacttcagtcagagccacaagtgtatcttgatgcactcaccaccatcagccatggctgaacttccaccttctgccaacacatctgtctgtagcacactttatttttatggtatcgccattttcctgggcagctttgtactcagcctccttaccattatggggcggtgtctcggtctgttgcccgggctggagtgcagtggcgcatctcggctcactgcaacctctgcctcccgggttcgggcggttctcctgcctcggcctcctgagtggctggaattggaggcgcatgccgccacgactggctaatttttgtgttttttgtgacacaggtttcaccatgctggtcaggctgtcttgaactcctgacctcgtgatctgcctgcctcagcctcccaaagtgttgggattataggcgtgagccaccgcaccgggtgcaaagtgactttctaaaacttctgttgcttagagttgagaatttaagctcagccatggtgctgaagtgttaagcatagaacactttctaacaaaatctctaataaagtgttttaagaggaactagttagagcttacttttaacttcctgggtaaactgtgattagcctcagtggggggaaatgcccagaggttgatgtaaggttcatgtgttaaacgtgatacacaagtttggctagttacctgtccatttccctagccta

SEQ ID NO: 418669 - DNA, 1235 bp, Homo sapiens
ggaaaatgggctcctgcgcgcgcgcactcgccgagtcttccggcgggtccgcccagttccgttcctgctccgcttgaggagaagcgccaagtgcgcatggggacgctatagcaattcgtttgctgtccttcctctccttcgaagatgacaaggcctaccatcgtttcttcctgcctttgggccgtcaggcagttggttgggacccgctccaaccctcggttcttcctgcaatacagtggatacaatttgtcatggctactctgagtgttataggttcaagttcacttattgcctatgctgtattccataatatacagaaatctccagagataagaccacttttttatctgagcttctgtgacctgctcctgggactttgctggctcacggagacacttctctatggagcttcagtagcaaataaggacatcatctgctataacctacaagcagttggacagatattctacatttcctcatttctctacaccgtcaattacatctggtatttgtacacagagctgaggatgaaacacacccagagtggacagagcacatctccactggtgatagattatacttgtcgagtttgtcaaatggcctttgttttctcaagcctgatacctctgctattgatgacacctgtattctgtctgggaaatactagtgaatgtttccaaaacttcagtcagagccacaagtgtatcttgatgcactcaccaccatcagccatggctgaacttccaccttctgccaacacatctgtctgtagcacactttatttttatggtatcgccattttcctgggcagctttgtactcagcctccttaccattatggtatggtaccaccctaccttcctttgtggagagatgaggaaatgaaggggatgggccagtattcccaggacctgggaaagatggggcagagaggcacttcttgtggtcctagaactaagaaagtagctaggagatcttgacaatataattactgcctcagacttttgcacttccccaaatcaaatgataagagagagaaaagagcttgtatttattaggtgaaaattatgctcactctacaactagtataggcttcatcaatcccctatggccagaaaactcatatgtgccaaatatatcctttacatagttaggatgacactctgaaacatagaacatatgctttgatttaattttccaaataataaaataattttcttttttaaattctacatt

SEQ ID NO: 418670 - DNA, 895 bp, Homo sapiens
accccgccctgtaggcgggagcatccaatcaacttcgagagcgtaggccccacctatcgtgggtcgagttgcttggcggtcgtggttccggaggttcctcgggatgtcggtggccttcgtaccggactggctgaggggcaaggcggaagtcaatcaagagactatccagcggctccttgaggagaatgaccagctgatccgctgtattgtggagtatcagaacaagggccgcgggaacgagtgcgtgcagtaccagcatgtgttacatagaaatctcatttatttggctaccattgcagatgccagtccaaccagcacttcaaaagcaatggaataatctttcaaaagcaatagaataatcttccatttggctgtcgtgaggagtaattgaatgtaatccatctcttacaaaatggagacagggtctttaccaactcaactggttaaaacatgaatgaaacctctgtggctctttcgaaacgtgaaaatgtgaagaaagctactaacttagctgtattctcatgtaaatattttttaaataattaagcaaatccctcaataagttgagcccaggtgtcctctttcctgaacttggagcatgtttggataacaaagacatcactgggatgttcaagtctactttttagtttcaacctgaagaggaaactcagtaggtgttgggcaggaattggtgagattcctgacttgataccttgctaaatggacatgtaactgtgtgctccttcctatcagtttgtaaatgtggtccccctgactgctgttttcagattgctttgaaataaagcttatttttctataaaataaaacacagaaacacacaacaggacacaaacaacaaaaaaaaagtggggccccccgaaaagtacacaacgtg

SEQ ID NO: 418671 - DNA, 490 bp, Homo sapiens
accccgccctgtaggcgggagcatccaatcaacttcgagagcgtaggccccacctatcgtgggtcgagttgcttggcggtcgtggttccggaggttcctcgggatgtcggtggccttcgtaccggactggctgaggggcaaggcggaagtcaatcaagagactatccagcggctccttgaggagaatgaccagctgatccgctgtattgtggagtatcagaacaagggccgcgggaacgagtgcgtgcagtaccagcatgtgttacatagaaatctcatttatttggctaccattgcagatgccagtccaaccagcacttcaaaagcaatggaataatctttcaaaagcaatagaataatcttccatttggctgtcgtgaggagtaattgaatgtaatccatctcttacaaaatggagacagggtcttgctctgttgagggcaatggcaccatcatagctcactgcagccttaaacacctgaactctgat

SEQ ID NO: 418672 - DNA, 824 bp, Homo sapiens
accccgccctgtaggcgggagcatccaatcaacttcgagagcgtaggccccacctatcgtgggtcgagttgcttggcggtcgtggttccggaggttcctcgggatgtcggtggccttcgtaccggactggctgaggggcaaggcggaagtcaatcaagagactatccagcggctccttgaggagaatgaccagctgatccgctgtattgtggagtatcagaacaagggccgcgggaacgagtgcgtgcagtaccagcatgtgttacatagaaatctcatttatttggctaccattgcagatgccagtccaaccagcacttcaaaagcaatggaataatctttcaaaagcaatagaataatcttccatttggctgtcgtgaggagtaattgaatgtaatccatctcttacaaaatggagacagggtctttaccaactcaactggttaaaacatgaatgaaacctctgtggctctttcgaaacgtgaaaatgtgaagaaagctactaacttagctgtattctcatgtaaatattttttaaataattaagcaaatccctcaataagttgagcccaggtgtcctctttcctgaacttggagcatgtttggataacaaagacatcactgggatgttcaagtctactttttagtttcaacctgaagaggaaactcagtaggtgttgggcaggaattggtgagattcctgacttgataccttgctaaatggacatgtaactgtgtgctccttcctatcagtttgtaaatgtggtccccctgactgctgttttcagattgctttgaaataaagcttatttttctataaaata

SEQ ID NO: 418673 - DNA, 2737 bp, Homo sapiens
aagcggctgggcttcggctcggggcctatgagagccgggctccggggggcgggccggactgtggcggctgccgggggcggtggcggtggtggcggcggcggcggaggcggactggggaggcggcggcctggctcggcctggcctggcctgtcagggcgcgggcggcggcggctccagcaccatgtccctgcagtacggggcggaggagacgcccctcgccggcagttacggcgcggccgattcgtttccaaaggacttcggctacggcgtggaggaggaggaagaggaggcggcggcggcgggcggaggggttggggcaggggcaggcggtggctgtggtccggggggcgctgacagctccaagccgaggattctgctcatgggactccggcgcagcggcaagtcctccatccagaaggtggtgtttcataagatgtcacccaacgagaccctctttttggaaagtaccaacaagatttataaggatgacatttccaatagctcctttgtgaatttccagatatgggattttcctgggcaaatggacttttttgacccaacctttgactatgagatgatcttcaggggaacaggagcattgatatacgtcattgacgcacaggatgactacatggaggctttaacaagacttcacattactgtttctaaagcctacaaagttaacccagacatgaattttgaggtttttattcacaaagttgatggtctgtctgatgatcacaaaatagaaacacagagggacattcatcaaagggccaatgatgaccttgcagatgctgggctagaaaaactccatcttagcttttatctgactagtatctatgaccattcaatatttgaagcctttagtaaggtggtgcagaaactcattccacaactgccgaccttggaaaacctattaaatatctttatatcaaattcaggtattgaaaaagcttttctctttgatgttgtcagcaaaatctacattgcaacagacagttcccctgtggatatgcaatcttatgaactttgctgtgacatgatcgatgttgtaattgatgtgtcttgtatatatgggttaaaggaagatggaagtggaagtgcttatgacaaagaatctatggcaattatcaagctgaataatacaactgtcctttatttaaaggaggtgactaaatttttggcactggtctgcattctaagggaagaaagctttgaaagaaaaggtttaatagactacaacttccactgtttccgaaaagctattcatgaggtttttgaggtgggtgtgacttctcacaggagctgtggtcaccagactagtgcctccagtctgaaagcgctgacacacaatggcacgccacgaaacgccatctagtctgaatcccagcgtcggggctctgtgccagcttactcttcactccagggtcggatgccacgtgctacaggacatgggagctgctgcttgtgggaatctggtgcctgttccactagagacaaggggtagagtttctcatttggatgaaaaccccttcaactggtggtgtacaactgaagctactatatcttttttgaaaatggcaaaaaaaaaaaaaaaaaaattctggagaccacagaactcaagtgtgtgtttctcctcttttgggtcccctttaagtagttgggatattttggacctggagataacaccagttacccatccttaccagggaatgttgccatcaattccagttgaaaataatagaaaagactgaatttttatatgcttcacttaggctttcatttgagtagactctaaaaattctgccttgcttaagttctaacactgcctctcagatttcagttttggacattgcacaactaagaccttttaaacgcatttgcttgctaactcggaagacacatagtctgcagcaagacattcctatattgaagaaatgagagaaaattttatgctgcatcaggtggagagcaaggctcaacggtggttgcattagttccctcggaagtattgaaaaaactttgaaatggaagaaaatttttgcacctatgttctgagtaccagatgtctgggttctttcttctgcattagataaatgatcatgctcagtgtaacaaagggaattaaaagttttcccacagtccccttctaggggagaaactcattgtgtcactgaaatgtttagcttactttaatcttgatatcagcctctacagaccttttattctaagctatcgagcttcttgattgcatttggttgaccacgagtgaccctaaggcattgggggactgtccactgggagttggagtgagcacgtggtgctgcaacaggcattgttttacatactttgtctccagtattctgacaccaagtgtcaactgtggtactttctttgcctaggatatgaattcataattgttgcttttgttgatggttgataccctttccattgatttaaacctaacacattatttctattccacatgcccagtagacatatattccaaagccactggaccacttgagtacataagtgccactgtttaatgcaatatgtatattcaggtctgtaaagctaacagtgtgacttggagtgcttcctgcagatgattctgacttgagtatttacatggaccatggtgatatccaaaagaaaaatgctttttatatttatagattatttcattgaactatatatgaaatgggtatcaataaatgtatttactccaaaa

SEQ ID NO: 418674 - DNA, 2864 bp, Homo sapiens
aagcggctgggcttcggctcggggcctatgagagccgggctccggggggcgggccggactgtggcggctgccgggggcggtggcggtggtggcggcggcggcggaggcggactggggaggcggcggcctggctcggcctggcctggcctgtcagggcgcgggcggcggcggctccagcaccatgtccctgcagtacggggcggaggagacgcccctcgccggcagttacggcgcggccgattcgtttccaaaggacttcggctacggcgtggaggaggaggaagaggaggcggcggcggcgggcggaggggttggggcaggggcaggcggtggctgtggtccggggggcgctgacagctccaagccgaggattctgctcatgggactccggcgcagcggcaagtcctccatccagaaggtggtgtttcataagatgtcacccaacgagaccctctttttggaaagtaccaacaagatttataaggatgacatttccaatagctcctttgtgaatttccagatatgggattttcctgggcaaatggacttttttgacccaacctttgactatgagatgatcttcaggggaacaggagcattgatatacgtcattgacgcacaggatgactacatggaggctttaacaagacttcacattactgtttctaaagcctacaaagttaacccagacatgaattttgaggtttttattcacaaagttgatggtctgtctgatgatcacaaaatagaaacacagagggacattcatcaaagggccaatgatgaccttgcagatgctgggctagaaaaactccatcttagcttttatctgactagtatctatgaccattcaatatttgaagcctttagtaaggtggtgcagaaactcattccacaactgccgaccttggaaaacctattaaatatctttatatcaaattcaggtattgaaaaagcttttctctttgatgttgtcagcaaaatctacattgcaacagacagttcccctgtggatatgcaatcttatgaactttgctgtgacatgatcgatgttgtaattgatgtgtcttgtatatatgggttaaaggaagatggaagtggaagtgcttatgacaaagaatctatggcaattatcaagctgaataatacaactgtcctttatttaaaggaggtgactaaatttttggcactggtctgcattctaagggaagaaagctttgaaagaaaaggtttaatagactacaacttccactgtttccgaaaagctattcatgaggtttttgaggtgggtgtgacttctcacaggagctgtggtcaccagactagtgcctccagtctgaaagcgctgacacacaatggcacgccacgaaacgccatctagtctgaatcccagcgtcggggctctgtgccagcttactcttcactccagggtcggatgccacgtgctacaggacatgggagctgctgcttgtgggaatctggtgcctgttccactagagacaaggggtagagtttctcatttggatgaaaaccccttcaactggtggtgtacaactgaagctactatatcttttttgaaaatggcaaaaaaaaaaaaaaaaaaattctggagaccacagaactcaagtgtgtgtttctcctcttttgggtcccctttaagtagttgggatattttggacctggagataacaccagttacccatccttaccagggaatgttgccatcaattccagttgaaaataatagaaaagactgaatttttatatgcttcacttaggctttcatttgagtagactctaaaaattctgccttgcttaagttctaacactgcctctcagatttcagttttggacattgcacaactaagaccttttaaacgcatttgcttgctaactcggaagacacatagtctgcagcaagacattcctatattgaagaaatgagagaaaattttatgctgcatcaggtggagagcaaggctcaacggtggttgcattagttccctcggaagtattgaaaaaactttgaaatggaagaaaatttttgcacctatgttctgagtaccagatgtctgggttctttcttctgcattagataaatgatcatgctcagtgtaacaaagggaattaaaagttttcccacagtccccttctaggggagaaactcattgtgtcactgaaatgtttagcttactttaatcttgatatcagcctctacagaccttttattctaagctatcgagcttcttgattgcatttggttgaccacgagtgaccctaaggcattgggggactgtccactgggagttggagtgagcacgtggtgctgcaacaggcattgttttacatactttgtctccagtattctgacaccaagtgtcaactgtggtactttctttgcctaggatatgaattcataattgttgcttttgttgatggttgataccctttccattgatttaaacctaacacattatttctattccacatgcccagtagacatatattccaaagccactggaccacttgagtacataagtgccactgtttaatgcaatatgtatattcaggtctgtaaagctaacagtgtgacttggagtgcttcctgcagatgattctgacttgagtatttacatggaccatggtgatatccaaaagaaaaatgctttttatatttatagattatttcattgaactatatatgaaatgggtatcaataaatgtatttactccaaaaaaaaaatcacaacactttttgggccgccttggctgaaaaattttcaaaccttctttgggcccggggcccccggtagtgacccgggccagcggtcccaggaacccggcgagacggcctggctccccca

SEQ ID NO: 418675 - DNA, 2677 bp, Homo sapiens
aagcggctgggcttcggctcggggcctatgagagccgggctccggggggcgggccggactgtggcggctgccgggggcggtggcggtggtggcggcggcggcggaggcggactggggaggcggcggcctggctcggcctggcctggcctgtcagggcgcgggcggcggcggctccagcaccatgtccctgcagtacggggcggaggagacgcccctcgccggcagttacggcgcggccgattcgtttccaaaggacttcggctacggcgtggaggaggaggaagaggaggcggcggcggcgggcggaggggttggggcaggggcaggcggtggctgtggtccggggggcgctgacagctccaagccgaggattctgctcatgggactccggcgcagcggcaagtcctccatccagaaggtggtgtttcataagatgtcacccaacgagaccctctttttggaaagtaccaacaagatttataaggatgacatttccaatagctcctttgtgaatttccagatatgggattttcctgggcaaatggacttttttgacccaacctttgactatgagatgatcttcaggggaacaggagcattgatatacgtcattgacgcacaggatgactacatggaggctttaacaagacttcacattactgtttctaaagcctacaaagttaacccagacatgaattttgaggtttttattcacaaagttgatggtctgtctgatgatcacaaaatagaaacacagagggacattcatcaaagggccaatgatgaccttgcagatgctgggctagaaaaactccatcttagcttttatctgactagtatctatgaccattcaatatttgaagcctttagtaaggtggtgcagaaactcattccacaactgccgaccttggaaaacctattaaatatctttatatcaaattcaggtattgaaaaagcttttctctttgatgttgtcagcaaaatctacattgcaacagacagttcccctgtggatatgcaatcttatgaactttgctgtgacatgatcgatgttgtaattgatgtgtcttgtatatatgggttaaaggaagatggaagtggaagtgcttatgacaaagaatctatggcaattatcaagctgaataatacaactgtcctttatttaaaggaggtgactaaatttttggcactggtctgcattctaagggaagaaagctttgaaagaaaaggtttaatagactacaacttccactgtttccgaaaagctattcatgaggtttttgaggtgggtgtgacttctcacaggagctgtggtcaccagactagtgcctccagtctgaaagcgctgacacacaatggcacgccacgaaacgccatctagtctgaatcccagcgtcggggctctgtgccagcttactcttcactccagggtcggatgccacgtgctacaggacatgggagctgctgcttgtgggaatctggtgcctgttccactagagacaaggggtagagtttctcatttggatgaaaaccccttcaactggtggtgtacaactgaagctactatatcttttttgaaaatggcaaaaaaaaaaaaaaaaaaattctggagaccacagaactcaagtgtgtgtttctcctcttttgggtcccctttaagtagttgggatattttggacctggagataacaccagttacccatccttaccagggaatgttgccatcaattccagttgaaaataatagaaaagactgaatttttatatgcttcacttaggctttcatttgagtagactctaaaaattctgccttgcttaagttctaacactgcctctcagatttcagttttggacattgcacaactaagaccttttaaacgcatttgcttgctaactcggaagacacatagtctgcagcaagacattcctatattgaagaaatgagagaaaattttatgctgcatcaggtggagagcaaggctcaacggtggttgcattagttccctcggaagtattgaaaaaactttgaaatggaagaaaatttttgcacctatgttctgagtaccagatgtctgggttctttcttctgcattagataaatgatcatgctcagtgtaacaaagggaattaaaagttttcccacagtccccttctaggggagaaactcattgtgtcactgaaatgtttagcttactttaatcttgatatcagcctctacagaccttttattctaagctatcgagcttcttgattgcatttggttgaccacgagtgaccctaaggcattgggggactgtccactgggagttggagtgagcacgtggtgctgcaacaggcattgttttacatactttgtctccagtattctgacaccaagtgtcaactgtggtactttctttgcctaggatatgaattatttctattccacatgcccagtagacatatattccaaagccactggaccacttgagtacataagtgccactgtttaatgcaatatgtatattcaggtctgtaaagctaacagtgtgacttggagtgcttcctgcagatgattctgacttgagtatttacatggaccatggtgatatccaaaagaaaaatgctttttatatttatagattatttcattgaactatatatgaaatgggtatcaataaatgtatttactccaaaa

SEQ ID NO: 418676 - DNA, 2683 bp, Homo sapiens
aagcggctgggcttcggctcggggcctatgagagccgggctccggggggcgggccggactgtggcggctgccgggggcggtggcggtggtggcggcggcggcggaggcggactggggaggcggcggcctggctcggcctggcctggcctgtcagggcgcgggcggcggcggctccagcaccatgtccctgcagtacggggcggaggagacgcccctcgccggcagttacggcgcggccgattcgtttccaaaggacttcggctacggcgtggaggaggaggaagaggaggcggcggcggcgggcggaggggttggggcaggggcaggcggtggctgtggtccggggggcgctgacagctccaagccgaggattctgctcatgggactccggcgcagcggcaagtcctccatccagaaggtggtgtttcataagatgtcacccaacgagaccctctttttggaaagtaccaacaagatttataaggatgacatttccaatagctcctttgtgaatttccagatatgggattttcctgggcaaatggacttttttgacccaacctttgactatgagatgatcttcaggggaacaggagcattgatatacgtcattgacgcacaggatgactacatggaggctttaacaagacttcacattactgtttctaaagcctacaaagttaacccagacatgaattttgaggtttttattcacaaagttgatggtctgtctgatgatcacaaaatagaaacacagagggacattcatcaaagggccaatgatgaccttgcagatgctgggctagaaaaactccatcttagcttttatctgactagtatctatgaccattcaatatttgaagcctttagtaaggtggtgcagaaactcattccacaactgccgaccttggaaaacctattaaatatctttatatcaaattcaggtattgaaaaagcttttctctttgatgttgtcagcaaaatctacattgcaacagacagttcccctgtggatatgcaatcttatgaactttgctgtgacatgatcgatgttgtaattgatgtgtcttgtatatatgggttaaaggaagatggaagtggaagtgcttatgacaaagaatctatggcaattatcaagctgaataatacaactgtcctttatttaaaggaggtgactaaatttttggcactggtctgcattctaagggaagaaagctttgaaagaaaaggtttaatagactacaacttccactgtttccgaaaagctattcatgaggtttttgaggtgggtgtgacttctcacaggagctgtggtcaccagactagtgcctccagtctgaaagcgctgacacacaatggcacgccacgaaacgccatctagtctgaatcccagcgtcggggctctgtgccagcttactcttcactccagggtcggatgccacgtgctacaggacatgggagctgctgcttgtgggaatctggtgcctgttccactagagacaaggggtagagtttctcatttggatgaaaaccccttcaactggtggtgtacaactgaagctactatatcttttttgaaaatggcaaaaaaaaaaaaaaaaaaattctggagaccacagaactcaagtgtgtgtttctcctcttttgggtcccctttaagtagttgggatattttggacctggagataacaccagttacccatccttaccagggaatgttgccatcaattccagttgaaaataatagaaaagactgaatttttatatgcttcacttaggctttcatttgagtagactctaaaaattctgccttgcttaagttctaacactgcctctcagatttcagttttggacattgcacaactaagaccttttaaacgcatttgcttgctaactcggaagacacatagtctgcagcaagacattcctatattgaagaaatgagagaaaattttatgctgcatcaggtggagagcaaggctcaacggtggttgcattagttccctcggaagtattgaaaaaactttgaaatggaagaaaatttttgcacctatgttctgagtaccagatgtctgggttctttcttctgcattagataaatgatcatgctcagtgtaacaaagggaattgtttagcttactttaatcttgatatcagcctctacagaccttttattctaagctatcgagcttcttgattgcatttggttgaccacgagtgaccctaaggcattgggggactgtccactgggagttggagtgagcacgtggtgctgcaacaggcattgttttacatactttgtctccagtattctgacaccaagtgtcaactgtggtactttctttgcctaggatatgaattcataattgttgcttttgttgatggttgataccctttccattgatttaaacctaacacattatttctattccacatgcccagtagacatatattccaaagccactggaccacttgagtacataagtgccactgtttaatgcaatatgtatattcaggtctgtaaagctaacagtgtgacttggagtgcttcctgcagatgattctgacttgagtatttacatggaccatggtgatatccaaaagaaaaatgctttttatatttatagattatttcattgaactatatatgaaatgggtatcaataaatgtatttactccaaaa

SEQ ID NO: 418677 - DNA, 2253 bp, Homo sapiens
gaaaaagatgtagaaacaaaggaaagttgtttatcttctttgtcatgtggttgcagcttatctctttggcagtagattccctaacagtgtaagagatgcagttgcagagtgctttgggagcagacatgcattgtgcaggatgactacatggaggctttaacaagacttcacattactgtttctaaagcctacaaagttaacccagacatgaattttgaggtttttattcacaaagttgatggtctgtctgatgatcacaaaatagaaacacagagggacattcatcaaagggccaatgatgaccttgcagatgctgggctagaaaaactccatcttagcttttatctgactagtatctatgaccattcaatatttgaagcctttagtaaggtggtgcagaaactcattccacaactgccgaccttggaaaacctattaaatatctttatatcaaattcaggtattgaaaaagcttttctctttgatgttgtcagcaaaatctacattgcaacagacagttcccctgtggatatgcaatcttatgaactttgctgtgacatgatcgatgttgtaattgatgtgtcttgtatatatgggttaaaggaagatggaagtggaagtgcttatgacaaagaatctatggcaattatcaagctgaataatacaactgtcctttatttaaaggaggtgactaaatttttggcactggtctgcattctaagggaagaaagctttgaaagaaaaggtttaatagactacaacttccactgtttccgaaaagctattcatgaggtttttgaggtgggtgtgacttctcacaggagctgtggtcaccagactagtgcctccagtctgaaagcgctgacacacaatggcacgccacgaaacgccatctagtctgaatcccagcgtcggggctctgtgccagcttactcttcactccagggtcggatgccacgtgctacaggacatgggagctgctgcttgtgggaatctggtgcctgttccactagagacaaggggtagagtttctcatttggatgaaaaccccttcaactggtggtgtacaactgaagctactatatcttttttgaaaatggcaaaaaaaaaaaaaaaaaaattctggagaccacagaactcaagtgtgtgtttctcctcttttgggtcccctttaagtagttgggatattttggacctggagataacaccagttacccatccttaccagggaatgttgccatcaattccagttgaaaataatagaaaagactgaatttttatatgcttcacttaggctttcatttgagtagactctaaaaattctgccttgcttaagttctaacactgcctctcagatttcagttttggacattgcacaactaagaccttttaaacgcatttgcttgctaactcggaagacacatagtctgcagcaagacattcctatattgaagaaatgagagaaaattttatgctgcatcaggtggagagcaaggctcaacggtggttgcattagttccctcggaagtattgaaaaaactttgaaatggaagaaaatttttgcacctatgttctgagtaccagatgtctgggttctttcttctgcattagataaatgatcatgctcagtgtaacaaagggaattaaaagttttcccacagtccccttctaggggagaaactcattgtgtcactgaaatgtttagcttactttaatcttgatatcagcctctacagaccttttattctaagctatcgagcttcttgattgcatttggttgaccacgagtgaccctaaggcattgggggactgtccactgggagttggagtgagcacgtggtgctgcaacaggcattgttttacatactttgtctccagtattctgacaccaagtgtcaactgtggtactttctttgcctaggatatgaattcataattgttgcttttgttgatggttgataccctttccattgatttaaacctaacacattatttctattccacatgcccagtagacatatattccaaagccactggaccacttgagtacataagtgccactgtttaatgcaatatgtatattcaggtctgtaaagctaacagtgtgacttggagtgcttcctgcagatgattctgacttgagtatttacatggaccatggtgatatccaaaagaaaaatgctttttatatttatagattatttcattgaactatatatgaaatgggtatcaataaatgtatttactccaaaa

SEQ ID NO: 418678 - DNA, 745 bp, Homo sapiens
aaatctcaagacacattcacaaacaaatggttatcaccaaggtcttcatgctctactcatgttgacatgagttgtattaattggtgactggaagtccaggatctgttgaggaagtcagtgacccttaatcaggaacactgccttggaaggtggtggacctttaaaacagaagcttctcagtttttgtagcatctgatatgagagaatatgctagatattcataaacttagggccaggcaatgtggggcccctggaatgctactgggcactctctaacctagtcctagaaatttcagttccaataatgttttcttcttcttttctagataagaaactatatgtatctcgtggatctgccagtaccagccttccaaatgaaactctttcagagttagagacacctgggaaatactcacttacaccaccaaaccactggggccacccacatcgatacctgcagcatctttagtcaagttggaggagaaagacaacacttggtctaagacacggcagcaagacatccctgcatattgttccagataaaaatgaaagctgctcacacccacttgcctccccaatctgttaaacagcttcgtgtctagtatgagctcagtacttgccctgtgaaaatcccagaagcccccgctgtcaatgttccccatccacaccctgcttgctcctgtgtaacagctcagatgatgaataataataaaactgtacttttttggatggtgctaaaaaaaaa

SEQ ID NO: 418679 - DNA, 626 bp, Homo sapiens
aaatctgataacttactcattagaaattgagtaaactgcccgtcacaagttgaataaattctgttgtggctgcaatagaatttactctgtatccagagcatttcttggatgcagtttcatgagtttctgtcttcccttcctctgaggttgaggactctggtatctgacatcccacaggtgttcatctggaccctggaggagacttacagccttccataggggcctaactggctttcattaaccatgtaacttctcctttagctctttcagagttagagacacctgggaaatactcacttacaccaccaaaccactggggccacccacatcgatacctgcagcatctttagtcaagttggaggagaaagacaacacttggtctaagacacggcagcaagacatccctgcatattgttccagataaaaatgaaagctgctcacacccacttgcctccccaatctgttaaacagcttcgtgtctagtatgagctcagtacttgccctgtgaaaatcccagaagcccccgctgtcaatgttccccatccacaccctgcttgctcctgtgtaacagctcagatgatgaataataataaaactgtacttttttggatggtgctaaaaaaaaa

SEQ ID NO: 418680 - DNA, 1223 bp, Homo sapiens
ctagaggggcggaaagtaacaaggaggtgggggtacaaatcctcagctcctgcttccgcaagcactaacctgctctgaagtgagccaggcagctctggccatcttttcccagccacagaatcaggtgatggtccagaattaagagctgtcacctgtgtcattcactcacaatggaagaaatgaagaagactgccatccggctgcccaaaggcaaacagaagcctataaagacggaatggaattcccggtgtgtccttttcacctacttccaaggggacatcagcagcgtagtggatgaacacttctccagagctctgagcaatatcaagagcccccaggaattgaccccctcgagtcagagtgaaggtgtgatgctgaaaaacgatgatagcatgtctccaaatcagtggcgttactcgtctccatggacaaagccacaaccagaagtacctgtcacaaaccgtgccgccaactgcaacttgcatgtgcctggtcccatggctgtgaatcagttctcaccgtccctggctaggagggcctctgttcggcctggggagctgtggcatttctcctccctggcgggcaccagctccttagagcctggctactctcatcccttccccgctcggcacctggttccagagccccagcctgatgggaaacgtgagcctctcctaagtctcctccagcaagacagatgcctagcccgtcctcaggaatctgccgccagggagaatggcaaccctggccagatagctggaagcacagggttgctcttcaacctgcctcccggctcagttcactataagaaactatatgtatctcgtggatctgccagtaccagccttccaaatgaaactctttcagagttagagacacctgggaaatactcacttacaccaccaaaccactggggccacccacatcgatacctgcagcatctttagtcaagttggaggagaaagacaacacttggtctaagacacggcagcaagacatccctgcatattgttccagataaaaatgaaagctgctcacacccacttgcctccccaatctgttaaacagcttcgtgtctagtatgagctcagtacttgccctgtgaaaatcccagaagcccccgctgtcaatgttccccatccacaccctgcttgctcctgtgtaacagctcagatgatgaataataataaaactgtacttttttggatggtgctaaaaaaaaa

SEQ ID NO: 418681 - DNA, 378 bp, Homo sapiens
gctgtaggcgttacgacgacaagactcccgatggtgctgcctaggaagaatggagctagctccccctggggccacccacatcgatacctgcagcatctttagtcaagttggaggagaaagacaacacttggtctaagacacggcagcaagacatccctgcatattgttccagataaaaatgaaagctgctcacacccacttgcctccccaatctgttaaacagcttcgtgtctagtatgagctcagtacttgccctgtgaaaatcccagaagcccccgctgtcaatgttccccatccacaccctgcttgctcctgtgtaacagctcagatgatgaataataataaaactgtacttttttggatggtgctaaaaaaaaa

SEQ ID NO: 418682 - DNA, 1082 bp, Homo sapiens
ctagaggggcggaaagtaacaaggaggtgggggtacaaatcctcagctcctgcttccgcaagcactaacctgctctgaagtgagccaggcagctctggccatcttttcccagccacagaatcaggtgatggtccagaattaagagctgtcacctgtgtcattcactcacaatggaagaaatgaagaagactgccatccggctgcccaaaggcaaacagaagcctataaagacggaatggaattcccggtgtgtccttttcacctacttccaaggggacatcagcagcgtagtggatgaacacttctccagagctctgagcaatatcaagagcccccaggaattgaccccctcgagtcagagtgaaggtgtgatgctgaaaaacgatgatagcatgtctccaaatcagtggcgttactcgtctccatggacaaagccacaaccagaagtacctgtcacaaaccgtgccgccaactgcaacttgcatgtgcctggtcccatggctgtgaatcagttctcaccgtccctggctaggagggcctctgttcggcctggggagctgtggcatttctcctccctggcgggcaccagctccttagagcctggctactctcatcccttccccgctcggcacctggttccagagccccagcctgatgggaaacataagaaactatatgtatctcgtggatctgccagtaccagccttccaaatgaaactctttcagagttagagacacctgggaaatactcacttacaccaccaaaccactggggccacccacatcgatacctgcagcatctttagtcaagttggaggagaaagacaacacttggtctaagacacggcagcaagacatccctgcatattgttccagataaaaatgaaagctgctcacacccacttgcctccccaatctgttaaacagcttcgtgtctagtatgagctcagtacttgccctgtgaaaatcccagaagcccccgctgtcaatgttccccatccacaccctgcttgctcctgtgtaacagctcagatgatgaataataataaaactgtacttttttggatggtgctaaaaaaaaa

SEQ ID NO: 418683 - DNA, 442 bp, Homo sapiens
  misc_feature (17)..(17): n is a, c, g, or t
ggaaaggcaccacaggnttcacgaccctaggcacagtgacatgcaccgtctccaccagccttgccggggcggtgggccacagcactagtgcttccctggccacgccatcaccaccttgggcaccattgcctggggccacccacatcgatacctgcagcatctttagtcaagttggaggagaaagacaacacttggtctaagacacggcagcaagacatccctgcatattgttccagataaaaatgaaagctgctcacacccacttgcctccccaatctgttaaacagcttcgtgtctagtatgagctcagtacttgccctgtgaaaatcccagaagcccccgctgtcaatgttccccatccacaccctgcttgctcctgtgtaacagctcagatgatgaataataataaaactgtacttttttggatggtgctaaaaaaaaa

SEQ ID NO: 418684 - DNA, 1208 bp, Homo sapiens
ggctctggcagagcatgtctgagccatcacattggagaatcagctggtgatcctcgccaccacaaccagtgatgccggggcatactacgtgcaggccgtgaatgagaaaaatggagaaaacaagacaagcccattcattcatttgagcatagcaagcttttgtggaaacaccacacaagattgaggaaaatttgtaaaaactttctggccagcgtttctgaaaaatcaaaagatattacagccaattatcatttaatgaagatacatttttgcttgctgtcgggagaataaagcagggaacctttatgtagtgaacaccatcgggatgatcgggtactggtaattaaattcctggtggattgtgctgtaattagtttaaaatcggagtgtcatgcagccccgcctcttgtttgctgttgtggtaataatccgttccttccttgaggacagcaccgtgttagagtggagcggcaaccaggtctagccctgtctcaaaacatctaaataagtgatgcgctgtcacccagctaacaggaggaaataatacattttcatcaacaaccttgtacttgagagttcaaaaacgtcaccccttttcaattgctagatactgtggctacacctgaagcttatgggaagcaaaagatagataggttttagatttaaatttttttttaaagaaagcatgactgttagaactgagatgcagtcccataatggtaccgcctgctgtttagtgcatatttagtagatggcattattatctctcaacatttctcccctcttgcgtggttaagaagataaattccagcatgttctgaaccgatattcctgtagggaaggagaggatttccctgaactctccaccccgctgccctggtgagagcttgctgccatcccaggggtggatccactttgaagttttaatgtgatgtgaagccagcagatgttaaggacataggtgggactgttgaagcatcctgcatgaatttttcatggccagctcccactgctcaggtgcacaccagaaaaagaagggtttgggcctgcctgagagtagatgtgtcttccgaggtcagacccgggaaagctttatgaacctgtcaacctatttttggcttttgctttgaagattttacgttgagttaacctttgtggaacagaacttctgaactgaattactatgtgaataagagtttcttcctcta

SEQ ID NO: 418685 - DNA, 511 bp, Homo sapiens
atgggagcactcctgcaaagaaaatcagaagttcaagtcgcatatatgggaagtttcatggatacggaccagaggaaaacagtttctcaaggacgtgcagcgattctaaacctgctgcccatcaccagctaccccagacctcaagtgacttggtttagagaagggcacaagattattccaagcaacagaatagccatcacattggagaatcagctggtgatcctcgccaccacaaccagtgatgccggggcatactacgtgcaggccgtgaatgagaaaaatggagaaaacaagacaagcccattcattcatttgagcatagcaagtgagttttgaaatcccaaatggtaattctgcaagcaataaaatcttgctttaatcagtaaccactgtctgacaggacattttgcaataaattttctctctctagtgtagtagttacggtttaatattgatccagtgccaatagttcggagagctttagggctcttgctttcttcaaaatgatatg

SEQ ID NO: 418686 - DNA, 481 bp, Homo sapiens
acatttctcttttctctgccacaggagatgttggcacacctgaaaccatggccccaaccattgtggttcccccgggcaacagaagtgtggtggctggatccagtgagaccaccttggaatgtatagccagtgccaggtacgaggcgcgtctcctgtgagactcctagtaaatattccatgacctgtgacgagccgacgatagaaggatacactggagcatgaggttcagccttctagcgacagtggtcttgtttggccgggtgggccatgaatacgagatatgggtagataaggaaatggacacactgatgtcttccagagtcccccactgcaacagggcggtgctttcaatgcagctctgggtggtagtggggggctcctctgagatcctctctagggaagagagaggagttgaggcagaggaaaaagttcattgctcttctcctcttagtcagccaaggtgttctctgcctacttagcg

SEQ ID NO: 418687 - DNA, 1378 bp, Homo sapiens
atgggagcactcctgcaaagaaaatcagaagttcaagtcgcatatatgggaagtttcatggatacggaccagaggaaaacagtttctcaaggacgtgcagcgattctaaacctgctgcccatcaccagctaccccagacctcaagtgacttggtttagagaagggcacaagattattccaagcaacagaatagccatcacattggagaatcagctggtgatcctcgccaccacaaccagtgatgccggggcatactacgtgcaggccgtgaatgagaaaaatggagaaaacaagacaagcccattcattcatttgagcatagcaagcttttgtggaaacaccacacaagattgaggaaaatttgtaaaaactttctggccagcgtttctgaaaaatcaaaagatattacagccaattatcatttaatgaagatacatttttgcttgctgtcgggagaataaagcagggaacctttatgtagtgaacaccatcgggatgatcgggtactggtaattaaattcctggtggattgtgctgtaattagtttaaaatcggagtgtcatgcagccccgcctcttgtttgctgttgtggtaataatccgttccttccttgaggacagcaccgtgttagagtggagcggcaaccaggtctagccctgtctcaaaacatctaaataagtgatgcgctgtcacccagctaacaggaggaaataatacattttcatcaacaaccttgtacttgagagttcaaaaacgtcaccccttttcaattgctagatactgtggctacacctgaagcttatgggaagcaaaagatagataggttttagatttaaatttttttttaaagaaagcatgactgttagaactgagatgcagtcccataatggtaccgcctgctgtttagtgcatatttagtagatggcattattatctctcaacatttctcccctcttgcgtggttaagaagataaattccagcatgttctgaaccgatattcctgtagggaaggagaggatttccctgaactctccaccccgctgccctggtgagagcttgctgccatcccaggggtggatccactttgaagttttaatgtgatgtgaagccagcagatgttaaggacataggtgggactgttgaagcatcctgcatgaatttttcatggccagctcccactgctcaggtgcacaccagaaaaagaagggtttgggcctgcctgagagtagatgtgtcttccgaggtcagacccgggaaagctttatgaacctgtcaacctatttttggcttttgctttgaagattttacgttgagttaacctttgtggaacagaacttctgaactgaattactatgtgaataagagtttcttcctcta

SEQ ID NO: 418688 - DNA, 815 bp, Homo sapiens
atgggagcactcctgcaaagaaaatcagaagttcaagtcgcatatatgggaagtttcatggatacggaccagaggaaaacagtttctcaaggacgtgcagcgattctaaacctgctgcccatcaccagctaccccagacctcaagtgacttggtttagagaagggcacaagattattccaagcaacagaatagccatcacattggagaatcagctggtgatcctcgccaccacaaccagtgatgccggggcatactacgtgcaggccgtgaatgagaaaaatggagaaaacaagacaagcccattcattcatttgagcatagcaagagatgttggcacacctgaaaccatggccccaaccattgtggttcccccgggcaacagaagtgtggtggctggatccagtgagaccaccttggaatgtatagccagtgccaggcctgtggaggacctgagtgtgacctggaagaggaatggagtgagaatcaccagtggcctccacagctttggaagacgcctcaccatcagcaacccgacgtccgcggacaccgggccatacgtctgcgaggcggcgctgccggggagcgcttttgaaccggccagggcgacggcctttcttttcatcataggtaatgcgggagcctctaagtggtgttgccagcatctcagatagcatccgacactgactcttctgcagaaacaaaatagcgtatttcagtggctttatttgtaactcggcaaatgaaggtgaggttgagtttaccttcgaaatccttcctagccttctttcccaagaatataagtccattaaatcca

SEQ ID NO: 418689 - DNA, 881 bp, Homo sapiens
atgggagcactcctgcaaagaaaatcagaagttcaagtcgcatatatgggaagtttcatggatacggaccagaggaaaacagtttctcaaggacgtgcagcgattctaaacctgctgcccatcaccagctaccccagacctcaagtgacttggtttagagaagggcacaagattattccaagcaacagaatagccatcacattggagaatcagctggtgatcctcgccaccacaaccagtgatgccggggcatactacgtgcaggccgtgaatgagaaaaatggagaaaacaagacaagcccattcattcatttgagcatagcaagagatgttggcacacctgaaaccatggccccaaccattgtggttcccccgggcaacagaagtgtggtggctggatccagtgagaccaccttggaatgtatagccagtgccaggcctgtggaggacctgagtgtgacctggaagaggaatggagtgagaatcaccagtggcctccacagctttggaagacgcctcaccatcagcaacccgacgtccgcggacaccgggccatacgtctgcgaggcggcgctgccggggagcgcttttgaaccggccagggcgacggcctttcttttcatcatagagccaccatattttactgctgagcccgagagtcggatttcagctgaagtagaagaaactgtggacatcggatgtcaagccatgggggtcccccttcccaccctccagtggtacaaggatgccatctccatcagcaggctccagaatcctcgatacaaagtgctcgccagcggaggcctgcgcatccagaagctgcgtccagaggactccggaatcttccagtgcttcgccagcaatgaaggaggggagatcca

SEQ ID NO: 418690 - DNA, 791 bp, Homo sapiens
taagaagaggaaaactataattaatcataagcaaatgttgttgtcgaatgtatgtttttttcctttttccttccatgcttttaatcagatcatgacggtagatattgacttagcttccctgatgaatacaggtcaggacctgcacacaagggccctgacagcaggcagctactgtatgtatagttggaatataaataatactgccttcatgattattgattgaggaaacgtgatcaaatgggggatgtatgagttgtgcaatgaagatgagcttgaaaaaggtagacattaaatgctggcaatatttcttcaggcttggtctgtacacatgaaaacttaagtagaggaatctgcttccttctaatgaatttgcagccatctcctcagccggagtggttgattcaggcagattctttctgcttgagtggtccaggtaatcgcagaagtgaaacatcactttgcctccttccagaaaccttcagccgcttcccccttaatcgtttctttgaaatgcttagttttcatttctctttttcatcttttaggtcccaccttgttttaaagatacagtcaatataggaggcatgccaagctatcttatccacattcaacacaattataatgaaagtaaaccagctctggaagacagttcccagaaattaattatcgcacagaaagtgaacacaacagccttttgttatcatgataatgaaatcaccaccaccttaatacttgacaaacttggccatgcctctgttgaatttctgctgaataaactggaaaaatgttgc

SEQ ID NO: 418691 - DNA, 874 bp, Homo sapiens
atgggagcactcctgcaaagaaaatcagaagttcaagtcgcatatatgggaagtttcatggatacggaccagaggaaaacagtttctcaaggacgtgcagcgattctaaacctgctgcccatcaccagctaccccagacctcaagtgacttggtttagagaagggcacaagattattccaagcaacagaatagccatcacattggagaatcagctggtgatcctcgccaccacaaccagtgatgccggggcatactacgtgcaggccgtgaatgagaaaaatggagaaaacaagacaagcccattcattcatttgagcatagcaagagatgttggcacacctgaaaccatggccccaaccattgtggttcccccgggcaacagaagtgtggtggctggatccagtgagaccaccttggaatgtatagccagtgccaggcctgtggaggacctgagtgtgacctggaagaggaatggagtgagaatcaccagtggcctccacagctttggaagacgcctcaccatcagcaacccgacgtccgcggacaccgggccatacgtctgcgaggcggcgctgccggggagcgcttttgaaccggccagggcgacggcctttcttttcatcataggtcccaccttgttttaaagatacagtcaatataggaggcatgccaagctatcttatccacattcaacacaattataatgaaagtaaaccagctctggaagacagttcccagaaattaattatcgcacagaaagtgaacacaacagccttttgttatcatgataatgaaatcaccaccaccttaatacttgacaaacttggccatgcctctgttgaatttctgctgaataaactggaaaaatgttgc

SEQ ID NO: 418692 - DNA, 2430 bp, Homo sapiens
atcgcccccgcccgccgcgcagcttccccgagcgagaccaaaacaggtggaatccgggctggagccggagctccggcggcgcgggtggcggcacgtccctccagacagtaccacaggcacctggagtaccggcatcggtcgctgtggcccccgagtgtccgtcagagcctaggggagcctgccctcccgcgcctcgtcggggcccggccaggcaccttggccgccggcgcacggacgcgggcacgagcactagatcacggctgctggacctcggcacgttgacaagatttctctggggtaccgcggaggattactttgaatttcggtggtcgcctgtggtctggcatatttagaacttaagtctattatttcgggcaccatgactttgaggcttttagaagactggtgcagggggatggacatgaaccctcggaaagcgctattgattgccggcatctcccagagctgcagtgtggcagaaatcgaggaggctctgcaggctggtttagctcccttgggggagtacagactgcttggaaggatgttcaggagggatgagaacaggaaagtagccttagtagggcttactgcggagactagtcacgccctggtccctaaggagataccgggaaaagggggtatctggagagtgatctttaagccccctgacccagataatacatttttaagcagattaaatgaatttttagcgggagagggcatgacagtgggtgagttgagcagagctcttggacatgaaaatggctccttagacccagagcagggcatgatcccggaaatgtgggcccctatgttggcacaggcattagaggctcttcagcctgccctgcaatgcttgaagtataaaaagctgagagtgttctcgggcagggagtctccagaaccaggagaagaagaatttggacgctggatgtttcatactactcagatgataaaggcgtggcaggtgccagatgtagagaagagaaggcgattgctagagagccttcgaggcccagcacttgatgttattcgtgtcctcaagataaacaatcctttaattactgtcgatgaatgtctgcaggctcttgaggaggtatttggggttacagataatcctagggagttgcaggtcaaatatctaaccacttaccagaaggatgaggaaaagttgtcggcttatgtactaaggctggagcctttgttacagaagctggtacagagaggagcaattgagagagatgctgtgaatcaggcccgcctagaccaagtcattgctggggcagtccacaaaacaattcgcagagagcttaatctgccagaggatggcccagcccctggtttcttgcagttattggtactaataaaggattatgaggcagctgaggaggaggaggcccttctccaggcaatattggaaggtaatttcacctgagtctcagggaaccacgaagggatatggcaacgagtagagcatgaaggtagaacagtctatatactcttgtgacacatacaatccctaccttgtgctgccaagtaactcatttttgtgcaattctcagtataagccctttgtcgtttctatgcctatttaaagtctcctaaaggtgtaattgactaggaaggatgtagttctacactgccatttacctatttaaattcatccttgtgaatatctttgttgttgttgttgagacagagtctcgctctgtcacccaggctggagtgcagtggcgtgatcttggctcactgcatcctccgccttccaggtttaagctattctcctgcctcagttgcccgagtagctgggactacaggcatgtgccaccacgcccagctaagttttgcattatcagtagagacggggtttcaccatgttggccaggctagtttcgaactcctgacctcaagtgatccacctgcttcggcctctgaaagtgctgggattacaggcgtgagacactgcgcccagcctcatccctgtgaatttcttattgtacacaagttctttcactatctgtgtgcagtgctctgaggggacagacaaggcttgggtgtatatgccaaccagatctcattgaagtatcagcttgtttggtactaggtgcaagtgtagcatgtcacatgtgaccatgttggatcattgacaatttttaggtatgtactgacctacatttatgatgaagatcctgagcggaggttaagatattaagttattttccatatgaatcagaattatattgattctgtgcaatcaaaacaaaaggcagaatagaatgctgagattggttaagtttgcaatgaccatcttgaaccacagatttctgctatgtgtcatcaaaacatctagttctgagtaacattttcacgattgttataaaattataggtgtgaacttctaaaataaaggaatgctaataaaatgacttt

SEQ ID NO: 418693 - DNA, 467 bp, Homo sapiens
tatgtggcttgccagttatcccagcaccatttgttgaaaagggtgtcctttccccactttatgattttgtttgctttgttgaagaagagttggctgtaagtatttgggtttatttctgggttgtttattctgtttcactggtttatgtgcctatttttataccagtaccatgttggatcattgacaatttttaggtatgtactgacctacatttatgatgaagatcctgagcggaggttaagatattaagttattttccatatgaatcagaattatattgattctgtgcaatcaaaacaaaaggcagaatagaatgctgagattggttaagtttgcaatgaccatcttgaaccacagatttctgctatgtgtcatcaaaacatctagttctgagtaacattttcacgattgttataaaattataggtgtgaacttctaaaataaaggaatgctaataaaatgacttt

SEQ ID NO: 418694 - DNA, 2526 bp, Homo sapiens
atcgcccccgcccgccgcgcagcttccccgagcgagaccaaaacaggtggaatccgggctggagccggagctccggcggcgcgggtggcggcacgtccctccaggtgggtggctctctgggtctggcgactcagcgctcctcagccttgccccctggtgcccgctcgcgactgtcatcgccccatcacttctcgttgcagacagtaccacaggcacctggagtaccggcatcggtcgctgtggcccccgagtgtccgtcagagcctaggggagcctgccctcccgcgcctcgtcggggcccggccaggcaccttggccgccggcgcacggacgcgggcacgagcactagatcacggctgctggacctcggcacgttgacaagatttctctggggtaccgcggaggattactttgaatttcggtggtcgcctgtggtctggcatatttagaacttaagtctattatttcgggcaccatgactttgaggcttttagaagactggtgcagggggatggacatgaaccctcggaaagcgctattgattgccggcatctcccagagctgcagtgtggcagaaatcgaggaggctctgcaggctggtttagctcccttgggggagtacagactgcttggaaggatgttcaggagggatgagaacaggaaagtagccttagtagggcttactgcggagactagtcacgccctggtccctaaggagataccgggaaaagggggtatctggagagtgatctttaagccccctgacccagataatacatttttaagcagattaaatgaatttttagcgggagagggcatgacagtgggtgagttgagcagagctcttggacatgaaaatggctccttagacccagagcagggcatgatcccggaaatgtgggcccctatgttggcacaggcattagaggctcttcagcctgccctgcaatgcttgaagtataaaaagctgagagtgttctcgggcagggagtctccagaaccaggagaagaagaatttggacgctggatgtttcatactactcagatgataaaggcgtggcaggtgccagatgtagagaagagaaggcgattgctagagagccttcgaggcccagcacttgatgttattcgtgtcctcaagataaacaatcctttaattactgtcgatgaatgtctgcaggctcttgaggaggtatttggggttacagataatcctagggagttgcaggtcaaatatctaaccacttaccagaaggatgaggaaaagttgtcggcttatgtactaaggctggagcctttgttacagaagctggtacagagaggagcaattgagagagatgctgtgaatcaggcccgcctagaccaagtcattgctggggcagtccacaaaacaattcgcagagagcttaatctgccagaggatggcccagcccctggtttcttgcagttattggtactaataaaggattatgaggcagctgaggaggaggaggcccttctccaggcaatattggaaggtaatttcacctgagtctcagggaaccacgaagggatatggcaacgagtagagcatgaaggtagaacagtctatatactcttgtgacacatacaatccctaccttgtgctgccaagtaactcatttttgtgcaattctcagtataagccctttgtcgtttctatgcctatttaaagtctcctaaaggtgtaattgactaggaaggatgtagttctacactgccatttacctatttaaattcatccttgtgaatatctttgttgttgttgttgagacagagtctcgctctgtcacccaggctggagtgcagtggcgtgatcttggctcactgcatcctccgccttccaggtttaagctattctcctgcctcagttgcccgagtagctgggactacaggcatgtgccaccacgcccagctaagttttgcattatcagtagagacggggtttcaccatgttggccaggctagtttcgaactcctgacctcaagtgatccacctgcttcggcctctgaaagtgctgggattacaggcgtgagacactgcgcccagcctcatccctgtgaatttcttattgtacacaagttctttcactatctgtgtgcagtgctctgaggggacagacaaggcttgggtgtatatgccaaccagatctcattgaagtatcagcttgtttggtactaggtgcaagtgtagcatgtcacatgtgaccatgttggatcattgacaatttttaggtatgtactgacctacatttatgatgaagatcctgagcggaggttaagatattaagttattttccatatgaatcagaattatattgattctgtgcaatcaaaacaaaaggcagaatagaatgctgagattggttaagtttgcaatgaccatcttgaaccacagatttctgctatgtgtcatcaaaacatctagttctgagtaacattttcacgattgttataaaattataggtgtgaacttctaaaataaaggaatgctaataaaatgacttt

SEQ ID NO: 418695 - DNA, 2365 bp, Homo sapiens
atcgcccccgcccgccgcgcagcttccccgagcgagaccaaaacaggtggaatccgggctggagccggagctccggcggcgcgggtggcggcacgtccctccagacagtaccacaggcacctggagtaccggcatcggtcgctgtggcccccgagtgtccgtcagagcctaggggagcctgccctcccgcgcctcgtcggggcccggccaggcaccttggccgccggcgcacggacgcgggcacgagcactagatcacggctgctggacctcggcacgttgacaagatttctctggggtaccgcggaggattactttgaatttcggtggtcgcctgtggtctggcatatttagaacttaagtctattatttcgggcaccatgactttgaggcttttagaagactggtgcagggggatggacatgaaccctcggaaagcgctattgattgccggcatctcccagagctgcagtgtggcagaaatcgaggaggctctgcaggctggtttagctcccttgggggagtacagactgcttggaaggatgttcaggagggatgagaacaggaaagtagccttagtagggcttactgcggagactagtcacgccctggtccctaaggagataccgggaaaagggggtatctggagagtgatctttaagccccctgacccagataatacatttttaagcagattaaatgaatttttagcgggagaggggcatgatcccggaaatgtgggcccctatgttggcacaggcattagaggctcttcagcctgccctgcaatgcttgaagtataaaaagctgagagtgttctcgggcagggagtctccagaaccaggagaagaagaatttggacgctggatgtttcatactactcagatgataaaggcgtggcaggtgccagatgtagagaagagaaggcgattgctagagagccttcgaggcccagcacttgatgttattcgtgtcctcaagataaacaatcctttaattactgtcgatgaatgtctgcaggctcttgaggaggtatttggggttacagataatcctagggagttgcaggtcaaatatctaaccacttaccagaaggatgaggaaaagttgtcggcttatgtactaaggctggagcctttgttacagaagctggtacagagaggagcaattgagagagatgctgtgaatcaggcccgcctagaccaagtcattgctggggcagtccacaaaacaattcgcagagagcttaatctgccagaggatggcccagcccctggtttcttgcagttattggtactaataaaggattatgaggcagctgaggaggaggaggcccttctccaggcaatattggaaggtaatttcacctgagtctcagggaaccacgaagggatatggcaacgagtagagcatgaaggtagaacagtctatatactcttgtgacacatacaatccctaccttgtgctgccaagtaactcatttttgtgcaattctcagtataagccctttgtcgtttctatgcctatttaaagtctcctaaaggtgtaattgactaggaaggatgtagttctacactgccatttacctatttaaattcatccttgtgaatatctttgttgttgttgttgagacagagtctcgctctgtcacccaggctggagtgcagtggcgtgatcttggctcactgcatcctccgccttccaggtttaagctattctcctgcctcagttgcccgagtagctgggactacaggcatgtgccaccacgcccagctaagttttgcattatcagtagagacggggtttcaccatgttggccaggctagtttcgaactcctgacctcaagtgatccacctgcttcggcctctgaaagtgctgggattacaggcgtgagacactgcgcccagcctcatccctgtgaatttcttattgtacacaagttctttcactatctgtgtgcagtgctctgaggggacagacaaggcttgggtgtatatgccaaccagatctcattgaagtatcagcttgtttggtactaggtgcaagtgtagcatgtcacatgtgaccatgttggatcattgacaatttttaggtatgtactgacctacatttatgatgaagatcctgagcggaggttaagatattaagttattttccatatgaatcagaattatattgattctgtgcaatcaaaacaaaaggcagaatagaatgctgagattggttaagtttgcaatgaccatcttgaaccacagatttctgctatgtgtcatcaaaacatctagttctgagtaacattttcacgattgttataaaattataggtgtgaacttctaaaataaaggaatgctaataaaatgacttt

SEQ ID NO: 418696 - DNA, 2257 bp, Homo sapiens
agttcgacggagactctctattcacatgtgggaatagagagtaggtggggagaggcaaaggtgggaggagttaaagtcaagtcaaaggtaacaaaatgtgaagctgatatgtgaagcttgaaatatctcctgcagattgagagggacactaataaagtgtcttttctaatgacctgccagattacagaagtggaagatgaggtcatggaaagcttctcagacataagggagctaaaatcatttatgtgttaaagaagcattctcggccgggcgcggcggctcacgcctgtaatcccaaagtgttgggattacaggcatgaaccaccacgctcggctgtcaagtttttttacttgagcattttaatcagcttattgttattcctgttttaaagatgacaaaccagagactttgagagtctccgtcgaactagttcgacggagactctcagataccgggaaaagggggtatctggagagtgatctttaagccccctgacccagataatacatttttaagcagattaaatgaatttttagcgggagagggcatgacagtgggtgagttgagcagagctcttggacatgaaaatggctccttagacccagagcagggcatgatcccggaaatgtgggcccctatgttggcacaggcattagaggctcttcagcctgccctgcaatgcttgaagtataaaaagctgagagtgttctcgggcagggagtctccagaaccaggagaagaagaatttggacgctggatgtttcatactactcagatgataaaggcgtggcaggtgccagatgtagagaagagaaggcgattgctagagagccttcgaggcccagcacttgatgttattcgtgtcctcaagataaacaatcctttaattactgtcgatgaatgtctgcaggctcttgaggaggtatttggggttacagataatcctagggagttgcaggtcaaatatctaaccacttaccagaaggatgaggaaaagttgtcggcttatgtactaaggctggagcctttgttacagaagctggtacagagaggagcaattgagagagatgctgtgaatcaggcccgcctagaccaagtcattgctggggcagtccacaaaacaattcgcagagagcttaatctgccagaggatggcccagcccctggtttcttgcagttattggtactaataaaggattatgaggcagctgaggaggaggaggcccttctccaggcaatattggaaggtaatttcacctgagtctcagggaaccacgaagggatatggcaacgagtagagcatgaaggtagaacagtctatatactcttgtgacacatacaatccctaccttgtgctgccaagtaactcatttttgtgcaattctcagtataagccctttgtcgtttctatgcctatttaaagtctcctaaaggtgtaattgactaggaaggatgtagttctacactgccatttacctatttaaattcatccttgtgaatatctttgttgttgttgttgagacagagtctcgctctgtcacccaggctggagtgcagtggcgtgatcttggctcactgcatcctccgccttccaggtttaagctattctcctgcctcagttgcccgagtagctgggactacaggcatgtgccaccacgcccagctaagttttgcattatcagtagagacggggtttcaccatgttggccaggctagtttcgaactcctgacctcaagtgatccacctgcttcggcctctgaaagtgctgggattacaggcgtgagacactgcgcccagcctcatccctgtgaatttcttattgtacacaagttctttcactatctgtgtgcagtgctctgaggggacagacaaggcttgggtgtatatgccaaccagatctcattgaagtatcagcttgtttggtactaggtgcaagtgtagcatgtcacatgtgaccatgttggatcattgacaatttttaggtatgtactgacctacatttatgatgaagatcctgagcggaggttaagatattaagttattttccatatgaatcagaattatattgattctgtgcaatcaaaacaaaaggcagaatagaatgctgagattggttaagtttgcaatgaccatcttgaaccacagatttctgctatgtgtcatcaaaacatctagttctgagtaacattttcacgattgttataaaattataggtgtgaacttctaaaataaaggaatgctaataaaatgacttt

SEQ ID NO: 418697 - DNA, 5450 bp, Homo sapiens
ggggagattcgggaccatggcacctgtgcacggcgacgactctctgtcagattcagggagttttgtatcttctcgagcccggcgagaaaaaaaatcaaagaaggggcgccaagaagccctagaaagactgaaaaaggctaaagctggtgagaagtataaatatgaagtcgaggacttcacaggtgtttatgaagaagttgatgaagaacagtattcgaagctggttcaggcacgccaggatgatgactggattgtggatgatgatggtattggctatgtggaagatggccgagagatttttgatgatgaccttgaagatgatgcccttgatgctgatgagaaaggaaaagatggtaaagcacgcaataaagacaagaggaatgtaaagaagctcgcagtgacaaaaccgaacaacattaagtcaatgttcattgcttgtgctggaaagaaaactgcagataaagctgtagacttgtccaaggatggtctgctaggtgacattctacaggatcttaacactgagacacctcaaataactccaccacctgtaatgatactgaagaagaaaagatccattggagcttcaccgaatcctttctctgtgcacaccgccacggcagttccttcaggaaaaattgcttcccctgtctccagaaaggagcctccattaactcctgttcctcttaaacgtgctgaatttgctggcgatgatgtacaggtcgagagtacagaagaagagcaggagtcaggggcaatggagtttgaagatggtgactttgatgagcccatggaagttgaagaggtggacctggagcctatggctgccaaggcttgggacaaagagagtgagccagcagaggaagtgaaacaagaggcggattctgggaaagggaccgtgtcctacttaggaagttttctcccggatgtctcttgttgggacattgatcaagaaggtgatagcagtttctcagtgcaagaagttcaagtggattccagtcacctcccattggtaaaaggggcagatgaggaacaagtattccacttttattggttggatgcttatgaggatcagtacaaccaaccaggtgtggtatttctgtttgggaaagtttggattgaatcagccgagacccatgtgagctgttgtgtcatggtgaaaaatatcgagcgaacgctttacttccttccccgtgaaatgaaaattgatctaaatacggggaaagaaacaggaactccaatttcaatgaaggatgtttatgaggaatttgatgagaaaatagcaacaaaatataaaattatgaagttcaagtctaagccagtggaaaagaactatgcttttgagatacctgatgttccagaaaaatctgagtacttggaagttaaatactcggctgaaatgccacagcttcctcaagatttgaaaggagaaactttttctcatgtatttgggaccaacacatctagcctggaactgttcttgatgaacagaaagatcaaaggaccttgttggcttgaagtaaaaaagtccacagctcttgaatcagccagtcagttggtgtaaagttgaggcaatggctttgaaaccagacctggtgaatgtaattaaggatgtcagtccaccaccgcttgtcgtgatggctttcagcatgaagacaatgcagaatgcaaagaaccatcaaaatgagattattgctatggcagctttggtccatcacagttttgcattggataaagcagccccaaagcctccctttcagtcacacttctgtgttgtgtctaaaccaaaggactgtatttttccatatgctttcaaagaagtcattgagaaaaagaatgtgaaggttgaggttgctgcaacagaaagaacactgctaggttttttccttgcaaaagttcacaaaattgatcctgatatcattgtgggtcataatatttatgggtttgaactggaagtactactgcagagaattaatgtgtgcaaagctcctcactggtccaagataggtcgactgaagcgatccaacatgccaaagcttgggggccggagtggatttggtgaaagaaatgctacctgtggtcgaatgatctgtgatgtggaaatttcagcaaaggaattgattcgttgtaaaagctaccatctgtctgaacttgttcagcagattctaaaaactgaaagggttgtaatcccaatggaaaatatacaaaatatgtacagtgaatcttctcaactgttatacctgttggaacacacctggaaagatgccaagttcattttgcagatcatgtgtgagctaaatgttcttccattagcattgcagatcactaacatcgctgggaacattatgtccaggacgctgatgggtggacgatccgagcgtaacgagttcttgttgcttcatgcattttacgaaaacaactatattgtgcctgacaagcagattttcagaaagcctcagcaaaaactgggagatgaagatgaagaaattgatggagataccaataaatacaagaaaggacgtaagaaaggagcttatgctggaggcttggttttggaccccaaagttggtttttatgataagttcattttgcttctggacttcaacagtctatatccttccatcattcaggaatttaacatttgttttacaacagtacaaagagttgcttcagaggcacagaaagttacagaggatggagaacaagaacagatccctgagttgccagatccaagcttagaaatgggcattttgcccagagagatccggaaactggtagaacggagaaaacaagtcaaacagctaatgaaacagcaagacttaaatccagaccttattcttcagtatgacattcgacagaaggctttgaagctcacagcgaacagtatgtatggttgcctgggattttcctatagcagattttacgccaaaccactggctgccttggtgacatacaaaggaagggagattttgatgcatacgaaagagatggtacaaaagatgaatcttgaagttatttatggagatacagattcaattatgataaacaccaatagcaccaatctggaagaagtatttaagttgggaaacaaggtaaaaagtgaagtgaataagttgtacaaactgcttgaaatagacattgatggggttttcaagtctctgctactgctgaaaaaaaagaagtacgctgctctggttgttgagccaacgtcggatgggaattatgtcaccaaacaggagctcaaaggattagatatagttagaagagattggtgtgatcttgctaaagacactggaaactttgtgattggccagattctttctgatcaaagccgggacactatagtggaaaacattcagaagaggctgatagaaattggagaaaatgtgctaaatggcagtgtcccagtgagccagtttgaaattaacaaggcattgacaaaggatccccaggattaccctgataaaaaaagcctacctcatgtacatgttgccctctggataaattctcaaggaggcagaaaggtgaaagctggagatactgtgtcatatgtcatctgtcaggatggatcaaacctcactgcaagtcagagggcctatgcgcctgagcagctgcagaaacaggataatctaaccattgacacccagtactacctggcccagcagatccacccagtcgtggctcggatctgtgaaccaatagacggaattgatgctgtcctcattgcaacgtggttgggacttgaccccacccaatttagagttcatcattatcataaagatgaagagaatgatgctctacttggtggcccagcacagctcactgatgaagagaaatacagggactgtgaaagattcaaatgtccatgccctacatgtggaactgagaatatttatgataatgtctttgatggttcgggaacagatatggagcccagcttgtatcgttgcagtaacatcgattgtaaggcttcacctctgacctttacagtacaactgagcaacaaattgatcatggacattagacgtttcattaaaaagtactatgatggctggttgatatgtgaagagccaacctgtcgcaatcgaactcgtcaccttccccttcaattctcccgaactgggcctctttgcccagcctgcatgaaagctacacttcaaccagagtattctgacaagtccctgtacacccagctgtgcttttaccggtacatttttgatgcggagtgtgcactggagaaacttactaccgatcatgagaaagataaattgaagaagcaattttttacccccaaagttctgcaggactacagaaaactcaagaacacagcagagcaattcttgtcccgaagtggctactccgaagtgaatctgagcaaactcttcgctggttgtgccgtgaaatcctaagggaatcccaggagtaaccaaggagggggtagttgaaaaatcccagcttcctctgtgcctccactctggccctaaatgctcctccagcatctgtttctcccttgggactgtgtctcatgtttgtgtgaatgtagaccaggaaagggggctgcaaaaatgttgagtctaatgttcgtaagcatcatagaaattcctgtcttcatattaagatgtactgctttaaaacacaactccagagcccctccccaagctcccctccccaagctcctgaagacccggtttctgagggagggaaattgctacttggattgagagtagctggaatgtaagtgaccccaggctttgcctcagggcctttagcctatgtcccccccacataaagagagcttctcagagcctgactgaagagctgacgttttgctttttcatatgccaattaaacccggtctaaatccaaatgcttctccagccatccaggagtggctgtccttttcagtcttgtcttttatataggtagctgagggggaagatttagaagccttgcactcactaaatagattaaacagagcaggcttgtttgttgaattgctccaaagtccaacagacacacactgagcaggtgttttacactcacattccctttttgccccttaaatagaaagtgcaggtaaaggtttatacaacaagaaagcacattgaaaataatttgatactctaacaatccattaacatgtgtaggggttacggtgaggatcactgtgttgtattcagaaaaacggggagagggatgcttaattggccctggcgcttgctatttttttctcatttcttcacaataggaccgtctttggcagcagcaaaatgtatttcagtatggcagtctttcctctcttacattattggtaagattatactaacaaaatgtttccccttgtacaattatgctgtgtttttaaaaaacattgacctgtgtgtttttataaaagaaaaagtatgttgtgccttcttcttaagaataaagttttctaaagggaaaaaaaatgt

SEQ ID NO: 418698 - DNA, 966 bp, Homo sapiens
  misc_feature (6)..(6): n is a, c, g, or t
agactngaagtaaatactcggctgaaatgccacagcttcctcaagatttgaaaggagaaactttttctcatgtatttgggaccaacacatctagcctggaactgttcttgatgaacagaaagatcaaaggaccttgttggcttgaagtaaaaaagtccacagctcttgaatcagccagtcagttggtgtaaagttgaggcaatggctttgaaaccagacctggtgaatgtaattaaggatgtcagtccaccaccgcttgtcgtgatggctttcagcatgaagacaatgcagaatgcaaagaaccatcaaaatgagattattgctatggcagctttggtccatcacagttttgcattggataaagcagccccaaagcctccctttcagtcacacttctgtgttgtgtctaaaccaaaggactgtatttttccatatgctttcaaagaagtcattgagaaaaaggtaaagtgctcattatatgaagcatctgtttgtttggagcgagaaagaaaaggggggtggtatggactagtagaaaaaaggtgttttatattttattagattcattcctgccagattggactatgacatcgacccattaaaatgtattagacatacacctagaagcattatttaacaatgtttaaatgttttactacctgaaaataatgggattctgtactgtattggtggttggataggctcaaacccccctccaatagcttaattagaagcttctctaaaatgcatgatcatatgattcctgttttgggaaggtgttgggtagagtccctccccagcttgagggaagctaaatgaagttgggaatactgtggacgttaaagagccatgtattgacaaagttgacatggggttggccaaaatggatcagtgatctctaaattccagcgtgctccatgaagaagttttcatgggtccttaataaaatggggaggagtgggaagt

SEQ ID NO: 418699 - DNA, 5570 bp, Homo sapiens
tagtggtcatctccacatactgatcatcctgaaagattcactcatatactagccataatatctatctatactaaatttacagatcttcctccaagtcataccctaagaatcaatgtaaaatcacacctattgcagtttctcttttccatactcctttgggccaaacatggggtataatatatatcatttggttttgactccacacctgctgtgtggatgctgtgcattgtctgacacctgtgtgaacagaattctgctgcacttaaaaatagcacaggccaggaaaacatctgagcaggtataaaaggtttttttggtcatggctaaaatattattggccacttttagaaatttgatcccagtattaaattttgtccctgcagatggtattggctatgtggaagatggccgagagatttttgatgatgaccttgaagatgatgcccttgatgctgatgagaaaggaaaagatggtaaagcacgcaataaagacaagaggaatgtaaagaagctcgcagtgacaaaaccgaacaacattaagtcaatgttcattgcttgtgctggaaagaaaactgcagataaagctgtagacttgtccaaggatggtctgctaggtgacattctacaggatcttaacactgagacacctcaaataactccaccacctgtaatgatactgaagaagaaaagatccattggagcttcaccgaatcctttctctgtgcacaccgccacggcagttccttcaggaaaaattgcttcccctgtctccagaaaggagcctccattaactcctgttcctcttaaacgtgctgaatttgctggcgatgatgtacaggtcgagagtacagaagaagagcaggagtcaggggcaatggagtttgaagatggtgactttgatgagcccatggaagttgaagaggtggacctggagcctatggctgccaaggcttgggacaaagagagtgagccagcagaggaagtgaaacaagaggcggattctgggaaagggaccgtgtcctacttaggaagttttctcccggatgtctcttgttgggacattgatcaagaaggtgatagcagtttctcagtgcaagaagttcaagtggattccagtcacctcccattggtaaaaggggcagatgaggaacaagtattccacttttattggttggatgcttatgaggatcagtacaaccaaccaggtgtggtatttctgtttgggaaagtttggattgaatcagccgagacccatgtgagctgttgtgtcatggtgaaaaatatcgagcgaacgctttacttccttccccgtgaaatgaaaattgatctaaatacggggaaagaaacaggaactccaatttcaatgaaggatgtttatgaggaatttgatgagaaaatagcaacaaaatataaaattatgaagttcaagtctaagccagtggaaaagaactatgcttttgagatacctgatgttccagaaaaatctgagtacttggaagttaaatactcggctgaaatgccacagcttcctcaagatttgaaaggagaaactttttctcatgtatttgggaccaacacatctagcctggaactgttcttgatgaacagaaagatcaaaggaccttgttggcttgaagtaaaaaagtccacagctcttgaatcagccagtcagttggtgtaaagttgaggcaatggctttgaaaccagacctggtgaatgtaattaaggatgtcagtccaccaccgcttgtcgtgatggctttcagcatgaagacaatgcagaatgcaaagaaccatcaaaatgagattattgctatggcagctttggtccatcacagttttgcattggataaagcagccccaaagcctccctttcagtcacacttctgtgttgtgtctaaaccaaaggactgtatttttccatatgctttcaaagaagtcattgagaaaaagaatgtgaaggttgaggttgctgcaacagaaagaacactgctaggttttttccttgcaaaagttcacaaaattgatcctgatatcattgtgggtcataatatttatgggtttgaactggaagtactactgcagagaattaatgtgtgcaaagctcctcactggtccaagataggtcgactgaagcgatccaacatgccaaagcttgggggccggagtggatttggtgaaagaaatgctacctgtggtcgaatgatctgtgatgtggaaatttcagcaaaggaattgattcgttgtaaaagctaccatctgtctgaacttgttcagcagattctaaaaactgaaagggttgtaatcccaatggaaaatatacaaaatatgtacagtgaatcttctcaactgttatacctgttggaacacacctggaaagatgccaagttcattttgcagatcatgtgtgagctaaatgttcttccattagcattgcagatcactaacatcgctgggaacattatgtccaggacgctgatgggtggacgatccgagcgtaacgagttcttgttgcttcatgcattttacgaaaacaactatattgtgcctgacaagcagattttcagaaagcctcagcaaaaactgggagatgaagatgaagaaattgatggagataccaataaatacaagaaaggacgtaagaaaggagcttatgctggaggcttggttttggaccccaaagttggtttttatgataagttcattttgcttctggacttcaacagtctatatccttccatcattcaggaatttaacatttgttttacaacagtacaaagagttgcttcagaggcacagaaagttacagaggatggagaacaagaacagatccctgagttgccagatccaagcttagaaatgggcattttgcccagagagatccggaaactggtagaacggagaaaacaagtcaaacagctaatgaaacagcaagacttaaatccagaccttattcttcagtatgacattcgacagaaggctttgaagctcacagcgaacagtatgtatggttgcctgggattttcctatagcagattttacgccaaaccactggctgccttggtgacatacaaaggaagggagattttgatgcatacgaaagagatggtacaaaagatgaatcttgaagttatttatggagatacagattcaattatgataaacaccaatagcaccaatctggaagaagtatttaagttgggaaacaaggtaaaaagtgaagtgaataagttgtacaaactgcttgaaatagacattgatggggttttcaagtctctgctactgctgaaaaaaaagaagtacgctgctctggttgttgagccaacgtcggatgggaattatgtcaccaaacaggagctcaaaggattagatatagttagaagagattggtgtgatcttgctaaagacactggaaactttgtgattggccagattctttctgatcaaagccgggacactatagtggaaaacattcagaagaggctgatagaaattggagaaaatgtgctaaatggcagtgtcccagtgagccagtttgaaattaacaaggcattgacaaaggatccccaggattaccctgataaaaaaagcctacctcatgtacatgttgccctctggataaattctcaaggaggcagaaaggtgaaagctggagatactgtgtcatatgtcatctgtcaggatggatcaaacctcactgcaagtcagagggcctatgcgcctgagcagctgcagaaacaggataatctaaccattgacacccagtactacctggcccagcagatccacccagtcgtggctcggatctgtgaaccaatagacggaattgatgctgtcctcattgcaacgtggttgggacttgaccccacccaatttagagttcatcattatcataaagatgaagagaatgatgctctacttggtggcccagcacagctcactgatgaagagaaatacagggactgtgaaagattcaaatgtccatgccctacatgtggaactgagaatatttatgataatgtctttgatggttcgggaacagatatggagcccagcttgtatcgttgcagtaacatcgattgtaaggcttcacctctgacctttacagtacaactgagcaacaaattgatcatggacattagacgtttcattaaaaagtactatgatggctggttgatatgtgaagagccaacctgtcgcaatcgaactcgtcaccttccccttcaattctcccgaactgggcctctttgcccagcctgcatgaaagctacacttcaaccagagtattctgacaagtccctgtacacccagctgtgcttttaccggtacatttttgatgcggagtgtgcactggagaaacttactaccgatcatgagaaagataaattgaagaagcaattttttacccccaaagttctgcaggactacagaaaactcaagaacacagcagagcaattcttgtcccgaagtggctactccgaagtgaatctgagcaaactcttcgctggttgtgccgtgaaatcctaagggaatcccaggagtaaccaaggagggggtagttgaaaaatcccagcttcctctgtgcctccactctggccctaaatgctcctccagcatctgtttctcccttgggactgtgtctcatgtttgtgtgaatgtagaccaggaaagggggctgcaaaaatgttgagtctaatgttcgtaagcatcatagaaattcctgtcttcatattaagatgtactgctttaaaacacaactccagagcccctccccaagctcccctccccaagctcctgaagacccggtttctgagggagggaaattgctacttggattgagagtagctggaatgtaagtgaccccaggctttgcctcagggcctttagcctatgtcccccccacataaagagagcttctcagagcctgactgaagagctgacgttttgctttttcatatgccaattaaacccggtctaaatccaaatgcttctccagccatccaggagtggctgtccttttcagtcttgtcttttatataggtagctgagggggaagatttagaagccttgcactcactaaatagattaaacagagcaggcttgtttgttgaattgctccaaagtccaacagacacacactgagcaggtgttttacactcacattccctttttgccccttaaatagaaagtgcaggtaaaggtttatacaacaagaaagcacattgaaaataatttgatactctaacaatccattaacatgtgtaggggttacggtgaggatcactgtgttgtattcagaaaaacggggagagggatgcttaattggccctggcgcttgctatttttttctcatttcttcacaataggaccgtctttggcagcagcaaaatgtatttcagtatggcagtctttcctctcttacattattggtaagattatactaacaaaatgtttccccttgtacaattatgctgtgtttttaaaaaacattgacctgtgtgtttttataaaagaaaaagtatgttgtgccttcttcttaagaataaagttttctaaagggaaaaaaaatgt

SEQ ID NO: 418700 - DNA, 2906 bp, Homo sapiens
gacgtggctttttaatttcaggtttttatgataagttcattttgcttctggacttcaacagtctatatccttccatcattcaggaatttaacatttgttttacaacagtacaaagagttgcttcagaggcacagaaagttacagaggatggagaacaagaacagatccctgagttgccagatccaagcttagaaatgggcattttgcccagagagatccggaaactggtagaacggagaaaacaagtcaaacagctaatgaaacagcaagacttaaatccagaccttattcttcagtatgacattcgacagaaggctttgaagctcacagcgaacagtatgtatggttgcctgggattttcctatagcagattttacgccaaaccactggctgccttggtgacatacaaaggaagggagattttgatgcatacgaaagagatggtacaaaagatgaatcttgaagttatttatggagatacagattcaattatgataaacaccaatagcaccaatctggaagaagtatttaagttgggaaacaaggtaaaaagtgaagtgaataagttgtacaaactgcttgaaatagacattgatggggttttcaagtctctgctactgctgaaaaaaaagaagtacgctgctctggttgttgagccaacgtcggatgggaattatgtcaccaaacaggagctcaaaggattagatatagttagaagagattggtgtgatcttgctaaagacactggaaactttgtgattggccagattctttctgatcaaagccgggacactatagtggaaaacattcagaagaggctgatagaaattggagaaaatgtgctaaatggcagtgtcccagtgagccagtttgaaattaacaaggcattgacaaaggatccccaggattaccctgataaaaaaagcctacctcatgtacatgttgccctctggataaattctcaaggaggcagaaaggtgaaagctggagatactgtgtcatatgtcatctgtcaggatggatcaaacctcactgcaagtcagagggcctatgcgcctgagcagctgcagaaacaggataatctaaccattgacacccagtactacctggcccagcagatccacccagtcgtggctcggatctgtgaaccaatagacggaattgatgctgtcctcattgcaacgtggttgggacttgaccccacccaatttagagttcatcattatcataaagatgaagagaatgatgctctacttggtggcccagcacagctcactgatgaagagaaatacagggactgtgaaagattcaaatgtccatgccctacatgtggaactgagaatatttatgataatgtctttgatggttcgggaacagatatggagcccagcttgtatcgttgcagtaacatcgattgtaaggcttcacctctgacctttacagtacaactgagcaacaaattgatcatggacattagacgtttcattaaaaagtactatgatggctggttgatatgtgaagagccaacctgtcgcaatcgaactcgtcaccttccccttcaattctcccgaactgggcctctttgcccagcctgcatgaaagctacacttcaaccagagtattctgacaagtccctgtacacccagctgtgcttttaccggtacatttttgatgcggagtgtgcactggagaaacttactaccgatcatgagaaagataaattgaagaagcaattttttacccccaaagttctgcaggactacagaaaactcaagaacacagcagagcaattcttgtcccgaagtggctactccgaagtgaatctgagcaaactcttcgctggttgtgccgtgaaatcctaagggaatcccaggagtaaccaaggagggggtagttgaaaaatcccagcttcctctgtgcctccactctggccctaaatgctcctccagcatctgtttctcccttgggactgtgtctcatgtttgtgtgaatgtagaccaggaaagggggctgcaaaaatgttgagtctaatgttcgtaagcatcatagaaattcctgtcttcatattaagatgtactgctttaaaacacaactccagagcccctccccaagctcccctccccaagctcctgaagacccggtttctgagggagggaaattgctacttggattgagagtagctggaatgtaagtgaccccaggctttgcctcagggcctttagcctatgtcccccccacataaagagagcttctcagagcctgactgaagagctgacgttttgctttttcatatgccaattaaacccggtctaaatccaaatgcttctccagccatccaggagtggctgtccttttcagtcttgtcttttatataggtagctgagggggaagatttagaagccttgcactcactaaatagattaaacagagcaggcttgtttgttgaattgctccaaagtccaacagacacacactgagcaggtgttttacactcacattccctttttgccccttaaatagaaagtgcaggtaaaggtttatacaacaagaaagcacattgaaaataatttgatactctaacaatccattaacatgtgtaggggttacggtgaggatcactgtgttgtattcagaaaaacggggagagggatgcttaattggccctggcgcttgctatttttttctcatttcttcacaataggaccgtctttggcagcagcaaaatgtatttcagtatggcagtctttcctctcttacattattggtaagattatactaacaaaatgtttccccttgtacaattatgctgtgtttttaaaaaacattgacctgtgtgtttttataaaagaaaaagtatgttgtgccttcttcttaagaataaagttttctaaagggaaaaaaaatgt

SEQ ID NO: 418701 - DNA, 4647 bp, Homo sapiens
ggggagattcgggaccatggcacctgtgcacggcgacgactctctgtcagattcagggagttttgtatcttctcgagcccggcgagaaaaaaaatcaaagaaggggcgccaagaagccctagaaagactgaaaaaggctaaagctggtgagaagtataaatatgaagtcgaggacttcacaggtgtttatgaagaagttgatgaagaacagtattcgaagctggttcaggcacgccaggatgatgactggattgtggatgatgatggtattggctatgtggaagatggccgagagatttttgatgatgaccttgaagatgatgcccttgatgctgatgagaaaggaaaagatggtaaagcacgcaataaagacaagaggaatgtaaagaagctcgcagtgacaaaaccgaacaacattaagtcaatgttcattgcttgtgctggaaagaaaactgcagataaagctgtagacttgtccaaggatggtctgctaggtgacattctacaggatcttaacactgagacacctcaaataactccaccacctgtaatgatactgaagaagaaaagatccattggagcttcaccgaatcctttctctgtgcacaccgccacggcagttccttcaggaaaaattgcttcccctgtctccagaaaggagcctccattaactcctgttcctcttaaacgtgctgaatttgctggcgatgatgtacaggtcgagagtacagaagaagagcaggagtcaggggcaatggagtttgaagatggtgactttgatgagcccatggaagttgaagaggtggacctggagcctatggctgccaaggcttgggacaaagagagtgagccagcagaggaagtgaaacaagaggcggattctgggaaagggaccgtgtcctacttaggaagttttctcccggatgtctcttgttgggacattgatcaagaaggtgatagcagtttctcagtgcaagaagttcaagtggattccagtcacctcccattggtaaaaggggcagatgaggaacaagtattccacttttattggttggatgcttatgaggatcagtacaaccaaccaggtgtggtatttctgtttgggaaagtttggattgaatcagccgagacccatgtgagctgttgtgtcatggtgaaaaatatcgagcgaacgctttacttccttccccgtgaaatgaaaattgatctaaatacggggaaagaaacaggaactccaatttcaatgaaggatgtttatgaggaatttgatgagaaaatagcaacaaaatataaaattatgaagttcaagtctaagccagtggaaaagaactatgcttttgagatacctgatgttccagaaaaatctgagtacttggaagttaaatactcggctgaaatgccacagcttcctcaagatttgaaaggagaaactttttctcatgtatttgggaccaacacatctagcctggaactgttcttgatgaacagaaagatcaaaggaccttgttggcttgaagtaaaaaagtccacagctcttgaatcagccagtcagttggtgtaaagttgaggcaatggctttgaaaccagacctggtgaatgtaattaaggatgtcagtccaccaccgcttgtcgtgatggctttcagcatgaagacaatgcagaatgcaaagaaccatcaaaatgagattattgctatggcagctttggtccatcacagttttgcattggataaagcagccccaaagcctccctttcagtcacacttctgtgttgtgtctaaaccaaaggactgtatttttccatatgctttcaaagaagtcattgagaaaaagaatgtgaaggttgaggttgctgcaacagaaagaacactgctaggttttttccttgcaaaagttcacaaaattgatcctgatatcattgtgggtcataatatttatgggtttgaactggaagtactactgcagagaattaatgtgtgcaaagctcctcactggtccaagataggtcgactgaagcgatccaacatgccaaagcttgggggccggagtggatttggtgaaagaaatgctacctgtggtcgaatgatctgtgatgtggaaatttcagcaaaggaattgattcgttgtaaaagctaccatctgtctgaacttgttcagcagattctaaaaactgaaagggttgtaatcccaatggaaaatatacaaaatatgtacagtgaatcttctcaactgttatacctgttggaacacacctggaaagatgccaagttcattttgcagatcatgtgtgagctaaatgttcttccattagcattgcagatcactaacatcgctgggaacattatgtccaggacgctgatgggtggacgatccgagcgtaacgagttcttgttgcttcatgcattttacgaaaacaactatattgtgcctgacaagcagattttcagaaagcctcagcaaaaactgggagatgaagatgaagaaattgatggagataccaataaatacaagaaaggacgtaagaaaggagcttatgctggaggcttggttttggaccccaaagttggtttttatgataagttcattttgcttctggacttcaacagtctatatccttccatcattcaggaatttaacatttgttttacaacagtacaaagagttgcttcagaggcacagaaagttacagaggatggagaacaagaacagatccctgagttgccagatccaagcttagaaatgggcattttgcccagagagatccggaaactggtagaacggagaaaacaagtcaaacagctaatgaaacagcaagacttaaatccagaccttattcttcagtatgacattcgacagaaggctttgaagctcacagcgaacagtatgtatggttgcctgggattttcctatagcagattttacgccaaaccactggctgccttggtgacatacaaaggaagggagattttgatgcatacgaaagagatggtacaaaagatgaatcttgaagttatttatggagatacagattcaattatgataaacaccaatagcaccaatctggaagaagtatttaagttgggaaacaaggtaaaaagtgaagtgaataagttgtacaaactgcttgaaatagacattgatggggttttcaagtctctgctactgctgaaaaaaaagaagtacgctgctctggttgttgagccaacgtcggatgggaattatgtcaccaaacaggagctcaaaggattagatatagttagaagagattggtgtgatcttgctaaagacactggaaactttgtgattggccagattctttctgatcaaagccgggacactatagtggaaaacattcagaagaggctgatagaaattggagaaaatgtgctaaatggcagtgtcccagtgagccagtttgaaattaacaaggcattgacaaaggatccccaggattaccctgataaaaaaagcctacctcatgtacatgttgccctctggataaattctcaaggaggcagaaaggtgaaagctggagatactgtgtcatatgtcatctgtcaggatggatcaaacctcactgcaagtcagagggcctatgcgcctgagcagctgcagaaacaggataatctaaccattgacacccagtactacctggcccagcagatccacccagtcgtggctcggatctgtgaaccaatagacggaattgatgctgtcctcattgcaacgtggttgggacttgaccccacccaatttagagttcatcattatcataaagatgaagagaatgatgctctacttggtggcccagcacagctcactgatgaagagaaatacagggactgtgaaagattcaaatgtccatgccctacatgtggaactgagaatatttatgataatgtctttgatggttcggttagttgtttctgtctttcattttgtgagtgaacttgtataaaggccttacccccttcccccactatggggtatataaaaagggcgaaataaacacacacatgttgctttcatgtgtttaaagaattttagcatcatgtgaaatctaccttcacagcttgcttttatttctgtttgaaaactcttacttgaatgtgcttgaatattgttttggcttcctagagtgcttgaccttggtttttaagtggaatcccttaaaaattctaaattatcttaaagtatttttattataatttcttaattagtaacctgtattgtcccactgtcaacccccatctattaagacttagaccaatatttttccttatcttaaatcaagttactgggaactaagtgttttgggaaagtttgtgtttgtctttacacatcccacttacctccattttgcaaaggtactcttatcttttctgctgtctttgcatattagacatttaaaaagtcacagggagacattcctttcaagaagtactgccaaaaaatgtattattgaccttggatcagagcttgaaacttggccaatttacttgatttccactgcagtgttatgcatgtactagccattggcaaaggaataggcagcagaactgtgtaaaaccttgaaactgaaagaaaagacgccctttatctaaattaaaagtaattattttaagttaatttggacaaacagcagatg

SEQ ID NO: 418702 - DNA, 295 bp, Homo sapiens
ctttgtgattggccagattctttctgatcaaagccgggacactatagtggaaaacattcagaagaggctgatagaaattggagaaaatgtgctaaatggcagtgtcccagtgagccagtttgaaattaacaaggtaaatgtagcatttattgctgagcccagctgctgtcatgtgtttttcacctccttcagatagttgaagaaccacctcatccttgcaattgaaataaattctagctggtgatgaaagctgcttaacaactatctcacagattgagtattagcatacctcttc

SEQ ID NO: 418703 - DNA, 490 bp, Homo sapiens
tgaatcttctcaactgttatacctgttggaacacacctggaaagatgccaagttcattttgcagatcatgtgtgagctaaatgttcttccattagcattgcagatcactaacatcgctgggaacattatggtaaatttaacttagaaagggggaaaaagcatttcctgttggattcagtgtttgcttggggtagttgttatatgataatgagtctaaatgcatgcttataaaatgagtaacttggattctgaaagctggatttcttttgtaaaaggaagaactggttgggagaaggggaggaatgccaggtgcagcgtgttgaaatttgggtgaacatacggatcatctctctaacatctggatgtgtctttttagtggaatggtccatttgggagtaaataaatagccaagttgtcaatattttaagctctctttgtctcctttagctataatgcttaaagaaaacgttaggaataatttagtaccttt

SEQ ID NO: 418704 - DNA, 1622 bp, Homo sapiens
ggcgggaagccagtggggcgttgtttcgtccgatatccgcgtttcagtctccgcccatacccctccgggttaggcggctgtagcggagctcgaaaagagtggcgcagggtcgcgcggccccgcctccttccccgcccagcgaagctctctgaccacccctcttttctagagttctgcctcgcttcccggcgcggtcgcagccctcagcccacttaggataatggcgacagctgaggtactgaacattggtaaaaaattatatgagggtaaaacaaaagaagtctacgaattgttagacagtccaggaaaagtcctcctgcagtccaaggaccagattacagcaggaaatgcagctagaaaaaaccacctggaaggaaaagctgcaatctcaaataaaatcaccagttgtatttttcagttattacaggaagcaggtattaaaactgccttcaccagaaaatgtggggagacagctttcattgcaccgcagtgtgaaatgattccaattgaatgggtttgcagaagaatagcaactggttcttttctcaaaagaaatcctggtgtcaaggaaggatataagttttacccacctaaagtggagttgtttttcaaggatgatgccaataatgacccacagtggtctgaggaacagctgattgctgcaaaattttgctttgctggacttcttataggccagactgaagtggatatcatgagtcatgctacacaggctatatttgaaatactggagaaatcctggttgccccagaattgtacactggttgatatgaagattgaatttggtgttgatgtaaccaccaaagaaattgttcttgctgatgttattgacaatgattcctggagactctggccatcaggagatcgaagccaacagaaagacaaacagtcttatcgggacctcaaagaagtaactcctgaagggctccaaatggtaaagaaaaactttgagtgggttgcagagagagtagagttgcttttgaaatcagaaagtcagtgcagggttgtagtgttgatgggctctacttctgatcttggtcactgtgaaaaaatcaagaaggcctgtggaaattttggcattccatgtgaacttcgagtaacatctgcgcataaaggaccagatgaaactctgaggattaaagctgagtatgaaggggatggcattcctactgtatttgtggcagtggcaggcagaagtaatggtttgggaccagtgatgtctgggaacactgcatatccagttatcagctgtcctcccctcacaccagactggggagttcaggatgtgtggtcttctcttcgactacccagtggtcttggctgttcaaccgtactttctccagaaggatcagctcaatttgctgctcagatatttgggttaagcaaccatttggtatggagcaaactgcgagcaagcattttgaacacatggatttccttgaagcaggctgacaagaaaatcagagaatgtaatttataagaaagaatgccattgaattttttaggggaaaaactacaaatttctaatttagctgaaggaaaatcaagcaagatgaaaaggtaattttaaattagagaacacaaataaaatgtattagtgaata

SEQ ID NO: 418705 - DNA, 645 bp, Homo sapiens
gctgtccatgaaaccttctgtaaccacagtgactacaagtagttctttctctattgaattattaggtccagaatagaacccctgtctctactaaaaatacaaaaagtagccagccgtgatgacaggcacctgtaatcccagctactcgggaggctgaggcatgagaattgcttgaacccgggaggcggaggttgcagtgagcctggatcatgccactgcactccaacctgggcagcagagcaagactctgtctcaaaaggggaaaaaaaaaattgctgatgtgacccatgaagggaactcattttcctcgtaattttggactgccacacattggtacctttagttctctgaaggcccacgtttttatcattaagacctatttgttagctagtagagctttatgttcgctgtccatgaaaccttctgtaaccacagtgactacaagtagttctttctctattgaattattaggtccagaatagaagatgtcattgtacactttatttccctcacactgtgttatgctctgatgtgctatgcttagctatctgtcagagattagtaaattataaaactcatgtgtactacttaagtttatatcttatgctagtttataagaacaattaaaaggacttagaagattaa

SEQ ID NO: 418706 - DNA, 1008 bp, Homo sapiens
aaaacttaggctagtacgaggctgggtgtgctggagtgcagtggcgtgatctcagttcactgctgctttccctcctgggctcaagcagttctcccacctcagcctctcgactaacagggactataatcttgcagcaccatgccgagctaattttattttttgtagagatgagctctcactatgtcacccaggttcgtctcaaactcctgaaccctagtaattctcctatctcagcctcccaaagtgctagggttacagacatgagccactgtgcctgtctagacttgtactttcaactgtccatttctccctgtctgtcccatgggcactcatgaaaaaacagaatgctcccaactttattcatcttccaagcctgtagctcttggtatactcactgttgcaagtcagaagcttgatttcatcattgatgtttttctcacgtttcacatctcactcatcaccaagtcatgttggtgttaatttctgattaacccttgaatttaccgtcttctcatcctctgtacaaaagcctcaagtgagggtcaaattcaacattatcctgatctagacagcccccattctcaatccacccttttccaagttgattgcccaaggacttctaacaataaactctcttttgcaccacagacttctttgaaaatatacatgctgttgaccctctctgtagaaaaccgcacacataaaacttaccaacagatttcattggttcttgggttctcccgaagcctatccatggtttatagattaagaattgatgaggtagctgggcacagtggctcacacctacgatcacagcacttcgggaggctgaagcaagcagatcacttgaggtcaggagtttgagaccagcctggccaacatggtgaaagaccgttttttaaattcaagtgcgcggtgcaggccgtatcccttcggggggggggaagggacccgggggggggggcgtttccggcccggcgggcctccgggaaggggcccggcccttgc

SEQ ID NO: 418707 - DNA, 1536 bp, Homo sapiens
tcccaataatacagtttttaaccttttatgataaagacatgcttagaattgctgttaagctttctgagatttaaccactgaaactaagtaaaagacaaagcacttaggtaaagcttcattcagtatccattcacccaatactggtttgattctagggcctaggaaaataggactgagcaaagcccttgtccagatggaacttatgttttagaggggaaaacaaaccataaaaaggtaaacagtataaaatcaggaaaggataaatgtatatgaagaatcaaaatgaggacggtgatggggataagaggggaaggtttttgaggagagcagagcaatgatgtaaaagcaagacacacagatagggaaatagctttccatactaagggaatgggaaataaagctgagttttgccttgaggacctccaaacatgagaattgctagagctctgtgaacaaggatgagagtggaagacaatataagcaaaggctacatcacttagggcctataggccacactgaagtgtgacaggaaaaactcagtttgagcagaggcttgacatacttaacatatttaaaggttctctggctgttgtgtggacaagaggagaagcagagattagttaagaggctattgtagcccaggtgagggatgatgtatgatcttcaacatgtctaatttttttgtgcctcaatttcatgaaatgaaaatgcgactaataccacctcataaagttgtgagaattacatgagtcaatatatgtaaggcccatcatggcacacaaatgtgttatgtaatatccatttggcagactgaagaacaacagtatgaatggaattcattcaccatgagaattacctggaattctctgggcatggtggctcatgcctgtaatcccagcactttgggtggccgaggcaagcagatcacttgaggtcaggagtttgagaccagcctggccaacatggtgaaaccctgtctctactaaaaatacaaaaagtagccagtcgtgatgacaggcacctgtaatcccagctactcgggaggctgaggcatgagaattgcttgaacccgggaggcggaggttgcagtgagcctggatcgtgccactgcactccaacctgggcagcagagcaagactctgtctcaaaaggggaaaaaaaaaattgctgatgtgacccatgaagggaactcattttcctcgtaattttggactgccacacattggtacctttagttctctgaaggcccacgtttttatcattaagacctatttgttagctagtagagctttatgttcgctgtccatgaaaccttctgtaaccacagtgactacaagtagttctttctctattgaattattaggtccagaatagaagatgtcattgtacactttatttccctcacactgtgttatgctctgatgtgctatgcttagctatctgtcagagattagtaaattataaaactcatgtgtactacttaagtttatatcttatgctagtttataagaacaattaaaaggacttagaagatta

SEQ ID NO: 418708 - DNA, 417 bp, Homo sapiens
ttagaataatgcagtagctttttattttctgtggcaggactgctctgagtataaaattttttgtaaggttgtattttcattactaattgagctcaattttctgtcttttccttgctgaaccaataggtcttggctgttcaaccgtactttctccagaaggatcagctcaatttgctgctcagatatttgggttaagcaaccatttggtatggagcaaactgcgagcaagcattttgaacacatggatttccttgaagcaggctgacaagaaaatcagagaatgtaatttataagaaagaatgccattgaattttttaggggaaaaactacaaatttctaatttagctgaaggaaaatcaagcaagatgaaaaggtaattttaaattagagaacacaaataaaatgtattagtgaata

SEQ ID NO: 418709 - DNA, 830 bp, Homo sapiens
aggatccccagaatgtgtaaccacgaccatgaagggaactcattttcctcgtaattttggactgccacacattggtacctttagttctctgaaggcccacgtttttatcattaagacctatttgttagctagtagagctttatgttcgctgtccatgaaaccttctgtaaccacagtgactacaagtagttctttctctattgaattattaggtccagaatagaagatgtcattgtacactttatttccctcacactgtgttatgctctgatgtgctatgcttagctatctgtcagagattagtaaattataaaactcatgtgtactacttaagtttatatcttatgctagtttataagaacaattaaaaggacttagaagattaaactttggtttcatggtctctgaagtcactgactgctatttcagcttgtttacccttacctagcattaagactccatctacttctgtgcagtatatgaaaatttttaaactttcatttagactggtggataggactgaccattacaaattgtcgttatcaattttttttcctttttttttttaagagccaagttctcactgtctcccaggctggagtgcagtggcatgattatggctccctgcagccttgaactcctggactcaagctgcagcctctcgagtagctgggtgcatgtgctaccacacccaattatgaatttcatcattagtttcttagtagagtccacatgtcctcagtagtaagttcatcagtgctaaatatttgaaggtatttctactgttttgtaaaagtaacttaagcctacctggtctgctatcttttgag

SEQ ID NO: 418710 - DNA, 868 bp, Homo sapiens
tgtacatggaagcttctcaggctaaatccattaatataaaaatacattgtggatactgatgagatggctaattctgtcaacttgactaggctacgggatgccttgatagctggtcaaacaacatttctaggtacatctgtgatggtgtttctggaagagactagcacttgaatcagtagacttgagtaaagaagactgccttcacccatgtgggtgagcgtcatctaatccattgagggcctgaatagaacaaaaaaggggaagaagggtgaactgctgggacatccatttcgtgcccccagatgttggtgctcctggtcctcaggccttcagactaggacttaacgttattgcctcccctgattctcaagccctcgggtttggaactacactggctttcctgggccttcagcctgcagaaggcagactgtgggacttcacctccattttgcagagccaatttctcataatctgtacatatcctattggttctgtattttttagagaacaaatacagcctattatgtatatataagaccctgggaatgcaaagatgaacaaaattaaccttctgctctcaatgaatcttggaagtctccagaggcagacaatttcaaaacaccgtatatagtcttaatatggaattaacaatagggtattgtgaatacacaaaagtaggaaggactctgatctctagaaaacaattgtatactgtgaatgaaaaagactaattctccacagtctatactcaatctctcttacctttccataattttcttcagcaaacttattaccaccaaacatagtacatgtttatttattacccatctctcccaactagaaaataaatgtattacactgggatgtc

SEQ ID NO: 418711 - DNA, 387 bp, Homo sapiens
tgagatggagtctccctctgttgcttaggctagagtgcagtggcgctctctcagctcactgcaacctccacctcccgggtttaaatgattctcctgcctcagcctcccaagtagctgggattacaggtgcacaccaccacacccagctaattttttgtaattttagtagacagggtttcactgtgttggccaggctggtgagtcatgctacacaggctatatttgaaatactggagaaatcctggttgccccagaattgtacactggttgatatgaaggtacagataaaacaagtacagataaaacaacaggatttgaaagtaaaggttatagttgagagatgctttcataaaatagtttttgaaaactttgttgacatgctgtttc

SEQ ID NO: 418712 - DNA, 3321 bp, Homo sapiens
ggcgggaagccagtggggcgttgtttcgtccgatatccgcgtttcagtctccgcccatacccctccgggttaggcggctgtagcggagctcgaaaagagtggcgcagggtcgcgcggccccgcctccttccccgcccagcgaagctctctgaccacccctcttttctagagttctgcctcgcttcccggcgcggtcgcagccctcagcccacttaggataatggcgacagctgaggtactgaacattggtaaaaaattatatgagggtaaaacaaaagaagtctacgaattgttagacagtccaggaaaagtcctcctgcagtccaaggaccagattacagcaggaaatgcagctagaaaaaaccacctggaaggaaaagctgcaatctcaaataaaatcaccagttgtatttttcagttattacaggaagcaggtattaaaactgccttcaccagaaaatgtggggagacagctttcattgcaccgcagtgtgaaatgattccaattgaatgggtttgcagaagaatagcaactggttcttttctcaaaagaaatcctggtgtcaaggaaggatataagttttacccacctaaagtggagttgtttttcaaggatgatgccaataatgacccacagtggtctgaggaacagctgattgctgcaaaattttgctttgctggacttcttataggccagactgaagtggatatcatgagtcatgctacacaggctatatttgaaatactggagaaatcctggttgccccagaattgtacactggttgatatgaagattgaatttggtgttgatgtaaccaccaaagaaattgttcttgctgatgttattgacaatgattcctggagactctggccatcaggagatcgaagccaacagaaagacaaacagtcttatcgggacctcaaagaagtaactcctgaagggctccaaatggtaaagaaaaactttgagtgggttgcagagagagtagagttgcttttgaaatcagaaagtcagtgcagggttgtagtgttgatgggctctacttctgatcttggtcactgtgaaaaaatcaagaaggcctgtggaaattttggcattccatgtgaacttcgagtaacatctgcgcataaaggaccagatgaaactctgaggattaaagctgagtatgaaggggatggcattcctactgtatttgtggcagtggcaggcagaagtaatggtttgggaccagtgatgtctgggaacactgcatatccagttatcagctgtcctcccctcacaccagactggggagttcaggatgtgtggtcttctcttcgactacccagtggtcttggctgttcaaccgtactttctccagaaggatcagctcaatttgctgctcagatatttgggttaagcaaccatttggtatggagcaaactgcgagcaagcattttgaacacatggatttccttgaagcaggctgacaagaaaatcagagaatgtaatttataagaaagaatgccattgaattttttaggggaaaaactacaaatttctaatttagctgaaggaaaatcaagcaagatgaaaaggtaattttaaattagagaacacaaataaaatgtattagtgaataaatgcttctctagatccatattaataaacatgagcatctaacccctcctttcttaggctagacaccaagatatttcagccagcctttatcattcctcttactttatcctttttccttaagtattggtggtcactactattgagtttcttccttaacactgattaaatgatcttaactccctcagctaaaactggcattactgactcccagctatatttctccagacttgcatttttttttttttttttgagacagggtctcactgtcgcccaggctggagtgcagtggcgtgatctcagttcactgctgctttccctcctgggctcaagcagttctcccacctcagcctctcgactaacagggactataatcttgcagcaccatgccgagctaattttattttttgtagagatgagctctcactatgtcacccaggttcgtctcaaactcctgaaccctagtaattctcctatctcagcctcccaaagtgctagggttacagacatgagccactgtgcctgtctagacttgtactttcaactgtccatttctccctgtctgtcccatgggcactcatgaaaaaacagaatgctcccaactttattcatcttccaagcctgtagctcttggtatactcactgttgcaagtcagaagcttgatttcatcattgatgtttttctcacgtttcacatctcactcatcaccaagtcatgttggtgttaatttctgattaacccttgaatttaccgtcttctcatcctctgtacaaaagcctcaagtgagggtcaaattcaacattatcctgatctagacagcccccattctcaatccacccttttccaagttgattgcccaaggacttctaacaataaactctcttttgcaccacagacttctttgaaaatatacatgctgttgaccctctctgtagaaaaccgcacacataaaacttaccaacagatttcattggttcttgggttctcccgaagcctatccatggtttatagattaagaattgatgaggtagctgggcacagtggctcacacctacgatcacagcacttcgggaggctgaagcaagcagatcacttgaggtcaggagtttgagaccagcctggccaacatggtgaaaccctgtctctactaaaaatacaaaaagtagccagccgtgatgacaggcacctgtaatcccagctactcgggaggctgaggcatgagaattgcttgaacccgggaggcggaggttgcagtgagcctggatcatgccactgcactccaacctgggcagcagagcaagactctgtctcaaaaggggaaaaaaaaaattgctgatgtgacccatgaagggaactcattttcctcgtaattttggactgccacacattggtacctttagttctctgaaggcccacgtttttatcattaagacctatttgttagctagtagagctttatgttcgctgtccatgaaaccttctgtaaccacagtgactacaagtagttctttctctattgaattattaggtccagaatagaagatgtcattgtacactttatttccctcacactgtgttatgctctgatgtgctatgcttagctatctgtcagagattagtaaattataaaactcatgtgtactacttaagtttatatcttatgctagtttataagaacaattaaaaggacttagaagattaa

SEQ ID NO: 418713 - DNA, 3792 bp, Homo sapiens
ggcgggaagccagtggggcgttgtttcgtccgatatccgcgtttcagtctccgcccatacccctccgggttaggcggctgtagcggagctcgaaaagagtggcgcagggtcgcgcggccccgcctccttccccgcccagcgaagctctctgaccacccctcttttctagagttctgcctcgcttcccggcgcggtcgcagccctcagcccacttaggataatggcgacagctgaggtactgaacattggtaaaaaattatatgagggtaaaacaaaagaagtctacgaattgttagacagtccaggaaaagtcctcctgcagtccaaggaccagattacagcaggaaatgcagctagaaaaaaccacctggaaggaaaagctgcaatctcaaataaaatcaccagttgtatttttcagttattacaggaagcaggtattaaaactgccttcaccagaaaatgtggggagacagctttcattgcaccgcagtgtgaaatgattccaattgaatgggtttgcagaagaatagcaactggttcttttctcaaaagaaatcctggtgtcaaggaaggatataagttttacccacctaaagtggagttgtttttcaaggatgatgccaataatgacccacagtggtctgaggaacagctgattgctgcaaaattttgctttgctggacttcttataggccagactgaagtggatatcatgagtcatgctacacaggctatatttgaaatactggagaaatcctggttgccccagaattgtacactggttgatatgaagattgaatttggtgttgatgtaaccaccaaagaaattgttcttgctgatgttattgacaatgattcctggagactctggccatcaggagatcgaagccaacagaaagacaaacagtcttatcgggacctcaaagaagtaactcctgaagggctccaaatggtaaagaaaaactttgagtgggttgcagagagagtagagttgcttttgaaatcagaaagtcagtgcagggttgtagtgttgatgggctctacttctgatcttggtcactgtgaaaaaatcaagaaggcctgtggaaattttggcattccatgtgaacttcgagtaacatctgcgcataaaggaccagatgaaactctgaggattaaagctgagtatgaaggggatggcattcctactgtatttgtggcagtggcaggcagaagtaatggtttgggaccagtgatgtctgggaacactgcatatccagttatcagctgtcctcccctcacaccagactggggagttcaggatgtgtggtcttctcttcgactacccagtggtcttggctgttcaaccgtactttctccagaaggatcagctcaatttgctgctcagatatttgggttaagcaaccatttggtatggagcaaactgcgagcaagcattttgaacacatggatttccttgaagcaggctgacaagaaaatcagagaatgtaatttataagaaagaatgccattgaattttttaggggaaaaactacaaatttctaatttagctgaaggaaaatcaagcaagatgaaaaggtaattttaaattagagaacacaaataaaatgtattagtgaataaatgcttctctagatccatattaataaacatgagcatctaacccctcctttcttaggctagacaccaagatatttcagccagcctttatcattcctcttactttatcctttttccttaagtattggtggtcactactattgagtttcttccttaacactgattaaatgatcttaactccctcagctaaaactggcattactgactcccagctatatttctccagacttgcatttttttttttttttttgagacagggtctcactgtcgcccaggctggagtgcagtggcgtgatctcagttcactgctgctttccctcctgggctcaagcagttctcccacctcagcctctcgactaacagggactataatcttgcagcaccatgccgagctaattttattttttgtagagatgagctctcactatgtcacccaggttcgtctcaaactcctgaaccctagtaattctcctatctcagcctcccaaagtgctagggttacagacatgagccactgtgcctgtctagacttgtactttcaactgtccatttctccctgtctgtcccatgggcactcatgaaaaaacagaatgctcccaactttattcatcttccaagcctgtagctcttggtatactcactgttgcaagtcagaagcttgatttcatcattgatgtttttctcacgtttcacatctcactcatcaccaagtcatgttggtgttaatttctgattaacccttgaatttaccgtcttctcatcctctgtacaaaagcctcaagtgagggtcaaattcaacattatcctgatctagacagcccccattctcaatccacccttttccaagttgattgcccaaggacttctaacaataaactctcttttgcaccacagacttctttgaaaatatacatgctgttgaccctctctgtagaaaaccgcacacataaaacttaccaacagatttcattggttcttgggttctcccgaagcctatccatggtttatagattaagaattgatgaggtagctgggcacagtggctcacacctacgatcacagcacttcgggaggctgaagcaagcagatcacttgaggtcaggagtttgagaccagcctggccaacatggtgaaaccctgtctctactaaaaatacaaaaagtagccagccgtgatgacaggcacctgtaatcccagctactcgggaggctgaggcatgagaattgcttgaacccgggaggcggaggttgcagtgagcctggatcatgccactgcactccaacctgggcagcagagcaagactctgtctcaaaaggggaaaaaaaaaattgctgatgtgacccatgaagggaactcattttcctcgtaattttggactgccacacattggtacctttagttctctgaaggcccacgtttttatcattaagacctatttgttagctagtagagctttatgttcgctgtccatgaaaccttctgtaaccacagtgactacaagtagttctttctctattgaattattaggtccagaatagaagatgtcattgtacactttatttccctcacactgtgttatgctctgatgtgctatgcttagctatctgtcagagattagtaaattataaaactcatgtgtactacttaagtttatatcttatgctagtttataagaacaattaaaaggacttagaagattaaaaaaaaaaaaaaaaaaaaaaaaaaaaaaaaaaaaaaaaaaaaaaaaaaaaaaaaaaaaaacacgaaaaaaaaaaaaaaaaaaaaaaaggaacccaaacaaacaaaacacaaacgaaaaaaacaaacacgcaacaaacaacacgccgcaaaaatacagcaagcgagcacaaccagaacaacaaacaagcaagctcagagaagataaacacaagaaggagaccaaccggagcaccctaatcaccacgtcaggacagccacaagcctagctcggaagcaaccagcagacaatcgagcgacggcggcacaagagcagagcacggaagcgaagacatagcagaagacagataaaagccgaaaaaaatccagaccgatcgcgcagcacaccgcacagagccacgaggccagcaccgagaagatcgagaaaacacaaggaagccagaagacagagagaccagccgagcaggaatgccg

SEQ ID NO: 418714 - DNA, 3765 bp, Homo sapiens
ggcgggaagccagtggggcgttgtttcgtccgatatccgcgtttcagtctccgcccatacccctccgggttaggcggctgtagcggagctcgaaaagagtggcgcagggtcgcgcggccccgcctccttccccgcccagcgaagctctctgaccacccctcttttctagagttctgcctcgcttcccggcgcggtcgcagccctcagcccacttaggataatggcgacagctgaggtactgaacattggtaaaaaattatatgagggtaaaacaaaagaagtctacgaattgttagacagtccaggaaaagtcctcctgcagtccaaggaccagattacagcaggaaatgcagctagaaaaaaccacctggaaggaaaagctgcaatctcaaataaaatcaccagttgtatttttcagttattacaggaagcaggtattaaaactgccttcaccagaaaatgtggggagacagctttcattgcaccgcagtgtgaaatgattccaattgaatgggtttgcagaagaatagcaactggttcttttctcaaaagaaatcctggtgtcaaggaaggatataagttttacccacctaaagtggagttgtttttcaaggatgatgccaataatgacccacagtggtctgaggaacagctgattgctgcaaaattttgctttgctggacttcttataggccagactgaagtggatatcatgagtcatgctacacaggctatatttgaaatactggagaaatcctggttgccccagaattgtacactggttgatatgaagattgaatttggtgttgatgtaaccaccaaagaaattgttcttgctgatgttattgacaatgattcctggagactctggccatcaggagatcgaagccaacagaaagacaaacagtcttatcgggacctcaaagaagtaactcctgaagggctccaaatggtaaagaaaaactttgagtgggttgcagagagagtagagttgcttttgaaatcagaaagtcagtgcagggttgtagtgttgatgggctctacttctgatcttggtcactgtgaaaaaatcaagaaggcctgtggaaattttggcattccatgtgaacttcgagtaacatctgcgcataaaggaccagatgaaactctgaggattaaagctgagtatgaaggggatggcattcctactgtatttgtggcagtggcaggcagaagtaatggtttgggaccagtgatgtctgggaacactgcatatccagttatcagctgtcctcccctcacaccagactggggagttcaggatgtgtggtcttctcttcgactacccagtggtcttggctgttcaaccgtactttctccagaaggatcagctcaatttgctgctcagatatttgggttaagcaaccatttggtatggagcaaactgcgagcaagcattttgaacacatggatttccttgaagcaggctgacaagaaaatcagagaatgtaatttataagaaagaatgccattgaattttttaggggaaaaactacaaatttctaatttagctgaaggaaaatcaagcaagatgaaaaggtaattttaaattagagaacacaaataaaatgtattagtgaataaatgcttctctagatccatattaataaacatgagcatctaacccctcctttcttaggctagacaccaagatatttcagccagcctttatcattcctcttactttatcctttttccttaagtattggtggtcactactattgagtttcttccttaacactgattaaatgatcttaactccctcagctaaaactggcattactgactcccagctatatttctccagacttgcatttttttttttttttttgagacagggtctcactgtcgcccaggctggagtgcagtggcgtgatctcagttcactgctgctttccctcctgggctcaagcagttctcccacctcagcctctcgactaacagggactataatcttgcagcaccatgccgagctaattttattttttgtagagatgagctctcactatgtcacccaggttcgtctcaaactcctgaaccctagtaattctcctatctcagcctcccaaagtgctagggttacagacatgagccactgtgcctgtctagacttgtactttcaactgtccatttctccctgtctgtcccatgggcactcatgaaaaaacagaatgctcccaactttattcatcttccaagcctgtagctcttggtatactcactgttgcaagtcagaagcttgatttcatcattgatgtttttctcacgtttcacatctcactcatcaccaagtcatgttggtgttaatttctgattaacccttgaatttaccgtcttctcatcctctgtacaaaagcctcaagtgagggtcaaattcaacattatcctgatctagacagcccccattctcaatccacccttttccaagttgattgcccaaggacttctaacaataaactctcttttgcaccacagacttctttgaaaatatacatgctgttgaccctctctgtagaaaaccgcacacataaaacttaccaacagatttcattggttcttgggttctcccgaagcctatccatggtttatagattaagaattgatgaggtagctgggcacagtggctcacacctacgatcacagcacttcgggaggctgaagcaagcagatcacttgaggtcaggagtttgagaccagcctggccaacatggtgaaaccctgtctctactaaaaatacaaaaagtagccagccgtgatgacaggcacctgtaatcccagctactcgggaggctgaggcatgagaattgcttgaacccgggaggcggaggttgcagtgagcctggatcatgccactgcactccaacctgggcagcagagcaagactctgtctcaaaaggggaaaaaaaaaattgctgatgtgacccatgaagggaactcattttcctcgtaattttggactgccacacattggtacctttagttctctgaaggcccacgtttttatcattaagacctatttgttagctagtagagctttatgttcgctgtccatgaaaccttctgtaaccacagtgactacaagtagttctttctctattgaattattaggtccagaatagaagatgtcattgtacactttatttccctcacactgtgttatgctctgatgtgctatgcttagctatctgtcagagattagtaaattataaaactcatgtgtactacttaagtttatatcttatgctagtttataagaacaattaaaaggacttagaagattaaactttggtttcatggtctctgaagtcactgactgctatttcagcttgtttacccttacctagcattaagactccatctacttctgtgcagtatatgaaaatttttaaactttcatttagactggtggataggactgaccattacaaattgtcgttatcaattttttttcctttttttttttaagagccaagttctcactgtctcccaggctggagtgcagtggcatgattatggctccctgcagccttgaactcctggactcaagctgcagcctctcgagtagctgggtgcatgtgctaccacacccaattatgaatttcatcattagtttcttagtagagtccacatgtcctcagtagtaagttcatcagtgctaaatatttgaaggtatttctactgttttgtaaaagtaacttaagcctacctggtctgctatcttttgag

SEQ ID NO: 418715 - DNA, 3709 bp, Homo sapiens
ggcgggaagccagtggggcgttgtttcgtccgatatccgcgtttcagtctccgcccatacccctccgggttaggcggctgtagcggagctcgaaaagagtggcgcagggtcgcgcggccccgcctccttccccgcccagcgaagctctctgaccacccctcttttctagagttctgcctcgcttcccggcgcggtcgcagccctcagcccacttaggataatggcgacagctgaggtactgaacattggtaaaaaattatatgagggtaaaacaaaagaagtctacgaattgttagacagtccaggaaaagtcctcctgcagtccaaggaccagattacagcaggaaatgcagctagaaaaaaccacctggaaggaaaagctgcaatctcaaataaaatcaccagttgtatttttcagttattacaggaagcaggtattaaaactgccttcaccagaaaatgtggggagacagctttcattgcaccgcagtgtgaaatgattccaattgaatgggtttgcagaagaatagcaactggttcttttctcaaaagaaatcctggtgtcaaggaaggatataagttttacccacctaaagtggagttgtttttcaaggatgatgccaataatgacccacagtggtctgaggaacagctgattgctgcaaaattttgctttgctggacttcttataggccagactgaagtggatatcatgagtcatgctacacaggctatatttgaaatactggagaaatcctggttgccccagaattgtacactggttgatatgaagattgaatttggtgttgatgtaaccaccaaagaaattgttcttgctgatgttattgacaatgattcctggagactctggccatcaggagatcgaagccaacagaaagacaaacagtcttatcgggacctcaaagaagtaactcctgaagggctccaaatggtaaagaaaaactttgagtgggttgcagagagagtagagttgcttttgaaatcagaaagtcagtgcagggttgtagtgttgatgggctctacttctgatcttggtcactgtgaaaaaatcaagaaggcctgtggaaattttggcattccatgtgaacttcgagtaacatctgcgcataaaggaccagatgaaactctgaggattaaagctgagtatgaaggggatggcattcctactgtatttgtggcagtggcaggcagaagtaatggtttgggaccagtgatgtctgggaacactgcatatccagttatcagctgtcctcccctcacaccagactggggagttcaggatgtgtggtcttctcttcgactacccagtggtcttggctgttcaaccgtactttctccagaaggatcagctcaatttgctgctcagatatttgggttaagcaaccatttggtatggagcaaactgcgagcaagcattttgaacacatggatttccttgaagcaggctgacaagaaaatcagagaatgtaatttataagaaagaatgccattgaattttttaggggaaaaactacaaatttctaatttagctgaaggaaaatcaagcaagatgaaaaggtaattttaaattagagaacacaaataaaatgtattagtgaataaatgcttctctagatccatattaataaacatgagcatctaacccctcctttcttaggctagacaccaagatatttcagccagcctttatcattcctcttactttatcctttttccttaagtattggtggtcactactattgagtttcttccttaacactgattaaatgatcttaactccctcagctaaaactggcattactgactcccagctatatttctccagacttgcatttttttttttttttttgagacagggtctcactgtcgcccaggctggagtgcagtggcgtgatctcagttcactgctgctttccctcctgggctcaagcagttctcccacctcagcctctcgactaacagggactataatcttgcagcaccatgccgagctaattttattttttgtagagatgagctctcactatgtcacccaggttcgtctcaaactcctgaaccctagtaattctcctatctcagcctcccaaagtgctagggttacagacatgagccactgtgcctgtctagacttgtactttcaactgtccatttctccctgtctgtcccatgggcactcatgaaaaaacagaatgctcccaactttattcatcttccaagcctgtagctcttggtatactcactgttgcaagtcagaagcttgatttcatcattgatgtttttctcacgtttcacatctcactcatcaccaagtcatgttggtgttaatttctgattaacccttgaatttaccgtcttctcatcctctgtacaaaagcctcaagtgagggtcaaattcaacattatcctgatctagacagcccccattctcaatccacccttttccaagttgattgcccaaggacttctaacaataaactctcttttgcaccacagacttctttgaaaatatacatgctgttgaccctctctgtagaaaaccgcacacataaaacttaccaacagatttcattggttcttgggttctcccgaagcctatccatggtttatagattaagaattgatgaggtagctgggcacagtggctcacacctacgatcacagcacttcgggaggctgaagcaagcagatcacttgaggtcaggagtttgagaccagcctggccaacatggtgaaaccctgtctctactaaaaatacaaaaagtagccagccgtgatgacaggcacctgtaatcccagctactcgggaggctgaggcatgagaattgcttgaacccgggaggcggaggttgcagtgagcctggatcatgccactgcactccaacctgggcagcagagcaagactctgtctcaaaaggggaaatgccacacattggtacctttagttctctgaaggcccacgtttttatcattaagacctatttgttagctagtagagctttatgttcgctgtccatgaaaccttctgtaaccacagtgactacaagtagttctttctctattgaattattaggtccagaatagaagatgtcattgtacactttatttccctcacactgtgttatgctctgatgtgctatgcttagctatctgtcagagattagtaaattataaaactcatgtgtactacttaagtttatatcttatgctagtttataagaacaattaaaaggacttagaagattaaactttggtttcatggtctctgaagtcactgactgctatttcagcttgtttacccttacctagcattaagactccatctacttctgtgcagtatatgaaaatttttaaactttcatttagactggtggataggactgaccattacaaattgtcgttatcaattttttttcctttttttttttaagagccaagttctcactgtctcccaggctggagtgcagtggcatgattatggctccctgcagccttgaactcctggactcaagctgcagcctctcgagtagctgggtgcatgtgctaccacacccaattatgaatttcatcattagtttcttagtagagtccacatgtcctcagtagtaagttcatcagtgctaaatatttgaaggtatttctactgttttgtaaaagtaacttaagcctacctggtctgctatcttttgag

SEQ ID NO: 418716 - DNA, 3443 bp, Homo sapiens
ggcgggaagccagtggggcgttgtttcgtccgatatccgcgtttcagtctccgcccatacccctccgggttaggcggctgtagcggagctcgaaaagagtggcgcagggtcgcgcggccccgcctccttccccgcccagcgaagctctctgaccacccctcttttctagagttctgcctcgcttcccggcgcggtcgcagccctcagcccacttaggataatggcgacagctgaggtactgaacattggtaaaaaattatatgagggtaaaacaaaagaagtctacgaattgttagacagtccaggaaaagtcctcctgcagtccaaggaccagattacagcaggaaatgcagctagaaaaaaccacctggaaggaaaagctgcaatctcaaataaaatcaccagttgtatttttcagttattacaggaagcaggtattaaaactgccttcaccagaaaatgtggggagacagctttcattgcaccgcagtgtgaaatgattccaattgaatgggtttgcagaagaatagcaactggttcttttctcaaaagaaatcctggtgtcaaggaaggatataagttttacccacctaaagtggagttgtttttcaaggatgatgccaataatgacccacagtggtctgaggaacagctgattgctgcaaaattttgctttgctggacttcttataggccagactgaagtggatatcatgagtcatgctacacaggctatatttgaaatactggagaaatcctggttgccccagaattgtacactggttgatatgaagattgaatttggtgttgatgtaaccaccaaagaaattgttcttgctgatgttattgacaatgattcctggagactctggccatcaggagatcgaagccaacagaaagacaaacagtcttatcgggacctcaaagaagtaactcctgaagggctccaaatggtaaagaaaaactttgagtgggttgcagagagagtagagttgcttttgaaatcagaaagtcagtgcagggttgtagtgttgatgggctctacttctgatcttggtcactgtgaaaaaatcaagaaggcctgtggaaattttggcattccatgtgaacttcgagtaacatctgcgcataaaggaccagatgaaactctgaggattaaagctgagtatgaaggggatggcattcctactgtatttgtggcagtggcaggcagaagtaatggtttgggaccagtgatgtctgggaacactgcatatccagttatcagctgtcctcccctcacaccagactggggagttcaggatgtgtggtcttctcttcgactacccagtgacggagtcgggctctcttgcccaggctggagtgcaatggcgcaatctcagcttactgcagcctccgcctcccaggttcaagcggttctcgtgcctcaacctcctgagtacctgggattataggtcttggctgttcaaccgtactttctccagaaggatcagctcaatttgctgctcagatatttgggttaagcaaccatttggtatggagcaaactgcgagcaagcattttgaacacatggatttccttgaagcaggctgacaagaaaatcagagaatgtaatttataagaaagaatgccattgaattttttaggggaaaaactacaaatttctaatttagctgaaggaaaatcaagcaagatgaaaaggtaattttaaattagagaacacaaataaaatgtattagtgaataaatgcttctctagatccatattaataaacatgagcatctaacccctcctttcttaggctagacaccaagatatttcagccagcctttatcattcctcttactttatcctttttccttaagtattggtggtcactactattgagtttcttccttaacactgattaaatgatcttaactccctcagctaaaactggcattactgactcccagctatatttctccagacttgcatttttttttttttttttgagacagggtctcactgtcgcccaggctggagtgcagtggcgtgatctcagttcactgctgctttccctcctgggctcaagcagttctcccacctcagcctctcgactaacagggactataatcttgcagcaccatgccgagctaattttattttttgtagagatgagctctcactatgtcacccaggttcgtctcaaactcctgaaccctagtaattctcctatctcagcctcccaaagtgctagggttacagacatgagccactgtgcctgtctagacttgtactttcaactgtccatttctccctgtctgtcccatgggcactcatgaaaaaacagaatgctcccaactttattcatcttccaagcctgtagctcttggtatactcactgttgcaagtcagaagcttgatttcatcattgatgtttttctcacgtttcacatctcactcatcaccaagtcatgttggtgttaatttctgattaacccttgaatttaccgtcttctcatcctctgtacaaaagcctcaagtgagggtcaaattcaacattatcctgatctagacagcccccattctcaatccacccttttccaagttgattgcccaaggacttctaacaataaactctcttttgcaccacagacttctttgaaaatatacatgctgttgaccctctctgtagaaaaccgcacacataaaacttaccaacagatttcattggttcttgggttctcccgaagcctatccatggtttatagattaagaattgatgaggtagctgggcacagtggctcacacctacgatcacagcacttcgggaggctgaagcaagcagatcacttgaggtcaggagtttgagaccagcctggccaacatggtgaaaccctgtctctactaaaaatacaaaaagtagccagccgtgatgacaggcacctgtaatcccagctactcgggaggctgaggcatgagaattgcttgaacccgggaggcggaggttgcagtgagcctggatcatgccactgcactccaacctgggcagcagagcaagactctgtctcaaaaggggaaaaaaaaaattgctgatgtgacccatgaagggaactcattttcctcgtaattttggactgccacacattggtacctttagttctctgaaggcccacgtttttatcattaagacctatttgttagctagtagagctttatgttcgctgtccatgaaaccttctgtaaccacagtgactacaagtagttctttctctattgaattattaggtccagaatagaagatgtcattgtacactttatttccctcacactgtgttatgctctgatgtgctatgcttagctatctgtcagagattagtaaattataaaactcatgtgtactacttaagtttatatcttatgctagtttataagaacaattaaaaggacttagaagattaa

SEQ ID NO: 418717 - DNA, 2730 bp, Homo sapiens
ggcgggaagccagtggggcgttgtttcgtccgatatccgcgtttcagtctccgcccatacccctccgggttaggcggctgtagcggagctcgaaaagagtggcgcagggtcgcgcggccccgcctccttccccgcccagcgaagctctctgaccacccctcttttctagagttctgcctcgcttcccggcgcggtcgcagccctcagcccacttaggataatggcgacagctgaggtactgaacattggtaaaaaattatatgagggtaaaacaaaagaagtctacgaattgttagacagtccaggaaaagtcctcctgcagtccaaggaccagattacagcaggaaatgcagctagaaaaaaccacctggaaggaaaagctgcaatctcaaataaaatcaccagttgtatttttcagttattacaggaagcaggtattaaaactgccttcaccagaaaatgtggggagacagctttcattgcaccgcagtgtgaaatgattccaattgaatgggtttgcagaagaatagcaactggttcttttctcaaaagaaatcctggtgtcaaggaaggatataagttttacccacctaaagtggagttgtttttcaaggatgatgccaataatgacccacagtggtctgaggaacagctgattgctgcaaaattttgctttgctggacttcttataggccagactgaagtggatatcatgagtcatgctacacaggctatatttgaaatactggagaaatcctggttgccccagaattgtacactggttgatatgaagattgaatttggtgttgatgtaaccaccaaagaaattgttcttgctgatgttattgacaatgattcctggagactctggccatcaggagatcgaagccaacagaaagacaaacagtcttatcgggacctcaaagaagtaactcctgaagggctccaaatggtaaagaaaaactttgagtgggttgcagagagagtagagttgcttttgaaatcagaaagtcagtgcagggttgtagtgttgatgggctctacttctgatcttggtcactgtgaaaaaatcaagaaggcctgtggaaattttggcattccatgtgaacttcgagtaacatctgcgcataaaggaccagatgaaactctgaggattaaagctgagtatgaaggggatggcattcctactgtatttgtggcagtggcaggcagaagtaatggtttgggaccagtgatgtctgggaacactgcatatccagttatcagctgtcctcccctcacaccagactggggagttcaggatgtgtggtcttctcttcgactacccagtggtcttggctgttcaaccgtactttctccagaaggatcagctcaatttgctgctcagatatttgggttaagcaaccatttggtatggagcaaactgcgagcaagcattttgaacacatggatttccttgaagcaggctgacaagaaaatcagagaatgtaatttataagaaagaatgccattgaattttttaggggaaaaactacaaatttctaatttagctgaaggaaaatcaagcaagatgaaaaggtaattttaaattagagaacacaaataaaatgtattagtgaataaatgcttctctagatccatattaataaacatgagcatctaacccctcctttcttaggctagacaccaagatatttcagccagcctttatcattcctcttactttatcctttttccttaagtattggtggtcactactattgagtttcttccttaacactgattaaatgatcttaactccctcagctaaaactggcattactgactcccagctatatttctccagacttgcatttttttttttttttttgagacagggtctcactgtcgcccaggctggagtgcagtggcgtgatctcagttcactgctgctttccctcctgggctcaagcagttctcccacctcagcctctcgactaacagggactataatcttgcagcaccatgccgagctaattttattttttgtagagatgagctctcactatgtcacccaggttcgtctcaaactcctgaaccctagtaattctcctatctcagcctcccaaagtgctagggttacagacatgagccactgtgcctgtctagacttgtactttcaactccctgtctctactaaaaatacaaaaagtagccagccgtgatgacaggcacctgtaatcccagctactcgggaggctgaggcatgagaattgcttgaacccgggaggcggaggttgcagtgagcctggatcatgccactgcactccaacctgggcagcagagcaagactctgtctcaaaaggggaaaaaaaaaattgctgatgtgacccatgaagggaactcattttcctcgtaattttggactgccacacattggtacctttagttctctgaaggcccacgtttttatcattaagacctatttgttagctagtagagctttatgttcgctgtccatgaaaccttctgtaaccacagtgactacaagtagttctttctctattgaattattaggtccagaatagaagatgtcattgtacactttatttccctcacactgtgttatgctctgatgtgctatgcttagctatctgtcagagattagtaaattataaaactcatgtgtactacttaagtttatatcttatgctagtttataagaacaattaaaaggacttagaagattaa

SEQ ID NO: 418718 - DNA, 2327 bp, Homo sapiens
ggcgggaagccagtggggcgttgtttcgtccgatatccgcgtttcagtctccgcccatacccctccgggttaggcggctgtagcggagctcgaaaagagtggcgcagggtcgcgcggccccgcctccttccccgcccagcgaagctctctgaccacccctcttttctagagttctgcctcgcttcccggcgcggtcgcagccctcagcccacttaggataatggcgacagctgaggtactgaacattggtaaaaaattatatgagggtaaaacaaaagaagtctacgaattgttagacagtccaggaaaagtcctcctgcagtccaaggaccagattacagcaggaaatgcagctagaaaaaaccacctggaaggaaaagctgcaatctcaaataaaatcaccagttgtatttttcagttattacaggaagcaggtattaaaactgccttcaccagaaaatgtggggagacagctttcattgcaccgcagtgtgaaatgattccaattgaatgggtttgcagaagaatagcaactggttcttttctcaaaagaaatcctggtgtcaaggaaggatataagttttacccacctaaagtggagttgtttttcaaggatgatgccaataatgacccacagtggtctgaggaacagctgattgctgcaaaattttgctttgctggacttcttataggccagactgaagtggatatcatgagtcatgctacacaggctatatttgaaatactggagaaatcctggttgccccagaattgtacactggttgatatgaagattgaatttggtgttgatgtaaccaccaaagaaattgttcttgctgatgttattgacaatgattcctggagactctggccatcaggagatcgaagccaacagaaagacaaacagtcttatcgggacctcaaagaagtaactcctgaagggctccaaatggtaaagaaaaactttgagtgggttgcagagagagtagagttgcttttgaaatcagaaagtcagtgcagggttgtagtgttgatgggctctacttctgatcttggtcactgtgaaaaaatcaagaaggcctgtggaaattttggcattccatgtgaacttcgagtaacatctgcgcataaaggaccagatgaaactctgaggattaaagctgagtatgaaggggatggcattcctactgtatttgtggcagtggcaggcagaagtaatggtttgggaccagtgatgtctgggaacactgcatatccagttatcagctgtcctcccctcacaccagactggggagttcaggatgtgtggtcttctcttcgactacccagtggtcttggctgttcaaccgtactttctccagaaggatcagctcaatttgctgctcagatatttgggttaagcaaccatttggtatggagcaaactgcgagcaagcattttgaacacatggatttccttgaagcaggctgacaagaaaatcagagaatgtaatttataagaaagaatgccattgaattttttaggggaaaaactacaaatttctaatttagctgaaggaaaatcaagcaagatgaaaaggtaattttaaattagagaacacaaataaaatgtattagtgaataaatgcttctctagatccatattaataaacatgagcatctaacccctcctttcttaggctagacaccaagatatttcagccagcctttatcattcctcttactttatcctttttccttaagtattggtggtcactactattgagtttcttccttaacactgattaaatgatcttaactccctcagctaaaactggcattactgactcccagctatatttctccagacttgcatttttttttttttttttgagacagggtctcactgtcgcccagcactgcactccaacctgggcagcagagcaagactctgtctcaaaaggggaaaaaaaaaattgctgatgtgacccatgaagggaactcattttcctcgtaattttggactgccacacattggtacctttagttctctgaaggcccacgtttttatcattaagacctatttgttagctagtagagctttatgttcgctgtccatgaaaccttctgtaaccacagtgactacaagtagttctttctctattgaattattaggtccagaatagaagatgtcattgtacactttatttccctcacactgtgttatgctctgatgtgctatgcttagctatctgtcagagattagtaaattataaaactcatgtgtactacttaagtttatatcttatgctagtttataagaacaattaaaaggacttagaagattaa

SEQ ID NO: 418719 - DNA, 2253 bp, Homo sapiens
ggcgggaagccagtggggcgttgtttcgtccgatatccgcgtttcagtctccgcccatacccctccgggttaggcggctgtagcggagctcgaaaagagtggcgcagggtcgcgcggccccgcctccttccccgcccagcgaagctctctgaccacccctcttttctagagttctgcctcgcttcccggcgcggtcgcagccctcagcccacttaggataatggcgacagctgaggtactgaacattggtaaaaaattatatgagggtaaaacaaaagaagtctacgaattgttagacagtccaggaaaagtcctcctgcagtccaaggaccagattacagcaggaaatgcagctagaaaaaaccacctggaaggaaaagctgcaatctcaaataaaatcaccagttgtatttttcagttattacaggaagcaggtattaaaactgccttcaccagaaaatgtggggagacagctttcattgcaccgcagtgtgaaatgattccaattgaatgggtttgcagaagaatagcaactggttcttttctcaaaagaaatcctggtgtcaaggaaggatataagttttacccacctaaagtggagttgtttttcaaggatgatgccaataatgacccacagtggtctgaggaacagctgattgctgcaaaattttgctttgctggacttcttataggccagactgaagtggatatcatgagtcatgctacacaggctatatttgaaatactggagaaatcctggttgccccagaattgtacactggttgatatgaagattgaatttggtgttgatgtaaccaccaaagaaattgttcttgctgatgttattgacaatgattcctggagactctggccatcaggagatcgaagccaacagaaagacaaacagtcttatcgggacctcaaagaagtaactcctgaagggctccaaatggtaaagaaaaactttgagtgggttgcagagagagtagagttgcttttgaaatcagaaagtcagtgcagggttgtagtgttgatgggctctacttctgatcttggtcactgtgaaaaaatcaagaaggcctgtggaaattttggcattccatgtgaacttcgagtaacatctgcgcataaaggaccagatgaaactctgaggattaaagctgagtatgaaggggatggcattcctactgtatttgtggcagtggcaggcagaagtaatggtttgggaccagtgatgtctgggaacactgcatatccagttatcagctgtcctcccctcacaccagactggggagttcaggatgtgtggtcttctcttcgactacccagtggtcttggctgttcaaccgtactttctccagaaggatcagctcaatttgctgctcagatatttgggttaagcaaccatttggtatggagcaaactgcgagcaagcattttgaacacatggatttccttgaagcaggctgacaagaaaatcagagaatgtaatttataagaaagaatgccattgaattttttaggggaaaaactacaaatttctaatttagctgaaggaaaatcaagcaagatgaaaaggtaattttaaattagagaacacaaataaaatgtattagtgaataaatgcttctctagatccatattaataaacatgagcatctaacccctcctttcttaggctagacaccaagatatttcagccagcctttatcattcctcttactttatcctttttccttaagtattggtggtcactactattgagtttcttccttaacactgattaaatgatcttaactccctcagctaaaactggcattacactgcactccaacctgggcagcagagcaagactctgtctcaaaaggggaaaaaaaaaattgctgatgtgacccatgaagggaactcattttcctcgtaattttggactgccacacattggtacctttagttctctgaaggcccacgtttttatcattaagacctatttgttagctagtagagctttatgttcgctgtccatgaaaccttctgtaaccacagtgactacaagtagttctttctctattgaattattaggtccagaatagaagatgtcattgtacactttatttccctcacactgtgttatgctctgatgtgctatgcttagctatctgtcagagattagtaaattataaaactcatgtgtactacttaagtttatatcttatgctagtttataagaacaattaaaaggacttagaagattaa

SEQ ID NO: 418720 - DNA, 3162 bp, Homo sapiens
ggcgggaagccagtggggcgttgtttcgtccgatatccgcgtttcagtctccgcccatacccctccgggttaggcggctgtagcggagctcgaaaagagtggcgcagggtcgcgcggccccgcctccttccccgcccagcgaagctctctgaccacccctcttttctagagttctgcctcgcttcccggcgcggtcgcagccctcagcccacttaggataatggcgacagctgaggtactgaacattggtaaaaaattatatgagggtaaaacaaaagaagtctacgaattgttagacagtccaggaaaagtcctcctgcagtccaaggaccagattacagcaggaaatgcagctagaaaaaaccacctggaaggaaaagctgcaatctcaaataaaatcaccagttgtatttttcagttattacaggaagcaggtattaaaactgccttcaccagaaaatgtggggagacagctttcattgcaccgcagtgtgaaatgattccaattgaatgggtttgcagaagaatagcaactggttcttttctcaaaagaaatcctggtgtcaaggaaggatataagttttacccacctaaagtggagttgtttttcaaggatgatgccaataatgacccacagtggtctgaggaacagctgattgctgcaaaattttgctttgctggacttcttataggccagactgaagtggatatcatgagtcatgctacacaggctatatttgaaatactggagaaatcctggttgccccagaattgtacactggttgatatgaagattgaatttggtgttgatgtaaccaccaaagaaattgttcttgctgatgttattgacaatgattcctggagactctggccatcaggagatcgaagccaacagaaagacaaacagtcttatcgggacctcaaagaagtaactcctgaagggctccaaatggtaaagaaaaactttgagtgggttgcagagagagtagagttgcttttgaaatcagaaagtcagtgcagggttgtagtgttgatgggctctacttctgatcttggtcactgtgaaaaaatcaagaaggcctgtggaaattttggcattccatgtgaacttcgagtaacatctgcgcataaaggaccagatgaaactctgaggattaaagctgagtatgaaggtcttggctgttcaaccgtactttctccagaaggatcagctcaatttgctgctcagatatttgggttaagcaaccatttggtatggagcaaactgcgagcaagcattttgaacacatggatttccttgaagcaggctgacaagaaaatcagagaatgtaatttataagaaagaatgccattgaattttttaggggaaaaactacaaatttctaatttagctgaaggaaaatcaagcaagatgaaaaggtaattttaaattagagaacacaaataaaatgtattagtgaataaatgcttctctagatccatattaataaacatgagcatctaacccctcctttcttaggctagacaccaagatatttcagccagcctttatcattcctcttactttatcctttttccttaagtattggtggtcactactattgagtttcttccttaacactgattaaatgatcttaactccctcagctaaaactggcattactgactcccagctatatttctccagacttgcatttttttttttttttttgagacagggtctcactgtcgcccaggctggagtgcagtggcgtgatctcagttcactgctgctttccctcctgggctcaagcagttctcccacctcagcctctcgactaacagggactataatcttgcagcaccatgccgagctaattttattttttgtagagatgagctctcactatgtcacccaggttcgtctcaaactcctgaaccctagtaattctcctatctcagcctcccaaagtgctagggttacagacatgagccactgtgcctgtctagacttgtactttcaactgtccatttctccctgtctgtcccatgggcactcatgaaaaaacagaatgctcccaactttattcatcttccaagcctgtagctcttggtatactcactgttgcaagtcagaagcttgatttcatcattgatgtttttctcacgtttcacatctcactcatcaccaagtcatgttggtgttaatttctgattaacccttgaatttaccgtcttctcatcctctgtacaaaagcctcaagtgagggtcaaattcaacattatcctgatctagacagcccccattctcaatccacccttttccaagttgattgcccaaggacttctaacaataaactctcttttgcaccacagacttctttgaaaatatacatgctgttgaccctctctgtagaaaaccgcacacataaaacttaccaacagatttcattggttcttgggttctcccgaagcctatccatggtttatagattaagaattgatgaggtagctgggcacagtggctcacacctacgatcacagcacttcgggaggctgaagcaagcagatcacttgaggtcaggagtttgagaccagcctggccaacatggtgaaaccctgtctctactaaaaatacaaaaagtagccagccgtgatgacaggcacctgtaatcccagctactcgggaggctgaggcatgagaattgcttgaacccgggaggcggaggttgcagtgagcctggatcatgccactgcactccaacctgggcagcagagcaagactctgtctcaaaaggggaaaaaaaaaattgctgatgtgacccatgaagggaactcattttcctcgtaattttggactgccacacattggtacctttagttctctgaaggcccacgtttttatcattaagacctatttgttagctagtagagctttatgttcgctgtccatgaaaccttctgtaaccacagtgactacaagtagttctttctctattgaattattaggtccagaatagaagatgtcattgtacactttatttccctcacactgtgttatgctctgatgtgctatgcttagctatctgtcagagattagtaaattataaaactcatgtgtactacttaagtttatatcttatgctagtttataagaacaattaaaaggacttagaagattaa

SEQ ID NO: 418721 - DNA, 2607 bp, Homo sapiens
ggcgggaagccagtggggcgttgtttcgtccgatatccgcgtttcagtctccgcccatacccctccgggttaggcggctgtagcggagctcgaaaagagtggcgcagggtcgcgcggccccgcctccttccccgcccagcgaagctctctgaccacccctcttttctagagttctgcctcgcttcccggcgcggtcgcagccctcagcccacttaggataatggcgacagctgaggtactgaacattggtaaaaaattatatgagggtaaaacaaaagaagtctacgaattgttagacagtccaggaaaagtcctcctgcagtccaaggaccagattacagcaggaaatgcagctagaaaaaaccacctggaaggaaaagctgcaatctcaaataaaatcaccagttgtatttttcagttattacaggaagcaggtattaaaactgccttcaccagaaaatgtggggagacagctttcattgcaccgcagtgtgaaatgattccaattgaatgggtttgcagaagaatagcaactggttcttttctcaaaagaaatcctggtgtcaaggaaggatataagttttacccacctaaagtggagttgtttttcaaggatgatgccaataatgacccacagtggtctgaggaacagctgattgctgcaaaattttgctttgctggacttcttataggccagactgaagtggatatcatgagtcatgctacacaggctatatttgaaatactggagaaatcctggttgccccagaattgtacactggttgatatgaagattgaatttggtgttgatgtaaccaccaaagaaattgttcttgctgatgttattgacaatgattcctggagactctggccatcaggagatcgaagccaacagaaagacaaacagtcttatcgggacctcaaagaagtaactcctgaagggctccaaatggtaaagaaaaactttgagtgggttgcagagagagtagagttgcttttgaaatcagaaagtcagtgcagggttgtagtgttgatgggctctacttctgatcttggtcactgtgaaaaaatcaagaaggcctgtggaaattttggcattccatgtgaacttcgagtaacatctgcgcataaaggaccagatgaaactctgaggattaaagctgagtatgaaggggatggcattcctactgtatttgtggcagtggcaggcagaagtaatggtttgggaccagtgatgtctgggaacactgcatatccagttatcagctgtcctcccctcacaccagactggggagttcaggatgtgtggtcttctcttcgactacccagtggtcttggctgttcaaccgtactttctccagaaggatcagctcaatttgctgctcagatatttgggttaagcaaccatttggtatggagcaaactgcgagcaagcattttgaacacatggatttccttgaagcaggctgacaagaaaatcagagaatgtaatttataagaaagaatgccattgaattttttaggggaaaaactacaaatttctaatttagctgaaggaaaatcaagcaagatgaaaaggtaattttaaattagagaacacaaataaaatgtattagtgaataaatgcttctctagatccatattaataaacatgagcatctaacccctcctttcttaggctagacaccaagatatttcagccagcctttatcattcctcttactttatcctttttccttaagtattggtggtcactactattgagtttcttccttaacactgattaaatgatcttaactccctcagctaaaactggcattactgactcccagctatatttctccagacttgcatttttttttttttttttgagacagggtctcactgtcgcccaggctggagtgcagtggcgtgatctcagttcactgctgctttccctcctgggctcaagcagttctcccacctcagcctctcgactaacagggactataatcttgcagcaccatgccgagctaattttattttttgtagagatgagctctcactatgtcacccaggttcgtctcaaactcctgaaccctagtaattctcctatctcagcctcccaaagtgctagggttacagacatgagccactgtgcctgtctagacttgtactttcaactgtccatttctccctgtctgtcccatgggcactcatgaaaaaacagaatgctcccaactttattcatcttccaagcctgtagctcttggtatactcactgttgcaagtcagaagcttgatttcatcattgatgtttttctcacgtttcacatctcactcatcaccaagtcatgttggtgttaatttctgattaacccttgaatttaccgtcttctcatcctctgtacaaaagcctcaagtgagggtcaaattcaacattatcctgatctagacagcccccattctcaatccacccttttccaagaccgactgacagggaggtgggaggagaggaaaagaatggtggcaactactcacatttttatccagagccaagtcttataagaatcttgaatctgtaatcatctgactttaacttttcttttaaaaaaaatcctgagacta

SEQ ID NO: 418722 - DNA, 2798 bp, Homo sapiens
ggcgggaagccagtggggcgttgtttcgtccgatatccgcgtttcagtctccgcccatacccctccgggttaggcggctgtagcggagctcgaaaagagtggcgcagggtcgcgcggccccgcctccttccccgcccagcgaagctctctgaccacccctcttttctagagttctgcctcgcttcccggcgcggtcgcagccctcagcccacttaggataatggcgacagctgaggtactgaacattggtaaaaaattatatgagggtaaaacaaaagaagtctacgaattgttagacagtccaggaaaagtcctcctgcagtccaaggaccagattacagcaggaaatgcagctagaaaaaaccacctggaaggaaaagctgcaatctcaaataaaatcaccagttgtatttttcagttattacaggaagcaggtattaaaactgccttcaccagaaaatgtggggagacagctttcattgcaccgcagtgtgaaatgattccaattgaatgggtttgcagaagaatagcaactggttcttttctcaaaagaaatcctggtgtcaaggaaggatataagttttacccacctaaagtggagttgtttttcaaggatgatgccaataatgacccacagtggtctgaggaacagctgattgctgcaaaattttgctttgctggacttcttataggccagactgaagtggatatcatgagtcatgctacacaggctatatttgaaatactggagaaatcctggttgccccagaattgtacactggttgatatgaagattgaatttggtgttgatgtaaccaccaaagaaattgttcttgctgatgttattgacaatgattcctggagactctggccatcaggagatcgaagccaacagaaagacaaacagtcttatcgggacctcaaagaagtaactcctgaagggctccaaatggtaaagaaaaactttgagtgggttgcagagagagtagagttgcttttgaaatcagaaagtcagtgcagggttgtagtgttgatgggctctacttctgatcttggtcactgtgaaaaaatcaagaaggcctgtggaaattttggcattccatgtgaacttcgagtaacatctgcgcataaaggaccagatgaaactctgaggattaaagctgagtatgaaggggatggcattcctactgtatttgtggcagtggcaggcagaagtaatggtttgggaccagtgatgtctgggaacactgcatatccagttatcagctgtcctcccctcacaccagactggggagttcaggatgtgtggtcttctcttcgactacccagtggtcttggctgttcaaccgtactttctccagaaggatcagctcaatttgctgctcagatatttgggttaagcaaccatttggtatggagcaaactgcgagcaagcattttgaacacatggatttccttgaagcaggctgacaagaaaatcagagaatgtaatttataagaaagaatgccattgaattttttaggggaaaaactacaaatttctaatttagctgaaggaaaatcaagcaagatgaaaaggtaattttaaattagagaacacaaataaaatgtattagtgaataaatgcttctctagatccatattaataaacatgagcatctaacccctcctttcttaggctagacaccaagatatttcagccagcctttatcattcctcttactttatcctttttccttaagtattggtggtcactactattgagtttcttccttaacactgattaaatgatcttaactccctcagctaaaactggcattactgactcccagctatatttctccagacttgcatttttttttttttttttgagacagggtctcactgtcgcccagcactgcactccaacctgggcagcagagcaagactctgtctcaaaaggggaaaaaaaaaattgctgatgtgacccatgaagggaactcattttcctcgtaattttggactgccacacattggtacctttagttctctgaaggcccacgtttttatcattaagacctatttgttagctagtagagctttatgttcgctgtccatgaaaccttctgtaaccacagtgactacaagtagttctttctctattgaattattaggtccagaatagaagatgtcattgtacactttatttccctcacactgtgttatgctctgatgtgctatgcttagctatctgtcagagattagtaaattataaaactcatgtgtactacttaagtttatatcttatgctagtttataagaacaattaaaaggacttagaagattaaaaaaaaaaaaaaaaaaaaaaaaaaaaaaaaaaaaaaaaaaaaaaaaaaaaaaaaaaaaaacacgaaaaaaaaaaaaaaaaaaaaaaaggaacccaaacaaacaaaacacaaacgaaaaaaacaaacacgcaacaaacaacacgccgcaaaaatacagcaagcgagcacaaccagaacaacaaacaagcaagctcagagaagataaacacaagaaggagaccaaccggagcaccctaatcaccacgtcaggacagccacaagcctagctcggaagcaaccagcagacaatcgagcgacggcggcacaagagcagagcacggaagcgaagacatagcagaagacagataaaagccgaaaaaaatccagaccgatcgcgcagcacaccgcacagagccacgaggccagcaccgagaagatcgagaaaacacaaggaagccagaagacagagagaccagccgagcaggaatgccg

SEQ ID NO: 418723 - DNA, 2043 bp, Homo sapiens
ggcgggaagccagtggggcgttgtttcgtccgatatccgcgtttcagtctccgcccatacccctccgggttaggcggctgtagcggagctcgaaaagagtggcgcagggtcgcgcggccccgcctccttccccgcccagcgaagctctctgaccacccctcttttctagagttctgcctcgcttcccggcgcggtcgcagccctcagcccacttaggataatggcgacagctgaggtactgaacattggtaaaaaattatatgagggtaaaacaaaagaagtctacgaattgttagacagtccaggaaaagtcctcctgcagtccaaggaccagattacagcaggaaatgcagctagaaaaaaccacctggaaggaaaagctgcaatctcaaataaaatcaccagttgtatttttcagttattacaggaagcaggtattaaaactgccttcaccagaaaatgtggggagacagctttcattgcaccgcagtgtgaaatgattccaattgaatgggtttgcagaagaatagcaactggttcttttctcaaaagaaatcctggtgtcaaggaaggatataagttttacccacctaaagtggagttgtttttcaaggatgatgccaataatgacccacagtggtctgaggaacagctgattgctgcaaaattttgctttgctggacttcttataggccagactgaagtggatatcatgagtcatgctacacaggctatatttgaaatactggagaaatcctggttgccccagaattgtacactggttgatatgaagattgaatttggtgttgatgtaaccaccaaagaaattgttcttgctgatgttattgacaatgattcctggagactctggccatcaggagatcgaagccaacagaaagacaaacagtcttatcgggacctcaaagaagtaactcctgaagggctccaaatggtaaagaaaaactttgagtgggttgcagagagagtagagttgcttttgaaatcagaaagtcagtgcagggttgtagtgttgatgggctctacttctgatcttggtcactgtgaaaaaatcaagaaggcctgtggaaattttggcattccatgtgaacttcgagtaacatctgcgcataaaggaccagatgaaactctgaggattaaagctgagtatgaaggggatggcattcctactgtatttgtggcagtggcaggcagaagtaatggtttgggaccagtgatgtctgggaacactgcatatccagttatcagctgtcctcccctcacaccagactggggagttcaggatgtgtggtcttctcttcgactacccagtggtcttggctgttcaaccgtactttctccagaaggatcagctcaatttgctgctcagatatttgggttaagcaaccatttggtatggagcaaactgcgagcaagcattttgaacacatggatttccttgaagcaggctgacaagaaaatcagagaatgtaatttataagaaagaatgccattgaattttttaggggaaaaactacaaatttctaatttagctgaaggaaaatcaagcaagatgaaaaggtaattttaaattagagaacacaaataaaatgtattagtgaataaatgcttctctagatccatattaataaacatgagcatctaacccctcctttcttaggctagacaccaagatatttcagccagcctttatcattcctcttactttatcctttttccttaagtattggtggtcactactattgagtttcttccttaacactgattaaatgatcttaactccctcagctaaaactggcattactgactcccagctatatttctccagacttgcatttttttttttttttttgagacagggtctcactgtcgcccaggctggagtgcagtggcgtgatctcagttcactgctgctttccctcctgggctcaagcagttctcccacctcagcctctcgactaacagggactataatcttgcagcaccgtcgacgcggccgcgaatttagtagtagtaggcggccgc

SEQ ID NO: 418724 - DNA, 3303 bp, Homo sapiens
agctgtatttgctgcacgtggaaatctccgttattttccagcacccaacagtagcgtaatgggagtaacggacttaacctcatttctctttcagagcatttagccttcatatgcccttccctgcatgcttcccccaggccgtcaagacttgagttctgcctcgcttcccggcgcggtcgcagccctcagcccacttaggataatggcgacagctgaggtactgaacattggtaaaaaattatatgagggtaaaacaaaagaagtctacgaattgttagacagtccaggaaaagtcctcctgcagtccaaggaccagattacagcaggaaatgcagctagaaaaaaccacctggaaggaaaagctgcaatctcaaataaaatcaccagttgtatttttcagttattacaggaagcaggtattaaaactgccttcaccagaaaatgtggggagacagctttcattgcaccgcagtgtgaaatgattccaattgaatgggtttgcagaagaatagcaactggttcttttctcaaaagaaatcctggtgtcaaggaaggatataagttttacccacctaaagtggagttgtttttcaaggatgatgccaataatgacccacagtggtctgaggaacagctgattgctgcaaaattttgctttgctggacttcttataggccagactgaagtggatatcatgagtcatgctacacaggctatatttgaaatactggagaaatcctggttgccccagaattgtacactggttgatatgaagattgaatttggtgttgatgtaaccaccaaagaaattgttcttgctgatgttattgacaatgattcctggagactctggccatcaggagatcgaagccaacagaaagacaaacagtcttatcgggacctcaaagaagtaactcctgaagggctccaaatggtaaagaaaaactttgagtgggttgcagagagagtagagttgcttttgaaatcagaaagtcagtgcagggttgtagtgttgatgggctctacttctgatcttggtcactgtgaaaaaatcaagaaggcctgtggaaattttggcattccatgtgaacttcgagtaacatctgcgcataaaggaccagatgaaactctgaggattaaagctgagtatgaaggggatggcattcctactgtatttgtggcagtggcaggcagaagtaatggtttgggaccagtgatgtctgggaacactgcatatccagttatcagctgtcctcccctcacaccagactggggagttcaggatgtgtggtcttctcttcgactacccagtggtcttggctgttcaaccgtactttctccagaaggatcagctcaatttgctgctcagatatttgggttaagcaaccatttggtatggagcaaactgcgagcaagcattttgaacacatggatttccttgaagcaggctgacaagaaaatcagagaatgtaatttataagaaagaatgccattgaattttttaggggaaaaactacaaatttctaatttagctgaaggaaaatcaagcaagatgaaaaggtaattttaaattagagaacacaaataaaatgtattagtgaataaatgcttctctagatccatattaataaacatgagcatctaacccctcctttcttaggctagacaccaagatatttcagccagcctttatcattcctcttactttatcctttttccttaagtattggtggtcactactattgagtttcttccttaacactgattaaatgatcttaactccctcagctaaaactggcattactgactcccagctatatttctccagacttgcatttttttttttttttttgagacagggtctcactgtcgcccaggctggagtgcagtggcgtgatctcagttcactgctgctttccctcctgggctcaagcagttctcccacctcagcctctcgactaacagggactataatcttgcagcaccatgccgagctaattttattttttgtagagatgagctctcactatgtcacccaggttcgtctcaaactcctgaaccctagtaattctcctatctcagcctcccaaagtgctagggttacagacatgagccactgtgcctgtctagacttgtactttcaactgtccatttctccctgtctgtcccatgggcactcatgaaaaaacagaatgctcccaactttattcatcttccaagcctgtagctcttggtatactcactgttgcaagtcagaagcttgatttcatcattgatgtttttctcacgtttcacatctcactcatcaccaagtcatgttggtgttaatttctgattaacccttgaatttaccgtcttctcatcctctgtacaaaagcctcaagtgagggtcaaattcaacattatcctgatctagacagcccccattctcaatccacccttttccaagttgattgcccaaggacttctaacaataaactctcttttgcaccacagacttctttgaaaatatacatgctgttgaccctctctgtagaaaaccgcacacataaaacttaccaacagatttcattggttcttgggttctcccgaagcctatccatggtttatagattaagaattgatgaggtagctgggcacagtggctcacacctacgatcacagcacttcgggaggctgaagcaagcagatcacttgaggtcaggagtttgagaccagcctggccaacatggtgaaaccctgtctctactaaaaatacaaaaagtagccagccgtgatgacaggcacctgtaatcccagctactcgggaggctgaggcatgagaattgcttgaacccgggaggcggaggttgcagtgagcctggatcatgccactgcactccaacctgggcagcagagcaagactctgtctcaaaaggggaaaaaaaaaattgctgatgtgacccatgaagggaactcattttcctcgtaattttggactgccacacattggtacctttagttctctgaaggcccacgtttttatcattaagacctatttgttagctagtagagctttatgttcgctgtccatgaaaccttctgtaaccacagtgactacaagtagttctttctctattgaattattaggtccagaatagaagatgtcattgtacactttatttccctcacactgtgttatgctctgatgtgctatgcttagctatctgtcagagattagtaaattataaaactcatgtgtactacttaagtttatatcttatgctagtttataagaacaattaaaaggacttagaagattaa

SEQ ID NO: 418725 - DNA, 3175 bp, Homo sapiens
ctgaccacccctcttttttagagagttctgcctcgcttcccggcgcggtcgcagccctcagcccacttaggataatggcgacagctgaggtactgaacattggtaaaaaattatatgagggtaaaacaaaagaagtctacgaattgttagacagtccaggaaaagtcctcctgcagtccaaggaccagattacagcaggaaatgcagctagaaaaaaccacctggaaggaaaagctgcaatctcaaataaaatcaccagttgtatttttcagttattacaggaagcaggtattaaaactgccttcaccagaaaatgtggggagacagctttcattgcaccgcagtgtgaaatgattccaattgaatgggtttgcagaagaatagcaactggttcttttctcaaaagaaatcctggtgtcaaggaaggatataagttttacccacctaaagtggagttgtttttcaaggatgatgccaataatgacccacagtggtctgaggaacagctgattgctgcaaaattttgctttgctggacttcttataggccagactgaagtggatatcatgagtcatgctacacaggctatatttgaaatactggagaaatcctggttgccccagaattgtacactggttgatatgaagattgaatttggtgttgatgtaaccaccaaagaaattgttcttgctgatgttattgacaatgattcctggagactctggccatcaggagatcgaagccaacagaaagacaaacagtcttatcgggacctcaaagaagtaactcctgaagggctccaaatggtaaagaaaaactttgagtgggttgcagagagagtagagttgcttttgaaatcagaaagtcagtgcagggttgtagtgttgatgggctctacttctgatcttggtcactgtgaaaaaatcaagaaggcctgtggaaattttggcattccatgtgaacttcgagtaacatctgcgcataaaggaccagatgaaactctgaggattaaagctgagtatgaaggggatggcattcctactgtatttgtggcagtggcaggcagaagtaatggtttgggaccagtgatgtctgggaacactgcatatccagttatcagctgtcctcccctcacaccagactggggagttcaggatgtgtggtcttctcttcgactacccagtggtcttggctgttcaaccgtactttctccagaaggatcagctcaatttgctgctcagatatttgggttaagcaaccatttggtatggagcaaactgcgagcaagcattttgaacacatggatttccttgaagcaggctgacaagaaaatcagagaatgtaatttataagaaagaatgccattgaattttttaggggaaaaactacaaatttctaatttagctgaaggaaaatcaagcaagatgaaaaggtaattttaaattagagaacacaaataaaatgtattagtgaataaatgcttctctagatccatattaataaacatgagcatctaacccctcctttcttaggctagacaccaagatatttcagccagcctttatcattcctcttactttatcctttttccttaagtattggtggtcactactattgagtttcttccttaacactgattaaatgatcttaactccctcagctaaaactggcattactgactcccagctatatttctccagacttgcatttttttttttttttttgagacagggtctcactgtcgcccaggctggagtgcagtggcgtgatctcagttcactgctgctttccctcctgggctcaagcagttctcccacctcagcctctcgactaacagggactataatcttgcagcaccatgccgagctaattttattttttgtagagatgagctctcactatgtcacccaggttcgtctcaaactcctgaaccctagtaattctcctatctcagcctcccaaagtgctagggttacagacatgagccactgtgcctgtctagacttgtactttcaactgtccatttctccctgtctgtcccatgggcactcatgaaaaaacagaatgctcccaactttattcatcttccaagcctgtagctcttggtatactcactgttgcaagtcagaagcttgatttcatcattgatgtttttctcacgtttcacatctcactcatcaccaagtcatgttggtgttaatttctgattaacccttgaatttaccgtcttctcatcctctgtacaaaagcctcaagtgagggtcaaattcaacattatcctgatctagacagcccccattctcaatccacccttttccaagttgattgcccaaggacttctaacaataaactctcttttgcaccacagacttctttgaaaatatacatgctgttgaccctctctgtagaaaaccgcacacataaaacttaccaacagatttcattggttcttgggttctcccgaagcctatccatggtttatagattaagaattgatgaggtagctgggcacagtggctcacacctacgatcacagcacttcgggaggctgaagcaagcagatcacttgaggtcaggagtttgagaccagcctggccaacatggtgaaaccctgtctctactaaaaatacaaaaagtagccagccgtgatgacaggcacctgtaatcccagctactcgggaggctgaggcatgagaattgcttgaacccgggaggcggaggttgcagtgagcctggatcatgccactgcactccaacctgggcagcagagcaagactctgtctcaaaaggggaaaaaaaaaattgctgatgtgacccatgaagggaactcattttcctcgtaattttggactgccacacattggtacctttagttctctgaaggcccacgtttttatcattaagacctatttgttagctagtagagctttatgttcgctgtccatgaaaccttctgtaaccacagtgactacaagtagttctttctctattgaattattaggtccagaatagaagatgtcattgtacactttatttccctcacactgtgttatgctctgatgtgctatgcttagctatctgtcagagattagtaaattataaaactcatgtgtactacttaagtttatatcttatgctagtttataagaacaattaaaaggacttagaagattaa

SEQ ID NO: 418726 - DNA, 3174 bp, Homo sapiens
ggacgcgtgggtcgacccacgcagttctgcctcgcttcccggcgcggtcgcagccctcagcccacttaggataatggcgacagctgaggtactgaacattggtaaaaaattatatgagggtaaaacaaaagaagtctacgaattgttagacagtccaggaaaagtcctcctgcagtccaaggaccagattacagcaggaaatgcagctagaaaaaaccacctggaaggaaaagctgcaatctcaaataaaatcaccagttgtatttttcagttattacaggaagcaggtattaaaactgccttcaccagaaaatgtggggagacagctttcattgcaccgcagtgtgaaatgattccaattgaatgggtttgcagaagaatagcaactggttcttttctcaaaagaaatcctggtgtcaaggaaggatataagttttacccacctaaagtggagttgtttttcaaggatgatgccaataatgacccacagtggtctgaggaacagctgattgctgcaaaattttgctttgctggacttcttataggccagactgaagtggatatcatgagtcatgctacacaggctatatttgaaatactggagaaatcctggttgccccagaattgtacactggttgatatgaagattgaatttggtgttgatgtaaccaccaaagaaattgttcttgctgatgttattgacaatgattcctggagactctggccatcaggagatcgaagccaacagaaagacaaacagtcttatcgggacctcaaagaagtaactcctgaagggctccaaatggtaaagaaaaactttgagtgggttgcagagagagtagagttgcttttgaaatcagaaagtcagtgcagggttgtagtgttgatgggctctacttctgatcttggtcactgtgaaaaaatcaagaaggcctgtggaaattttggcattccatgtgaacttcgagtaacatctgcgcataaaggaccagatgaaactctgaggattaaagctgagtatgaaggggatggcattcctactgtatttgtggcagtggcaggcagaagtaatggtttgggaccagtgatgtctgggaacactgcatatccagttatcagctgtcctcccctcacaccagactggggagttcaggatgtgtggtcttctcttcgactacccagtggtcttggctgttcaaccgtactttctccagaaggatcagctcaatttgctgctcagatatttgggttaagcaaccatttggtatggagcaaactgcgagcaagcattttgaacacatggatttccttgaagcaggctgacaagaaaatcagagaatgtaatttataagaaagaatgccattgaattttttaggggaaaaactacaaatttctaatttagctgaaggaaaatcaagcaagatgaaaaggtaattttaaattagagaacacaaataaaatgtattagtgaataaatgcttctctagatccatattaataaacatgagcatctaacccctcctttcttaggctagacaccaagatatttcagccagcctttatcattcctcttactttatcctttttccttaagtattggtggtcactactattgagtttcttccttaacactgattaaatgatcttaactccctcagctaaaactggcattactgactcccagctatatttctccagacttgcatttttttttttttttttgagacagggtctcactgtcgcccaggctggagtgcagtggcgtgatctcagttcactgctgctttccctcctgggctcaagcagttctcccacctcagcctctcgactaacagggactataatcttgcagcaccatgccgagctaattttattttttgtagagatgagctctcactatgtcacccaggttcgtctcaaactcctgaaccctagtaattctcctatctcagcctcccaaagtgctagggttacagacatgagccactgtgcctgtctagacttgtactttcaactgtccatttctccctgtctgtcccatgggcactcatgaaaaaacagaatgctcccaactttattcatcttccaagcctgtagctcttggtatactcactgttgcaagtcagaagcttgatttcatcattgatgtttttctcacgtttcacatctcactcatcaccaagtcatgttggtgttaatttctgattaacccttgaatttaccgtcttctcatcctctgtacaaaagcctcaagtgagggtcaaattcaacattatcctgatctagacagcccccattctcaatccacccttttccaagttgattgcccaaggacttctaacaataaactctcttttgcaccacagacttctttgaaaatatacatgctgttgaccctctctgtagaaaaccgcacacataaaacttaccaacagatttcattggttcttgggttctcccgaagcctatccatggtttatagattaagaattgatgaggtagctgggcacagtggctcacacctacgatcacagcacttcgggaggctgaagcaagcagatcacttgaggtcaggagtttgagaccagcctggccaacatggtgaaaccctgtctctactaaaaatacaaaaagtagccagccgtgatgacaggcacctgtaatcccagctactcgggaggctgaggcatgagaattgcttgaacccgggaggcggaggttgcagtgagcctggatcatgccactgcactccaacctgggcagcagagcaagactctgtctcaaaaggggaaaaaaaaaattgctgatgtgacccatgaagggaactcattttcctcgtaattttggactgccacacattggtacctttagttctctgaaggcccacgtttttatcattaagacctatttgttagctagtagagctttatgttcgctgtccatgaaaccttctgtaaccacagtgactacaagtagttctttctctattgaattattaggtccagaatagaagatgtcattgtacactttatttccctcacactgtgttatgctctgatgtgctatgcttagctatctgtcagagattagtaaattataaaactcatgtgtactacttaagtttatatcttatgctagtttataagaacaattaaaaggacttagaagattaa

SEQ ID NO: 418727 - DNA, 3152 bp, Homo sapiens
tactgcctcggggatggggagaaggagcaaagtagaggagaacgagaaatggccaaggggtggaaagtactgaacattggtaaaaaattatatgagggtaaaacaaaagaagtctacgaattgttagacagtccaggaaaagtcctcctgcagtccaaggaccagattacagcaggaaatgcagctagaaaaaaccacctggaaggaaaagctgcaatctcaaataaaatcaccagttgtatttttcagttattacaggaagcaggtattaaaactgccttcaccagaaaatgtggggagacagctttcattgcaccgcagtgtgaaatgattccaattgaatgggtttgcagaagaatagcaactggttcttttctcaaaagaaatcctggtgtcaaggaaggatataagttttacccacctaaagtggagttgtttttcaaggatgatgccaataatgacccacagtggtctgaggaacagctgattgctgcaaaattttgctttgctggacttcttataggccagactgaagtggatatcatgagtcatgctacacaggctatatttgaaatactggagaaatcctggttgccccagaattgtacactggttgatatgaagattgaatttggtgttgatgtaaccaccaaagaaattgttcttgctgatgttattgacaatgattcctggagactctggccatcaggagatcgaagccaacagaaagacaaacagtcttatcgggacctcaaagaagtaactcctgaagggctccaaatggtaaagaaaaactttgagtgggttgcagagagagtagagttgcttttgaaatcagaaagtcagtgcagggttgtagtgttgatgggctctacttctgatcttggtcactgtgaaaaaatcaagaaggcctgtggaaattttggcattccatgtgaacttcgagtaacatctgcgcataaaggaccagatgaaactctgaggattaaagctgagtatgaaggggatggcattcctactgtatttgtggcagtggcaggcagaagtaatggtttgggaccagtgatgtctgggaacactgcatatccagttatcagctgtcctcccctcacaccagactggggagttcaggatgtgtggtcttctcttcgactacccagtggtcttggctgttcaaccgtactttctccagaaggatcagctcaatttgctgctcagatatttgggttaagcaaccatttggtatggagcaaactgcgagcaagcattttgaacacatggatttccttgaagcaggctgacaagaaaatcagagaatgtaatttataagaaagaatgccattgaattttttaggggaaaaactacaaatttctaatttagctgaaggaaaatcaagcaagatgaaaaggtaattttaaattagagaacacaaataaaatgtattagtgaataaatgcttctctagatccatattaataaacatgagcatctaacccctcctttcttaggctagacaccaagatatttcagccagcctttatcattcctcttactttatcctttttccttaagtattggtggtcactactattgagtttcttccttaacactgattaaatgatcttaactccctcagctaaaactggcattactgactcccagctatatttctccagacttgcatttttttttttttttttgagacagggtctcactgtcgcccaggctggagtgcagtggcgtgatctcagttcactgctgctttccctcctgggctcaagcagttctcccacctcagcctctcgactaacagggactataatcttgcagcaccatgccgagctaattttattttttgtagagatgagctctcactatgtcacccaggttcgtctcaaactcctgaaccctagtaattctcctatctcagcctcccaaagtgctagggttacagacatgagccactgtgcctgtctagacttgtactttcaactgtccatttctccctgtctgtcccatgggcactcatgaaaaaacagaatgctcccaactttattcatcttccaagcctgtagctcttggtatactcactgttgcaagtcagaagcttgatttcatcattgatgtttttctcacgtttcacatctcactcatcaccaagtcatgttggtgttaatttctgattaacccttgaatttaccgtcttctcatcctctgtacaaaagcctcaagtgagggtcaaattcaacattatcctgatctagacagcccccattctcaatccacccttttccaagttgattgcccaaggacttctaacaataaactctcttttgcaccacagacttctttgaaaatatacatgctgttgaccctctctgtagaaaaccgcacacataaaacttaccaacagatttcattggttcttgggttctcccgaagcctatccatggtttatagattaagaattgatgaggtagctgggcacagtggctcacacctacgatcacagcacttcgggaggctgaagcaagcagatcacttgaggtcaggagtttgagaccagcctggccaacatggtgaaaccctgtctctactaaaaatacaaaaagtagccagccgtgatgacaggcacctgtaatcccagctactcgggaggctgaggcatgagaattgcttgaacccgggaggcggaggttgcagtgagcctggatcatgccactgcactccaacctgggcagcagagcaagactctgtctcaaaaggggaaaaaaaaaattgctgatgtgacccatgaagggaactcattttcctcgtaattttggactgccacacattggtacctttagttctctgaaggcccacgtttttatcattaagacctatttgttagctagtagagctttatgttcgctgtccatgaaaccttctgtaaccacagtgactacaagtagttctttctctattgaattattaggtccagaatagaagatgtcattgtacactttatttccctcacactgtgttatgctctgatgtgctatgcttagctatctgtcagagattagtaaattataaaactcatgtgtactacttaagtttatatcttatgctagtttataagaacaattaaaaggacttagaagattaa

SEQ ID NO: 418728 - DNA, 3342 bp, Homo sapiens
ggcgggaagccagtggggcgttgtttcgtccgatatccgcgtttcagtctccgcccatacccctccgggttaggcggctgtagcggagctcgaaaagagtggcgcagggtcgcgcggccccgcctccttccccgcccagcgaagctctctgaccacccctcttttctagagttctgcctcgcttcccggcgcggtcgcagccctcagcccacttaggataatggcgacagctgaggtactgaacattggtaaaaaattatatgagggtaaaacaaaagaagtctacgaattgttagacagtccaggaaaagtcctcctgcagtccaaggaccagattacagcaggaaatgcagctagaaaaaaccacctggaaggaaaagctgcaatctcaaataaaatcaccagttgtatttttcagttattacaggaagcagttacctcatataagtcaaatcgtattaaaactgccttcaccagaaaatgtggggagacagctttcattgcaccgcagtgtgaaatgattccaattgaatgggtttgcagaagaatagcaactggttcttttctcaaaagaaatcctggtgtcaaggaaggatataagttttacccacctaaagtggagttgtttttcaaggatgatgccaataatgacccacagtggtctgaggaacagctgattgctgcaaaattttgctttgctggacttcttataggccagactgaagtggatatcatgagtcatgctacacaggctatatttgaaatactggagaaatcctggttgccccagaattgtacactggttgatatgaagattgaatttggtgttgatgtaaccaccaaagaaattgttcttgctgatgttattgacaatgattcctggagactctggccatcaggagatcgaagccaacagaaagacaaacagtcttatcgggacctcaaagaagtaactcctgaagggctccaaatggtaaagaaaaactttgagtgggttgcagagagagtagagttgcttttgaaatcagaaagtcagtgcagggttgtagtgttgatgggctctacttctgatcttggtcactgtgaaaaaatcaagaaggcctgtggaaattttggcattccatgtgaacttcgagtaacatctgcgcataaaggaccagatgaaactctgaggattaaagctgagtatgaaggggatggcattcctactgtatttgtggcagtggcaggcagaagtaatggtttgggaccagtgatgtctgggaacactgcatatccagttatcagctgtcctcccctcacaccagactggggagttcaggatgtgtggtcttctcttcgactacccagtggtcttggctgttcaaccgtactttctccagaaggatcagctcaatttgctgctcagatatttgggttaagcaaccatttggtatggagcaaactgcgagcaagcattttgaacacatggatttccttgaagcaggctgacaagaaaatcagagaatgtaatttataagaaagaatgccattgaattttttaggggaaaaactacaaatttctaatttagctgaaggaaaatcaagcaagatgaaaaggtaattttaaattagagaacacaaataaaatgtattagtgaataaatgcttctctagatccatattaataaacatgagcatctaacccctcctttcttaggctagacaccaagatatttcagccagcctttatcattcctcttactttatcctttttccttaagtattggtggtcactactattgagtttcttccttaacactgattaaatgatcttaactccctcagctaaaactggcattactgactcccagctatatttctccagacttgcatttttttttttttttttgagacagggtctcactgtcgcccaggctggagtgcagtggcgtgatctcagttcactgctgctttccctcctgggctcaagcagttctcccacctcagcctctcgactaacagggactataatcttgcagcaccatgccgagctaattttattttttgtagagatgagctctcactatgtcacccaggttcgtctcaaactcctgaaccctagtaattctcctatctcagcctcccaaagtgctagggttacagacatgagccactgtgcctgtctagacttgtactttcaactgtccatttctccctgtctgtcccatgggcactcatgaaaaaacagaatgctcccaactttattcatcttccaagcctgtagctcttggtatactcactgttgcaagtcagaagcttgatttcatcattgatgtttttctcacgtttcacatctcactcatcaccaagtcatgttggtgttaatttctgattaacccttgaatttaccgtcttctcatcctctgtacaaaagcctcaagtgagggtcaaattcaacattatcctgatctagacagcccccattctcaatccacccttttccaagttgattgcccaaggacttctaacaataaactctcttttgcaccacagacttctttgaaaatatacatgctgttgaccctctctgtagaaaaccgcacacataaaacttaccaacagatttcattggttcttgggttctcccgaagcctatccatggtttatagattaagaattgatgaggtagctgggcacagtggctcacacctacgatcacagcacttcgggaggctgaagcaagcagatcacttgaggtcaggagtttgagaccagcctggccaacatggtgaaaccctgtctctactaaaaatacaaaaagtagccagccgtgatgacaggcacctgtaatcccagctactcgggaggctgaggcatgagaattgcttgaacccgggaggcggaggttgcagtgagcctggatcatgccactgcactccaacctgggcagcagagcaagactctgtctcaaaaggggaaaaaaaaaattgctgatgtgacccatgaagggaactcattttcctcgtaattttggactgccacacattggtacctttagttctctgaaggcccacgtttttatcattaagacctatttgttagctagtagagctttatgttcgctgtccatgaaaccttctgtaaccacagtgactacaagtagttctttctctattgaattattaggtccagaatagaagatgtcattgtacactttatttccctcacactgtgttatgctctgatgtgctatgcttagctatctgtcagagattagtaaattataaaactcatgtgtactacttaagtttatatcttatgctagtttataagaacaattaaaaggacttagaagattaa

SEQ ID NO: 418729 - DNA, 3270 bp, Homo sapiens
ggcgggaagccagtggggcgttgtttcgtccgatatccgcgtttcagtctccgcccatacccctccgggttaggcggctgtagcggagctcgaaaagagtggcgcagggtcgcgcggccccgcctccttccccgcccagcgaagctctctgaccacccctcttttctagagttctgcctcgcttcccggcgcggtcgcagccctcagcccacttaggataatggcgacagctgaggtactgaacattggtaaaaaattatatgagggtaaaacaaaagaagtctacgaattgttagacagtccaggaaaagtcctcctgcagtccaaggaccagattacagcaggaaatgcagctagaaaaaaccacctggaaggaaaagctgcaatctcaaataaaatcaccagttgtatttttcagttattacaggaagcaggtattaaaactgccttcaccagaaaatgtggggagacagctttcattgcaccgcagtgtgaaatgattccaattgaatgggtttgcagaagaatagcaactggttcttttctcaaaagaaatcctggtgtcaaggaaggatataagttttacccacctaaagtggagttgtttttcaaggatgatgccaataatgacccacagtggtctgaggaacagctgattgctgcgagtcatgctacacaggctatatttgaaatactggagaaatcctggttgccccagaattgtacactggttgatatgaagattgaatttggtgttgatgtaaccaccaaagaaattgttcttgctgatgttattgacaatgattcctggagactctggccatcaggagatcgaagccaacagaaagacaaacagtcttatcgggacctcaaagaagtaactcctgaagggctccaaatggtaaagaaaaactttgagtgggttgcagagagagtagagttgcttttgaaatcagaaagtcagtgcagggttgtagtgttgatgggctctacttctgatcttggtcactgtgaaaaaatcaagaaggcctgtggaaattttggcattccatgtgaacttcgagtaacatctgcgcataaaggaccagatgaaactctgaggattaaagctgagtatgaaggggatggcattcctactgtatttgtggcagtggcaggcagaagtaatggtttgggaccagtgatgtctgggaacactgcatatccagttatcagctgtcctcccctcacaccagactggggagttcaggatgtgtggtcttctcttcgactacccagtggtcttggctgttcaaccgtactttctccagaaggatcagctcaatttgctgctcagatatttgggttaagcaaccatttggtatggagcaaactgcgagcaagcattttgaacacatggatttccttgaagcaggctgacaagaaaatcagagaatgtaatttataagaaagaatgccattgaattttttaggggaaaaactacaaatttctaatttagctgaaggaaaatcaagcaagatgaaaaggtaattttaaattagagaacacaaataaaatgtattagtgaataaatgcttctctagatccatattaataaacatgagcatctaacccctcctttcttaggctagacaccaagatatttcagccagcctttatcattcctcttactttatcctttttccttaagtattggtggtcactactattgagtttcttccttaacactgattaaatgatcttaactccctcagctaaaactggcattactgactcccagctatatttctccagacttgcatttttttttttttttttgagacagggtctcactgtcgcccaggctggagtgcagtggcgtgatctcagttcactgctgctttccctcctgggctcaagcagttctcccacctcagcctctcgactaacagggactataatcttgcagcaccatgccgagctaattttattttttgtagagatgagctctcactatgtcacccaggttcgtctcaaactcctgaaccctagtaattctcctatctcagcctcccaaagtgctagggttacagacatgagccactgtgcctgtctagacttgtactttcaactgtccatttctccctgtctgtcccatgggcactcatgaaaaaacagaatgctcccaactttattcatcttccaagcctgtagctcttggtatactcactgttgcaagtcagaagcttgatttcatcattgatgtttttctcacgtttcacatctcactcatcaccaagtcatgttggtgttaatttctgattaacccttgaatttaccgtcttctcatcctctgtacaaaagcctcaagtgagggtcaaattcaacattatcctgatctagacagcccccattctcaatccacccttttccaagttgattgcccaaggacttctaacaataaactctcttttgcaccacagacttctttgaaaatatacatgctgttgaccctctctgtagaaaaccgcacacataaaacttaccaacagatttcattggttcttgggttctcccgaagcctatccatggtttatagattaagaattgatgaggtagctgggcacagtggctcacacctacgatcacagcacttcgggaggctgaagcaagcagatcacttgaggtcaggagtttgagaccagcctggccaacatggtgaaaccctgtctctactaaaaatacaaaaagtagccagccgtgatgacaggcacctgtaatcccagctactcgggaggctgaggcatgagaattgcttgaacccgggaggcggaggttgcagtgagcctggatcatgccactgcactccaacctgggcagcagagcaagactctgtctcaaaaggggaaaaaaaaaattgctgatgtgacccatgaagggaactcattttcctcgtaattttggactgccacacattggtacctttagttctctgaaggcccacgtttttatcattaagacctatttgttagctagtagagctttatgttcgctgtccatgaaaccttctgtaaccacagtgactacaagtagttctttctctattgaattattaggtccagaatagaagatgtcattgtacactttatttccctcacactgtgttatgctctgatgtgctatgcttagctatctgtcagagattagtaaattataaaactcatgtgtactacttaagtttatatcttatgctagtttataagaacaattaaaaggacttagaagattaa

SEQ ID NO: 418730 - DNA, 1468 bp, Homo sapiens
ggcgggaagccagtggggcgttgtttcgtccgatatccgcgtttcagtctccgcccatacccctccgggttaggcggctgtagcggagctcgaaaagagtggcgcagggtcgcgcggccccgcctccttccccgcccagcgaagctctctgaccacccctcttttctagagttctgcctcgcttcccggcgcggtcgcagccctcagcccacttaggataatggcgacagctgaggtactgaacattggtaaaaaattatatgagggtaaaacaaaagaagtctacgaattgttagacagtccaggaaaagtcctcctgcagtccaaggaccagattacagcaggaaatgcagctagaaaaaaccacctggaaggaaaagctgcaatctcaaataaaatcaccagttgtatttttcagttattacaggaagcaggtattaaaactgccttcaccagaaaatgtggggagacagctttcattgcaccgcagtgtgaaatgattccaattgaatgggtttgcagaagaatagcaactggttcttttctcaaaagaaatcctggtgtcaaggaaggatataagttttacccacctaaagtggagttgtttttcaaggatgatgccaataatgacccacagtggtctgaggaacagctgattgctgcaaaattttgctttgctggacttcttataggccagactgaagtggatatcatgagtcatgctacacaggctatatttgaaatactggagaaatcctggttgccccagaattgtacactggttgatatgaagattgaatttggtgttgatgtaaccaccaaagaaattgttcttgctgatgttattgacaatgattcctggagactctggccatcaggagatcgaagccaacagaaagacaaacagtcttatcgggacctcaaagaagtaactcctgaagggctccaaatggtaaagaaaaactttgagtgggttgcagagagagtagagttgcttttgaaatcagaaagtcagtgcagggttgtagtgttgatgggctctacttctgatcttggtcactgtgaaaaaatcaagaaggcctgtggaaattttggcattccatgtgaacttcgagtaacatctgcgcataaaggaccagatgaaactctgaggattaaagctgagtatgaaggggatggcattcctactgtatttgtggcaaggcagacaatttcaaaacaccgtatatagtcttaatatggaattaacaatagggtattgtgaatacacaaaagtaggaaggactctgatctctagaaaacaattgtatactgtgaatgaaaaagactaattctccacagtctatactcaatctctcttacctttccataattttcttcagcaaacttattaccaccaaacatagtacatgtttatttattacccatctctcccaactagaaaataaatgtattacactgggatgtc

SEQ ID NO: 418731 - DNA, 3252 bp, Homo sapiens
agctgtatttgctgcacgtggaaatctccgttattttccagcacccaacagtagcgtaatgggagtaacggacttaacctcatttctctttcagagcatttagccttcatatgcccttccctgcatgcttcccccaggccgtcaagacttgagttctgcctcgcttcccggcgcggtcgcagccctcagcccacttaggataatggcgacagctgaggtactgaacattggtaaaaaattatatgagggtaaaacaaaagaagtctacgaattgttagacagtccaggaaaagtcctcctgcagtccaaggaccagattacagcaggaaatgcagctagaaaaaaccacctggaaggaaaagctgcaatctcaaataaaatcaccagttgtatttttcagttattacaggaagcaggtattaaaactgccttcaccagaaaatgtggggagacagctttcattgcaccgcagtgtgaaatgattccaattgaatgggtttgcagaagaatagcaactggttcttttctcaaaagaaatcctggtgtcaaggaaggatataagttttacccacctaaagtggagttgtttttcaaggatgatgccaataatgacccacagtggtctgaggaacagctgattgctgcgagtcatgctacacaggctatatttgaaatactggagaaatcctggttgccccagaattgtacactggttgatatgaagattgaatttggtgttgatgtaaccaccaaagaaattgttcttgctgatgttattgacaatgattcctggagactctggccatcaggagatcgaagccaacagaaagacaaacagtcttatcgggacctcaaagaagtaactcctgaagggctccaaatggtaaagaaaaactttgagtgggttgcagagagagtagagttgcttttgaaatcagaaagtcagtgcagggttgtagtgttgatgggctctacttctgatcttggtcactgtgaaaaaatcaagaaggcctgtggaaattttggcattccatgtgaacttcgagtaacatctgcgcataaaggaccagatgaaactctgaggattaaagctgagtatgaaggggatggcattcctactgtatttgtggcagtggcaggcagaagtaatggtttgggaccagtgatgtctgggaacactgcatatccagttatcagctgtcctcccctcacaccagactggggagttcaggatgtgtggtcttctcttcgactacccagtggtcttggctgttcaaccgtactttctccagaaggatcagctcaatttgctgctcagatatttgggttaagcaaccatttggtatggagcaaactgcgagcaagcattttgaacacatggatttccttgaagcaggctgacaagaaaatcagagaatgtaatttataagaaagaatgccattgaattttttaggggaaaaactacaaatttctaatttagctgaaggaaaatcaagcaagatgaaaaggtaattttaaattagagaacacaaataaaatgtattagtgaataaatgcttctctagatccatattaataaacatgagcatctaacccctcctttcttaggctagacaccaagatatttcagccagcctttatcattcctcttactttatcctttttccttaagtattggtggtcactactattgagtttcttccttaacactgattaaatgatcttaactccctcagctaaaactggcattactgactcccagctatatttctccagacttgcatttttttttttttttttgagacagggtctcactgtcgcccaggctggagtgcagtggcgtgatctcagttcactgctgctttccctcctgggctcaagcagttctcccacctcagcctctcgactaacagggactataatcttgcagcaccatgccgagctaattttattttttgtagagatgagctctcactatgtcacccaggttcgtctcaaactcctgaaccctagtaattctcctatctcagcctcccaaagtgctagggttacagacatgagccactgtgcctgtctagacttgtactttcaactgtccatttctccctgtctgtcccatgggcactcatgaaaaaacagaatgctcccaactttattcatcttccaagcctgtagctcttggtatactcactgttgcaagtcagaagcttgatttcatcattgatgtttttctcacgtttcacatctcactcatcaccaagtcatgttggtgttaatttctgattaacccttgaatttaccgtcttctcatcctctgtacaaaagcctcaagtgagggtcaaattcaacattatcctgatctagacagcccccattctcaatccacccttttccaagttgattgcccaaggacttctaacaataaactctcttttgcaccacagacttctttgaaaatatacatgctgttgaccctctctgtagaaaaccgcacacataaaacttaccaacagatttcattggttcttgggttctcccgaagcctatccatggtttatagattaagaattgatgaggtagctgggcacagtggctcacacctacgatcacagcacttcgggaggctgaagcaagcagatcacttgaggtcaggagtttgagaccagcctggccaacatggtgaaaccctgtctctactaaaaatacaaaaagtagccagccgtgatgacaggcacctgtaatcccagctactcgggaggctgaggcatgagaattgcttgaacccgggaggcggaggttgcagtgagcctggatcatgccactgcactccaacctgggcagcagagcaagactctgtctcaaaaggggaaaaaaaaaattgctgatgtgacccatgaagggaactcattttcctcgtaattttggactgccacacattggtacctttagttctctgaaggcccacgtttttatcattaagacctatttgttagctagtagagctttatgttcgctgtccatgaaaccttctgtaaccacagtgactacaagtagttctttctctattgaattattaggtccagaatagaagatgtcattgtacactttatttccctcacactgtgttatgctctgatgtgctatgcttagctatctgtcagagattagtaaattataaaactcatgtgtactacttaagtttatatcttatgctagtttataagaacaattaaaaggacttagaagattaa

SEQ ID NO: 418732 - DNA, 1554 bp, Homo sapiens
ggcgggaagccagtggggcgttgtttcgtccgatatccgcgtttcagtctccgcccatacccctccgggttaggcggctgtagcggagctcgaaaagagtggcgcagggtcgcgcggccccgcctccttccccgcccagcgaagctctctgaccacccctcttttctagagttctgcctcgcttcccggcgcggtcgcagccctcagcccacttaggataatggcgacagctgaggtactgaacattggtaaaaaattatatgagggtaaaacaaaagaagtctacgaattgttagacagtccaggaaaagtcctcctgcagtccaaggaccagattacagcaggaaatgcagctagaaaaaaccacctggaaggaaaagctgcaatctcaaataaaatcaccagttgtatttttcagttattacaggaagcaggtattaaaactgccttcaccagaaaatgtggggagacagctttcattgcaccgcagtgtgaaatgattccaattgaatgggtttgcagaagaatagcaactggttcttttctcaaaagaaatcctggtgtcaaggaaggatataagttttacccacctaaagtggagttgtttttcaaggatgatgccaataatgacccacagtggtctgaggaacagctgattgctgcaaaattttgctttgctggacttcttataggccagactgaagtggatatcatgagtcatgctacacaggctatatttgaaatactggagaaatcctggttgccccagaattgtacactggttgatatgaagattgaatttggtgttgatgtaaccaccaaagaaattgttcttgctgatgttattgacaatgattcctggagactctggccatcaggagatcgaagccaacagaaagacaaacagtcttatcgggacctcaaagaagtaactcctgaagggctccaaatggtaaagaaaaactttgagtgggttgcagagagagtagagttgcttttgaaatcagaaagtcagtgcagggttgtagtgttgatgggctctacttctgatcttggtcactgtgaaaaaatcaagaaggcctgtggaaattttggcattccatgtgaacttcgagtaacatctgcgcataaaggaccagatgaaactctgaagactctgtctcaaaaggggaaaaaaaaaattgctgatgtgacccatgaagggaactcattttcctcgtaattttggactgccacacattggtacctttagttctctgaaggcccacgtttttatcattaagacctatttgttagctagtagagctttatgttcgctgtccatgaaaccttctgtaaccacagtgactacaagtagttctttctctattgaattattaggtccagaatagaagatgtcattgtacactttatttccctcacactgtgttatgctctgatgtgctatgcttagctatctgtcagagattagtaaattataaaactcatgtgtactacttaagtttatatcttatgctagtttataagaacaattaaaaggacttagaagattaa

SEQ ID NO: 418733 - DNA, 2720 bp, Homo sapiens
ttaagtttagtagtaaaagactggttaatgataacaatgcatcgtaaaaccttcagaaggaaaggagaatgttttgtggaccactttggttttcttttttgcgtgtggcagtcgagtcatgctacacaggctatatttgaaatactggagaaatcctggttgccccagaattgtacactggttgatatgaagattgaatttggtgttgatgtaaccaccaaagaaattgttcttgctgatgttattgacaatgattcctggagactctggccatcaggagatcgaagccaacagaaagacaaacagtcttatcgggacctcaaagaagtaactcctgaagggctccaaatggtaaagaaaaactttgagtgggttgcagagagagtagagttgcttttgaaatcagaaagtcagtgcagggttgtagtgttgatgggctctacttctgatcttggtcactgtgaaaaaatcaagaaggcctgtggaaattttggcattccatgtgaacttcgagtaacatctgcgcataaaggaccagatgaaactctgaggattaaagctgagtatgaaggggatggcattcctactgtatttgtggcagtggcaggcagaagtaatggtttgggaccagtgatgtctgggaacactgcatatccagttatcagctgtcctcccctcacaccagactggggagttcaggatgtgtggtcttctcttcgactacccagtggtcttggctgttcaaccgtactttctccagaaggatcagctcaatttgctgctcagatatttgggttaagcaaccatttggtatggagcaaactgcgagcaagcattttgaacacatggatttccttgaagcaggctgacaagaaaatcagagaatgtaatttataagaaagaatgccattgaattttttaggggaaaaactacaaatttctaatttagctgaaggaaaatcaagcaagatgaaaaggtaattttaaattagagaacacaaataaaatgtattagtgaataaatgcttctctagatccatattaataaacatgagcatctaacccctcctttcttaggctagacaccaagatatttcagccagcctttatcattcctcttactttatcctttttccttaagtattggtggtcactactattgagtttcttccttaacactgattaaatgatcttaactccctcagctaaaactggcattactgactcccagctatatttctccagacttgcatttttttttttttttttgagacagggtctcactgtcgcccaggctggagtgcagtggcgtgatctcagttcactgctgctttccctcctgggctcaagcagttctcccacctcagcctctcgactaacagggactataatcttgcagcaccatgccgagctaattttattttttgtagagatgagctctcactatgtcacccaggttcgtctcaaactcctgaaccctagtaattctcctatctcagcctcccaaagtgctagggttacagacatgagccactgtgcctgtctagacttgtactttcaactgtccatttctccctgtctgtcccatgggcactcatgaaaaaacagaatgctcccaactttattcatcttccaagcctgtagctcttggtatactcactgttgcaagtcagaagcttgatttcatcattgatgtttttctcacgtttcacatctcactcatcaccaagtcatgttggtgttaatttctgattaacccttgaatttaccgtcttctcatcctctgtacaaaagcctcaagtgagggtcaaattcaacattatcctgatctagacagcccccattctcaatccacccttttccaagttgattgcccaaggacttctaacaataaactctcttttgcaccacagacttctttgaaaatatacatgctgttgaccctctctgtagaaaaccgcacacataaaacttaccaacagatttcattggttcttgggttctcccgaagcctatccatggtttatagattaagaattgatgaggtagctgggcacagtggctcacacctacgatcacagcacttcgggaggctgaagcaagcagatcacttgaggtcaggagtttgagaccagcctggccaacatggtgaaaccctgtctctactaaaaatacaaaaagtagccagccgtgatgacaggcacctgtaatcccagctactcgggaggctgaggcatgagaattgcttgaacccgggaggcggaggttgcagtgagcctggatcatgccactgcactccaacctgggcagcagagcaagactctgtctcaaaaggggaaaaaaaaaattgctgatgtgacccatgaagggaactcattttcctcgtaattttggactgccacacattggtacctttagttctctgaaggcccacgtttttatcattaagacctatttgttagctagtagagctttatgttcgctgtccatgaaaccttctgtaaccacagtgactacaagtagttctttctctattgaattattaggtccagaatagaagatgtcattgtacactttatttccctcacactgtgttatgctctgatgtgctatgcttagctatctgtcagagattagtaaattataaaactcatgtgtactacttaagtttatatcttatgctagtttataagaacaattaaaaggacttagaagattaa

SEQ ID NO: 418734 - DNA, 1444 bp, Homo sapiens
ggcgggaagccagtggggcgttgtttcgtccgatatccgcgtttcagtctccgcccatacccctccgggttaggcggctgtagcggagctcgaaaagagtggcgcagggtcgcgcggccccgcctccttccccgcccagcgaagctctctgaccacccctcttttctagagttctgcctcgcttcccggcgcggtcgcagccctcagcccacttaggataatggcgacagctgaggtactgaacattggtaaaaaattatatgagggtaaaacaaaagaagtctacgaattgttagacagtccaggaaaagtcctcctgcagtccaaggaccagattacagcaggaaatgcagctagaaaaaaccacctggaaggaaaagctgcaatctcaaataaaatcaccagttgtatttttcagttattacaggaagcaggtattaaaactgccttcaccagaaaatgtggggagacagctttcattgcaccgcagtgtgaaatgattccaattgaatgggtttgcagaagaatagcaactggttcttttctcaaaagaaatcctggtgtcaaggaaggatataagttttacccacctaaagtggagttgtttttcaaggatgatgccaataatgacccacagtggtctgaggaacagctgattgctgcaaaattttgctttgctggacttcttataggccagactgaagtggatatcatgagtcatgctacacaggctatatttgaaatactggagaaatcctggttgccccagaattgtacactggttgatatgaagattgaatttggtgttgatgtaaccaccaaagaaattgttcttgctgatgttattgacaatgattcctggagactctggccatcaggagatcgaagccaacagaaagacaaacagtcttatcgggacctcaaagaagtaactcctgaagggctccaaatggtaaagaaaaactttgagtgggttgcagagagagtagagttgcttttgaaatcagaaagtcagtgcagggttgtagtgttgatgggctctacttctgatcttggtcactgtgaaaaaaattgctgatgtgacccatgaagggaactcattttcctcgtaattttggactgccacacattggtacctttagttctctgaaggcccacgtttttatcattaagacctatttgttagctagtagagctttatgttcgctgtccatgaaaccttctgtaaccacagtgactacaagtagttctttctctattgaattattaggtccagaatagaagatgtcattgtacactttatttccctcacactgtgttatgctctgatgtgctatgcttagctatctgtcagagattagtaaattataaaactcatgtgtactacttaagtttatatcttatgctagtttataagaacaattaaaaggacttagaagattaa

SEQ ID NO: 418735 - DNA, 2513 bp, Homo sapiens
tagaggatctccgactagtccaaccatactgatgttattgacaatgattcctggagactctggccatcaggagatcgaagccaacagaaagacaaacagtcttatcgggacctcaaagaagtaactcctgaagggctccaaatggtaaagaaaaactttgagtgggttgcagagagagtagagttgcttttgaaatcagaaagtcagtgcagggttgtagtgttgatgggctctacttctgatcttggtcactgtgaaaaaatcaagaaggcctgtggaaattttggcattccatgtgaacttcgagtaacatctgcgcataaaggaccagatgaaactctgaggattaaagctgagtatgaaggggatggcattcctactgtatttgtggcagtggcaggcagaagtaatggtttgggaccagtgatgtctgggaacactgcatatccagttatcagctgtcctcccctcacaccagactggggagttcaggatgtgtggtcttctcttcgactacccagtggtcttggctgttcaaccgtactttctccagaaggatcagctcaatttgctgctcagatatttgggttaagcaaccatttggtatggagcaaactgcgagcaagcattttgaacacatggatttccttgaagcaggctgacaagaaaatcagagaatgtaatttataagaaagaatgccattgaattttttaggggaaaaactacaaatttctaatttagctgaaggaaaatcaagcaagatgaaaaggtaattttaaattagagaacacaaataaaatgtattagtgaataaatgcttctctagatccatattaataaacatgagcatctaacccctcctttcttaggctagacaccaagatatttcagccagcctttatcattcctcttactttatcctttttccttaagtattggtggtcactactattgagtttcttccttaacactgattaaatgatcttaactccctcagctaaaactggcattactgactcccagctatatttctccagacttgcatttttttttttttttttgagacagggtctcactgtcgcccaggctggagtgcagtggcgtgatctcagttcactgctgctttccctcctgggctcaagcagttctcccacctcagcctctcgactaacagggactataatcttgcagcaccatgccgagctaattttattttttgtagagatgagctctcactatgtcacccaggttcgtctcaaactcctgaaccctagtaattctcctatctcagcctcccaaagtgctagggttacagacatgagccactgtgcctgtctagacttgtactttcaactgtccatttctccctgtctgtcccatgggcactcatgaaaaaacagaatgctcccaactttattcatcttccaagcctgtagctcttggtatactcactgttgcaagtcagaagcttgatttcatcattgatgtttttctcacgtttcacatctcactcatcaccaagtcatgttggtgttaatttctgattaacccttgaatttaccgtcttctcatcctctgtacaaaagcctcaagtgagggtcaaattcaacattatcctgatctagacagcccccattctcaatccacccttttccaagttgattgcccaaggacttctaacaataaactctcttttgcaccacagacttctttgaaaatatacatgctgttgaccctctctgtagaaaaccgcacacataaaacttaccaacagatttcattggttcttgggttctcccgaagcctatccatggtttatagattaagaattgatgaggtagctgggcacagtggctcacacctacgatcacagcacttcgggaggctgaagcaagcagatcacttgaggtcaggagtttgagaccagcctggccaacatggtgaaaccctgtctctactaaaaatacaaaaagtagccagccgtgatgacaggcacctgtaatcccagctactcgggaggctgaggcatgagaattgcttgaacccgggaggcggaggttgcagtgagcctggatcatgccactgcactccaacctgggcagcagagcaagactctgtctcaaaaggggaaaaaaaaaattgctgatgtgacccatgaagggaactcattttcctcgtaattttggactgccacacattggtacctttagttctctgaaggcccacgtttttatcattaagacctatttgttagctagtagagctttatgttcgctgtccatgaaaccttctgtaaccacagtgactacaagtagttctttctctattgaattattaggtccagaatagaagatgtcattgtacactttatttccctcacactgtgttatgctctgatgtgctatgcttagctatctgtcagagattagtaaattataaaactcatgtgtactacttaagtttatatcttatgctagtttataagaacaattaaaaggacttagaagattaa

SEQ ID NO: 418736 - DNA, 2532 bp, Homo sapiens
ggctgttcgaatttgaacgtctctgtgattggaaaacccctggcgatgtgatgttattgacaatgattcctggagactctggccatcaggagatcgaagccaacagaaagacaaacagtcttatcgggacctcaaagaagtaactcctgaagggctccaaatggtaaagaaaaactttgagtgggttgcagagagagtagagttgcttttgaaatcagaaagtcagtgcagggttgtagtgttgatgggctctacttctgatcttggtcactgtgaaaaaatcaagaaggcctgtggaaattttggcattccatgtgaacttcgagtaacatctgcgcataaaggaccagatgaaactctgaggattaaagctgagtatgaaggggatggcattcctactgtatttgtggcagtggcaggcagaagtaatggtttgggaccagtgatgtctgggaacactgcatatccagttatcagctgtcctcccctcacaccagactggggagttcaggatgtgtggtcttctcttcgactacccagtggtcttggctgttcaaccgtactttctccagaaggatcagctcaatttgctgctcagatatttgggttaagcaaccatttggtatggagcaaactgcgagcaagcattttgaacacatggatttccttgaagcaggctgacaagaaaatcagagaatgtaatttataagaaagaatgccattgaattttttaggggaaaaactacaaatttctaatttagctgaaggaaaatcaagcaagatgaaaaggtaattttaaattagagaacacaaataaaatgtattagtgaataaatgcttctctagatccatattaataaacatgagcatctaacccctcctttcttaggctagacaccaagatatttcagccagcctttatcattcctcttactttatcctttttccttaagtattggtggtcactactattgagtttcttccttaacactgattaaatgatcttaactccctcagctaaaactggcattactgactcccagctatatttctccagacttgcatttttttttttttttttgagacagggtctcactgtcgcccaggctggagtgcagtggcgtgatctcagttcactgctgctttccctcctgggctcaagcagttctcccacctcagcctctcgactaacagggactataatcttgcagcaccatgccgagctaattttattttttgtagagatgagctctcactatgtcacccaggttcgtctcaaactcctgaaccctagtaattctcctatctcagcctcccaaagtgctagggttacagacatgagccactgtgcctgtctagacttgtactttcaactgtccatttctccctgtctgtcccatgggcactcatgaaaaaacagaatgctcccaactttattcatcttccaagcctgtagctcttggtatactcactgttgcaagtcagaagcttgatttcatcattgatgtttttctcacgtttcacatctcactcatcaccaagtcatgttggtgttaatttctgattaacccttgaatttaccgtcttctcatcctctgtacaaaagcctcaagtgagggtcaaattcaacattatcctgatctagacagcccccattctcaatccacccttttccaagttgattgcccaaggacttctaacaataaactctcttttgcaccacagacttctttgaaaatatacatgctgttgaccctctctgtagaaaaccgcacacataaaacttaccaacagatttcattggttcttgggttctcccgaagcctatccatggtttatagattaagaattgatgaggtagctgggcacagtggctcacacctacgatcacagcacttcgggaggctgaagcaagcagatcacttgaggtcaggagtttgagaccagcctggccaacatggtgaaaccctgtctctactaaaaatacaaaaagtagccagccgtgatgacaggcacctgtaatcccagctactcgggaggctgaggcatgagaattgcttgaacccgggaggcggaggttgcagtgagcctggatcatgccactgcactccaacctgggcagcagagcaagactctgtctcaaaaggggaaaaaaaaaattgctgatgtgacccatgaagggaactcattttcctcgtaattttggactgccacacattggtacctttagttctctgaaggcccacgtttttatcattaagacctatttgttagctagtagagctttatgttcgctgtccatgaaaccttctgtaaccacagtgactacaagtagttctttctctattgaattattaggtccagaatagaagatgtcattgtacactttatttccctcacactgtgttatgctctgatgtgctatgcttagctatctgtcagagattagtaaattataaaactcatgtgtactacttaagtttatatcttatgctagtttataagaacaattaaaaggacttagaagattaa

SEQ ID NO: 418737 - DNA, 1063 bp, Homo sapiens
ggcgggaagccagtggggcgttgtttcgtccgatatccgcgtttcagtctccgcccatacccctccgggttaggcggctgtagcggagctcgaaaagagtggcgcagggtcgcgcggccccgcctccttccccgcccagcgaagctctctgaccacccctcttttctagagttctgcctcgcttcccggcgcggtcgcagccctcagcccacttaggataatggcgacagctgaggtactgaacattggtaaaaaattatatgagggtaaaacaaaagaagtctacgaattgttagacagtccaggaaaagtcctcctgcagtccaaggaccagattacagcaggaaatgcagctagaaaaaaccacctggaaggaaaagctgcaatctcaaataaaatcaccagttgtatttttcagttattacaggaagcaggtattaaaactgccttcaccagaaaatgtggggagacagctttcattgcaccgcagtgtgaaatgattccaattgaatgggtttgcagaagaatagcaactggttcttttctcaaaagaaatcctggtgtcaaggaaggatataagttttacccacctaaagtggagttgtttttcaaggatgatgccaataatgacccacagtggtctgaggaacagctgattgctgcaaaattttgctttgctggacttcttataggccagactgaagtggatatcatgagtcatgctacacaggctatatttgaaatactggagaaatcctggttgccccagaattgtacactggttgatatgaagattgaatttggtgttgatgtaaccaccaaagaaattgttcttgctgatgttattgacaatgattcctggagactctggccatcaggagatcgaagccaacagaaagacaaacagtcttatcgggacctcaaagaagtaactcctgaagggctccaaatggtaaagaaaaactttgagtgggttgcagagagagtagaggtaaaccttctatagtaaaactgtatgtattatgtgtttttcttctaagaaaatcttgtttcaaaagaaaaa

SEQ ID NO: 418738 - DNA, 2120 bp, Homo sapiens
gaccacacatcctgaactccccagtctggtgtgaggggaggacagctgataactggatatgcagtgttcccagacatcacaccagactggggagttcaggatgtgtggtcttctcttcgactacccagtggtcttggctgttcaaccgtactttctccagaaggatcagctcaatttgctgctcagatatttgggttaagcaaccatttggtatggagcaaactgcgagcaagcattttgaacacatggatttccttgaagcaggctgacaagaaaatcagagaatgtaatttataagaaagaatgccattgaattttttaggggaaaaactacaaatttctaatttagctgaaggaaaatcaagcaagatgaaaaggtaattttaaattagagaacacaaataaaatgtattagtgaataaatgcttctctagatccatattaataaacatgagcatctaacccctcctttcttaggctagacaccaagatatttcagccagcctttatcattcctcttactttatcctttttccttaagtattggtggtcactactattgagtttcttccttaacactgattaaatgatcttaactccctcagctaaaactggcattactgactcccagctatatttctccagacttgcatttttttttttttttttgagacagggtctcactgtcgcccaggctggagtgcagtggcgtgatctcagttcactgctgctttccctcctgggctcaagcagttctcccacctcagcctctcgactaacagggactataatcttgcagcaccatgccgagctaattttattttttgtagagatgagctctcactatgtcacccaggttcgtctcaaactcctgaaccctagtaattctcctatctcagcctcccaaagtgctagggttacagacatgagccactgtgcctgtctagacttgtactttcaactgtccatttctccctgtctgtcccatgggcactcatgaaaaaacagaatgctcccaactttattcatcttccaagcctgtagctcttggtatactcactgttgcaagtcagaagcttgatttcatcattgatgtttttctcacgtttcacatctcactcatcaccaagtcatgttggtgttaatttctgattaacccttgaatttaccgtcttctcatcctctgtacaaaagcctcaagtgagggtcaaattcaacattatcctgatctagacagcccccattctcaatccacccttttccaagttgattgcccaaggacttctaacaataaactctcttttgcaccacagacttctttgaaaatatacatgctgttgaccctctctgtagaaaaccgcacacataaaacttaccaacagatttcattggttcttgggttctcccgaagcctatccatggtttatagattaagaattgatgaggtagctgggcacagtggctcacacctacgatcacagcacttcgggaggctgaagcaagcagatcacttgaggtcaggagtttgagaccagcctggccaacatggtgaaaccctgtctctactaaaaatacaaaaagtagccagccgtgatgacaggcacctgtaatcccagctactcgggaggctgaggcatgagaattgcttgaacccgggaggcggaggttgcagtgagcctggatcatgccactgcactccaacctgggcagcagagcaagactctgtctcaaaaggggaaaaaaaaaattgctgatgtgacccatgaagggaactcattttcctcgtaattttggactgccacacattggtacctttagttctctgaaggcccacgtttttatcattaagacctatttgttagctagtagagctttatgttcgctgtccatgaaaccttctgtaaccacagtgactacaagtagttctttctctattgaattattaggtccagaatagaagatgtcattgtacactttatttccctcacactgtgttatgctctgatgtgctatgcttagctatctgtcagagattagtaaattataaaactcatgtgtactacttaagtttatatcttatgctagtttataagaacaattaaaaggacttagaagattaa

SEQ ID NO: 418739 - DNA, 2116 bp, Homo sapiens
ttagaataatgcagtagctttttattttctgtggcaggactgctctgagtataaaattttttgtaaggttgtattttcattactaattgagctcaattttctgtcttttccttgctgaaccaataggtcttggctgttcaaccgtactttctccagaaggatcagctcaatttgctgctcagatatttgggttaagcaaccatttggtatggagcaaactgcgagcaagcattttgaacacatggatttccttgaagcaggctgacaagaaaatcagagaatgtaatttataagaaagaatgccattgaattttttaggggaaaaactacaaatttctaatttagctgaaggaaaatcaagcaagatgaaaaggtaattttaaattagagaacacaaataaaatgtattagtgaataaatgcttctctagatccatattaataaacatgagcatctaacccctcctttcttaggctagacaccaagatatttcagccagcctttatcattcctcttactttatcctttttccttaagtattggtggtcactactattgagtttcttccttaacactgattaaatgatcttaactccctcagctaaaactggcattactgactcccagctatatttctccagacttgcatttttttttttttttttgagacagggtctcactgtcgcccaggctggagtgcagtggcgtgatctcagttcactgctgctttccctcctgggctcaagcagttctcccacctcagcctctcgactaacagggactataatcttgcagcaccatgccgagctaattttattttttgtagagatgagctctcactatgtcacccaggttcgtctcaaactcctgaaccctagtaattctcctatctcagcctcccaaagtgctagggttacagacatgagccactgtgcctgtctagacttgtactttcaactgtccatttctccctgtctgtcccatgggcactcatgaaaaaacagaatgctcccaactttattcatcttccaagcctgtagctcttggtatactcactgttgcaagtcagaagcttgatttcatcattgatgtttttctcacgtttcacatctcactcatcaccaagtcatgttggtgttaatttctgattaacccttgaatttaccgtcttctcatcctctgtacaaaagcctcaagtgagggtcaaattcaacattatcctgatctagacagcccccattctcaatccacccttttccaagttgattgcccaaggacttctaacaataaactctcttttgcaccacagacttctttgaaaatatacatgctgttgaccctctctgtagaaaaccgcacacataaaacttaccaacagatttcattggttcttgggttctcccgaagcctatccatggtttatagattaagaattgatgaggtagctgggcacagtggctcacacctacgatcacagcacttcgggaggctgaagcaagcagatcacttgaggtcaggagtttgagaccagcctggccaacatggtgaaaccctgtctctactaaaaatacaaaaagtagccagccgtgatgacaggcacctgtaatcccagctactcgggaggctgaggcatgagaattgcttgaacccgggaggcggaggttgcagtgagcctggatcatgccactgcactccaacctgggcagcagagcaagactctgtctcaaaaggggaaaaaaaaaattgctgatgtgacccatgaagggaactcattttcctcgtaattttggactgccacacattggtacctttagttctctgaaggcccacgtttttatcattaagacctatttgttagctagtagagctttatgttcgctgtccatgaaaccttctgtaaccacagtgactacaagtagttctttctctattgaattattaggtccagaatagaagatgtcattgtacactttatttccctcacactgtgttatgctctgatgtgctatgcttagctatctgtcagagattagtaaattataaaactcatgtgtactacttaagtttatatcttatgctagtttataagaacaattaaaaggacttagaagattaa

SEQ ID NO: 418740 - DNA, 1738 bp, Homo sapiens
ggcgggaagccagtggggcgttgtttcgtccgatatccgcgtttcagtctccgcccatacccctccgggttaggcggctgtagcggagctcgaaaagagtggcgcagggtcgcgcggccccgcctccttccccgcccagcgaagctctctgaccacccctcttttctagagttctgcctcgcttcccggcgcggtcgcagccctcagcccacttaggataatggcgacagctgaggtactgaacattggtaaaaaattatatgagggtaaaacaaaagaagtctacgaattgttagacagtccaggaaaagtcctcctgcagtccaaggaccagattacagcaggaaatgcagctagaaaaaaccacctggaaggaaaagctgcaatctcaaataaaatcaccagttgtatttttcagttattacaggaagcaggtattaaaactgccttcaccagaaaatgtggggagacagctttcattgcaccgcagtgtgaaatgattccaattgaatgggtttgcagaagaatagcaactggttcttttctcaaaagaaatcctggtgtcaaggaaggatataagttttacccacctaaagtggagttgtttttcaaggatgatgccaataatgacccacagtggtctgaggaacagctgattgctgcaaaattttgctttgctggacttcttataggccagactgaagtggatatcatgagtcatgctacacaggctatatttgaaatactggagaaatcctggttgccccagaattgtacactggttgatatgaagattgaatttggtgttgatgtaaccaccaaagaaattgttcttgctgatgttattgacaatgattcctggagactctggccatcaggagatcgaagccaacagaaagacaaacagtcttatcgggacctcaaagaagtaactcctggaagggaactcattttcctcgtaattttggactgccacacattggtacctttagttctctgaaggcccacgtttttatcattaagacctatttgttagctagtagagctttatgttcgctgtccatgaaaccttctgtaaccacagtgactacaagtagttctttctctattgaattattaggtccagaatagaagatgtcattgtacactttatttccctcacactgtgttatgctctgatgtgctatgcttagctatctgtcagagattagtaaattataaaactcatgtgtactacttaagtttatatcttatgctagtttataagaacaattaaaaggacttagaagattaaactttggtttcatggtctctgaagtcactgactgctatttcagcttgtttacccttacctagcattaagactccatctacttctgtgcagtatatgaaaatttttaaactttcatttagactggtggataggactgaccattacaaattgtcgttatcaattttttttcctttttttttttaagagccaagttctcactgtctcccaggctggagtgcagtggcatgattatggctccctgcagccttgaactcctggactcaagctgcagcctctcgagtagctgggtgcatgtgctaccacacccaattatgaatttcatcattagtttcttagtagagtccacatgtcctcagtagtaagttcatcagtgctaaatatttgaaggtatttctactgttttgtaaaagtaacttaagcctacctggtctgctatcttttgag

SEQ ID NO: 418741 - DNA, 1494 bp, Homo sapiens
ggcgggaagccagtggggcgttgtttcgtccgatatccgcgtttcagtctccgcccatacccctccgggttaggcggctgtagcggagctcgaaaagagtggcgcagggtcgcgcggccccgcctccttccccgcccagcgaagctctctgaccacccctcttttctagagttctgcctcgcttcccggcgcggtcgcagccctcagcccacttaggataatggcgacagctgaggtactgaacattggtaaaaaattatatgagggtaaaacaaaagaagtctacgaattgttagacagtccaggaaaagtcctcctgcagtccaaggaccagattacagcaggaaatgcagctagaaaaaaccacctggaaggaaaagctgcaatctcaaataaaatcaccagttgtatttttcagttattacaggaagcaggtattaaaactgccttcaccagaaaatgtggggagacagctttcattgcaccgcagtgtgaaatgattccaattgaatgggtttgcagaagaatagcaactggttcttttctcaaaagaaatcctggtgtcaaggaaggatataagttttacccacctaaagtggagttgtttttcaaggatgatgccaataatgacccacagtggtctgaggaacagctgattgctgcaaaattttgctttgctggacttcttataggccagactgaagtggatatcatgagtcatgctacacaggctatatttgaaatactggagaaatcctggttgccccagaattgtacactggttgatatgaagattgaatttggtgttgatgtaaccaccaaagaaattgttcttgctgatgttattgacaatgattcctggagactctggccatcaggagatcgaagccaacagaaagacaaacaggtagataatgcttcaggtttttttatcctttttgagatcaagctgagattagccagtcgtgatgacaggcacctgtaatcccagctactcgggaggctgaggcatgagaattgcttgaacccgggaggcggaggttgcagtgagcctggatcgtgccactgcactccaacctgggcagcagagcaagactctgtctcaaaaggggaaaaaaaaaattgctgatgtgacccatgaagggaactcattttcctcgtaattttggactgccacacattggtacctttagttctctgaaggcccacgtttttatcattaagacctatttgttagctagtagagctttatgttcgctgtccatgaaaccttctgtaaccacagtgactacaagtagttctttctctattgaattattaggtccagaatagaagatgtcattgtacactttatttccctcacactgtgttatgctctgatgtgctatgcttagctatctgtcagagattagtaaattataaaactcatgtgtactacttaagtttatatcttatgctagtttataagaacaattaaaaggacttagaagatta

SEQ ID NO: 418742 - DNA, 1661 bp, Homo sapiens
  misc_feature (1639)..(1639): n is a, c, g, or t
  misc_feature (1642)..(1642): n is a, c, g, or t
  misc_feature (1655)..(1655): n is a, c, g, or t
ggcgggaagccagtggggcgttgtttcgtccgatatccgcgtttcagtctccgcccatacccctccgggttaggcggctgtagcggagctcgaaaagagtggcgcagggtcgcgcggccccgcctccttccccgcccagcgaagctctctgaccacccctcttttctagagttctgcctcgcttcccggcgcggtcgcagccctcagcccacttaggataatggcgacagctgaggtactgaacattggtaaaaaattatatgagggtaaaacaaaagaagtctacgaattgttagacagtccaggaaaagtcctcctgcagtccaaggaccagattacagcaggaaatgcagctagaaaaaaccacctggaaggaaaagctgcaatctcaaataaaatcaccagttgtatttttcagttattacaggaagcaggtattaaaactgccttcaccagaaaatgtggggagacagctttcattgcaccgcagtgtgaaatgattccaattgaatgggtttgcagaagaatagcaactggttcttttctcaaaagaaatcctggtgtcaaggaaggatataagttttacccacctaaagtggagttgtttttcaaggatgatgccaataatgacccacagtggtctgaggaacagctgattgctgcaaaattttgctttgctggacttcttataggccagactgaagtggatatcatgagtcatgctacacaggctatatttgaaatactggagaaatcctggttgccccagaattgtacactggttgatatgaagattgaatttggtgttgatgtaaccaccaaagaaattgttcttgctgatgttattgacaatgattcctggagactctggccatcaggagatcgaagccaacagaaagacaaacaggtagataatgcttcaggtttttttatcctttttgagatcaagctgagattagccagtcgtgatgacaggcacctgtaatcccagctactcgggaggctgaggcatgagaattgcttgaacccgggaggcggaggttgcagtgagcctggatcgtgccactgcactccaacctgggcagcagagcaagactctgtctcaaaaggggaaaaaaaaaattgctgatgtgacccatgaagggaactcattttcctcgtaattttggactgccacacattggtacctttagttctctgaaggcccacgtttttatcattaagacctatttgttagctagtagagctttatgttcgctgtccatgaaaccttctgtaaccacagtgactacaagtagttctttctctattgaattattaggtccagaatagaagatgtcattgtacactttatttccctcacactgtgttatgctctgatgtgctatgcttagctatctgtcagagattagtaaattataaaactcatgtgtactacttaagtttatatcttatgctagtttataagaacaattaaaaggacttagaagattaactttggtttcatggtctctgaagtcactgactgctatttcagcttgtttacccttacctagcattaagactccatctacttctgtgcagtatatgaaaatttttaaactttcatttagactggtggataggactgaccattacnatngtcgttgtacacnttctct

SEQ ID NO: 418743 - DNA, 1455 bp, Homo sapiens
aaaacttaggctagtacgaggctgggtgtgctggagtgcagtggcgtgatctcagttcactgctgctttccctcctgggctcaagcagttctcccacctcagcctctcgactaacagggactataatcttgcagcaccatgccgagctaattttattttttgtagagatgagctctcactatgtcacccaggttcgtctcaaactcctgaaccctagtaattctcctatctcagcctcccaaagtgctagggttacagacatgagccactgtgcctgtctagacttgtactttcaactgtccatttctccctgtctgtcccatgggcactcatgaaaaaacagaatgctcccaactttattcatcttccaagcctgtagctcttggtatactcactgttgcaagtcagaagcttgatttcatcattgatgtttttctcacgtttcacatctcactcatcaccaagtcatgttggtgttaatttctgattaacccttgaatttaccgtcttctcatcctctgtacaaaagcctcaagtgagggtcaaattcaacattatcctgatctagacagcccccattctcaatccacccttttccaagttgattgcccaaggacttctaacaataaactctcttttgcaccacagacttctttgaaaatatacatgctgttgaccctctctgtagaaaaccgcacacataaaacttaccaacagatttcattggttcttgggttctcccgaagcctatccatggtttatagattaagaattgatgaggtagctgggcacagtggctcacacctacgatcacagcacttcgggaggctgaagcaagcagatcacttgaggtcaggagtttgagaccagcctggccaacatggtgaaaccctgtctctactaaaaatacaaaaagtagccagccgtgatgacaggcacctgtaatcccagctactcgggaggctgaggcatgagaattgcttgaacccgggaggcggaggttgcagtgagcctggatcatgccactgcactccaacctgggcagcagagcaagactctgtctcaaaaggggaaaaaaaaaattgctgatgtgacccatgaagggaactcattttcctcgtaattttggactgccacacattggtacctttagttctctgaaggcccacgtttttatcattaagacctatttgttagctagtagagctttatgttcgctgtccatgaaaccttctgtaaccacagtgactacaagtagttctttctctattgaattattaggtccagaatagaagatgtcattgtacactttatttccctcacactgtgttatgctctgatgtgctatgcttagctatctgtcagagattagtaaattataaaactcatgtgtactacttaagtttatatcttatgctagtttataagaacaattaaaaggacttagaagattaa

SEQ ID NO: 418744 - DNA, 1538 bp, Homo sapiens
aatcccagcactttgggaggctaaggtgggcagatcacctgaggtcaggagtttgagaccagcctgaccaacatggagaaaccctgtctctactaaaaatacaaaattagctgctggagtgcagtggcgtgatctcagttcactgctgctttccctcctgggctcaagcagttctcccacctcagcctctcgactaacagggactataatcttgcagcaccatgccgagctaattttattttttgtagagatgagctctcactatgtcacccaggttcgtctcaaactcctgaaccctagtaattctcctatctcagcctcccaaagtgctagggttacagacatgagccactgtgcctgtctagacttgtactttcaactgtccatttctccctgtctgtcccatgggcactcatgaaaaaacagaatgctcccaactttattcatcttccaagcctgtagctcttggtatactcactgttgcaagtcagaagcttgatttcatcattgatgtttttctcacgtttcacatctcactcatcaccaagtcatgttggtgttaatttctgattaacccttgaatttaccgtcttctcatcctctgtacaaaagcctcaagtgagggtcaaattcaacattatcctgatctagacagcccccattctcaatccacccttttccaagttgattgcccaaggacttctaacaataaactctcttttgcaccacagacttctttgaaaatatacatgctgttgaccctctctgtagaaaaccgcacacataaaacttaccaacagatttcattggttcttgggttctcccgaagcctatccatggtttatagattaagaattgatgaggtagctgggcacagtggctcacacctacgatcacagcacttcgggaggctgaagcaagcagatcacttgaggtcaggagtttgagaccagcctggccaacatggtgaaaccctgtctctactaaaaatacaaaaagtagccagccgtgatgacaggcacctgtaatcccagctactcgggaggctgaggcatgagaattgcttgaacccgggaggcggaggttgcagtgagcctggatcatgccactgcactccaacctgggcagcagagcaagactctgtctcaaaaggggaaaaaaaaaattgctgatgtgacccatgaagggaactcattttcctcgtaattttggactgccacacattggtacctttagttctctgaaggcccacgtttttatcattaagacctatttgttagctagtagagctttatgttcgctgtccatgaaaccttctgtaaccacagtgactacaagtagttctttctctattgaattattaggtccagaatagaagatgtcattgtacactttatttccctcacactgtgttatgctctgatgtgctatgcttagctatctgtcagagattagtaaattataaaactcatgtgtactacttaagtttatatcttatgctagtttataagaacaattaaaaggacttagaagattaa

SEQ ID NO: 418745 - DNA, 1759 bp, Homo sapiens
ttttttcaatagaattttctatattttggatttggcttcttacatttctaggtggtggtaaacatgctcttccattccctatattttctataaactgatggtgagatctgtaataaaatcaagtttagatatttttttcccaagaattcatggtattgatttttttttttaaagtaaatgtgatcatgttacttctgtagagagaatacaattttattcttaaatattggggataaggctgggtgcagtggctcatgcctgtcatcccagcactttgggaggctgaagtgggcagatctctggaggtcaggagttcaagacctgcctggccaatatggtgaaaccccatctctactaaaaatacaaaaattacctaggcatggtggtgagcatctgtaatcccagctactcagaggctgagggactataatcttgcagcaccatgccgagctaattttattttttgtagagatgagctctcactatgtcacccaggttcgtctcaaactcctgaaccctagtaattctcctatctcagcctcccaaagtgctagggttacagacatgagccactgtgcctgtctagacttgtactttcaactgtccatttctccctgtctgtcccatgggcactcatgaaaaaacagaatgctcccaactttattcatcttccaagcctgtagctcttggtatactcactgttgcaagtcagaagcttgatttcatcattgatgtttttctcacgtttcacatctcactcatcaccaagtcatgttggtgttaatttctgattaacccttgaatttaccgtcttctcatcctctgtacaaaagcctcaagtgagggtcaaattcaacattatcctgatctagacagcccccattctcaatccacccttttccaagttgattgcccaaggacttctaacaataaactctcttttgcaccacagacttctttgaaaatatacatgctgttgaccctctctgtagaaaaccgcacacataaaacttaccaacagatttcattggttcttgggttctcccgaagcctatccatggtttatagattaagaattgatgaggtagctgggcacagtggctcacacctacgatcacagcacttcgggaggctgaagcaagcagatcacttgaggtcaggagtttgagaccagcctggccaacatggtgaaaccctgtctctactaaaaatacaaaaagtagccagccgtgatgacaggcacctgtaatcccagctactcgggaggctgaggcatgagaattgcttgaacccgggaggcggaggttgcagtgagcctggatcatgccactgcactccaacctgggcagcagagcaagactctgtctcaaaaggggaaaaaaaaaattgctgatgtgacccatgaagggaactcattttcctcgtaattttggactgccacacattggtacctttagttctctgaaggcccacgtttttatcattaagacctatttgttagctagtagagctttatgttcgctgtccatgaaaccttctgtaaccacagtgactacaagtagttctttctctattgaattattaggtccagaatagaagatgtcattgtacactttatttccctcacactgtgttatgctctgatgtgctatgcttagctatctgtcagagattagtaaattataaaactcatgtgtactacttaagtttatatcttatgctagtttataagaacaattaaaaggacttagaagattaa

SEQ ID NO: 418746 - DNA, 1187 bp, Homo sapiens
ccatgggcactcatgaataaagttgggagcattctgttttttcatgagtgcccatgggcactcatgaaaaaacagaatgctcccaactttattcatcttccaagcctgtagctcttggtatactcactgttgcaagtcagaagcttgatttcatcattgatgtttttctcacgtttcacatctcactcatcaccaagtcatgttggtgttaatttctgattaacccttgaatttaccgtcttctcatcctctgtacaaaagcctcaagtgagggtcaaattcaacattatcctgatctagacagcccccattctcaatccacccttttccaagttgattgcccaaggacttctaacaataaactctcttttgcaccacagacttctttgaaaatatacatgctgttgaccctctctgtagaaaaccgcacacataaaacttaccaacagatttcattggttcttgggttctcccgaagcctatccatggtttatagattaagaattgatgaggtagctgggcacagtggctcacacctacgatcacagcacttcgggaggctgaagcaagcagatcacttgaggtcaggagtttgagaccagcctggccaacatggtgaaaccctgtctctactaaaaatacaaaaagtagccagccgtgatgacaggcacctgtaatcccagctactcgggaggctgaggcatgagaattgcttgaacccgggaggcggaggttgcagtgagcctggatcatgccactgcactccaacctgggcagcagagcaagactctgtctcaaaaggggaaaaaaaaaattgctgatgtgacccatgaagggaactcattttcctcgtaattttggactgccacacattggtacctttagttctctgaaggcccacgtttttatcattaagacctatttgttagctagtagagctttatgttcgctgtccatgaaaccttctgtaaccacagtgactacaagtagttctttctctattgaattattaggtccagaatagaagatgtcattgtacactttatttccctcacactgtgttatgctctgatgtgctatgcttagctatctgtcagagattagtaaattataaaactcatgtgtactacttaagtttatatcttatgctagtttataagaacaattaaaaggacttagaagattaa

SEQ ID NO: 418747 - DNA, 943 bp, Homo sapiens
agcggccgctcgcgatctagaacgtgagggtcaaattcaacattatcctgatctagacagcccccattctcaatccacccttttccaagttgattgcccaaggacttctaacaataaactctcttttgcaccacagacttctttgaaaatatacatgctgttgaccctctctgtagaaaaccgcacacataaaacttaccaacagatttcattggttcttgggttctcccgaagcctatccatggtttatagattaagaattgatgaggtagctgggcacagtggctcacacctacgatcacagcacttcgggaggctgaagcaagcagatcacttgaggtcaggagtttgagaccagcctggccaacatggtgaaaccctgtctctactaaaaatacaaaaagtagccagccgtgatgacaggcacctgtaatcccagctactcgggaggctgaggcatgagaattgcttgaacccgggaggcggaggttgcagtgagcctggatcatgccactgcactccaacctgggcagcagagcaagactctgtctcaaaaggggaaaaaaaaaattgctgatgtgacccatgaagggaactcattttcctcgtaattttggactgccacacattggtacctttagttctctgaaggcccacgtttttatcattaagacctatttgttagctagtagagctttatgttcgctgtccatgaaaccttctgtaaccacagtgactacaagtagttctttctctattgaattattaggtccagaatagaagatgtcattgtacactttatttccctcacactgtgttatgctctgatgtgctatgcttagctatctgtcagagattagtaaattataaaactcatgtgtactacttaagtttatatcttatgctagtttataagaacaattaaaaggacttagaagattaa

SEQ ID NO: 418748 - DNA, 910 bp, Homo sapiens
ttttttcaatagaattttctatattttggatttggcttcttacatttctaggtggtggtaaacatgctcttccattccctatattttctataaactgatggtgagatctgtaataaaatcaagtttagatatttttttcccaagaattcatggtattgatttttttttttaaagtaaatgtgatcatgttacttctgtagagagaatacaattttattcttaaatattggggataaggctgggtgcagtggctcatgcctgtcgatcacagcacttcgggaggctgaagcaagcagatcacttgaggtcaggagtttgagaccagcctggccaacatggtgaaaccctgtctctactaaaaatacaaaaagtagccagccgtgatgacaggcacctgtaatcccagctactcgggaggctgaggcatgagaattgcttgaacccgggaggcggaggttgcagtgagcctggatcatgccactgcactccaacctgggcagcagagcaagactctgtctcaaaaggggaaaaaaaaaattgctgatgtgacccatgaagggaactcattttcctcgtaattttggactgccacacattggtacctttagttctctgaaggcccacgtttttatcattaagacctatttgttagctagtagagctttatgttcgctgtccatgaaaccttctgtaaccacagtgactacaagtagttctttctctattgaattattaggtccagaatagaagatgtcattgtacactttatttccctcacactgtgttatgctctgatgtgctatgcttagctatctgtcagagattagtaaattataaaactcatgtgtactacttaagtttatatcttatgctagtttataagaacaattaaaaggacttagaagattaa

SEQ ID NO: 418749 - DNA, 1027 bp, Homo sapiens
agctgtatttgctgcacgtggaaatctccgttattttccagcacccaacagtagcgtaatgggagtaacggacttaacctcatttctctttcagagcatttagccttcatatgcccttccctgcatgcttcccccaggccgtcaagacttgagttctgcctcgcttcccggcgcggtcgcagccctcagcccacttaggataatggcgacagctgaggtactgaacattggtaaaaaattatatgagggtaaaacaaaagaagtctacgaattgttagacagtccaggaaaagtcctcctgcagtccaaggaccagattacagcaggaaatgcagctagaaaaaaccacctggaaggaaaagctgcaatctcaaataaaatcaccagttgtatttttcagttattacaggaagcaggtattaaaactgccttcaccagaaaatgtggggagacagctttcattgcaccgcagtgtgaaatgattccaattgaatgggtttgcagaagaatagcaactggttcttttctcaaaagaaatcctggtgtcaaggaaggatataagttttacccacctaaagtggagttgtttttcaagcactgcactccaacctgggcagcagagcaagactctgtctcaaaaggggaaaaaaaaaattgctgatgtgacccatgaagggaactcattttcctcgtaattttggactgccacacattggtacctttagttctctgaaggcccacgtttttatcattaagacctatttgttagctagtagagctttatgttcgctgtccatgaaaccttctgtaaccacagtgactacaagtagttctttctctattgaattattaggtccagaatagaagatgtcattgtacactttatttccctcacactgtgttatgctctgatgtgctatgcttagctatctgtcagagattagtaaattataaaactcatgtgtactacttaagtttatatcttatgctagtttataagaacaattaaaaggacttagaagattaa

SEQ ID NO: 418750 - DNA, 1175 bp, Homo sapiens
ggcgggaagccagtggggcgttgtttcgtccgatatccgcgtttcagtctccgcccatacccctccgggttaggcggctgtagcggagctcgaaaagagtggcgcagggtcgcgcggccccgcctccttccccgcccagcgaagctctctgaccacccctcttttctagagttctgcctcgcttcccggcgcggtcgcagccctcagcccacttaggataatggcgacagctgaggtactgaacattggtaaaaaattatatgagggtaaaacaaaagaagtctacgaattgttagacagtccaggaaaagtcctcctgcagtccaaggaccagattacagcaggaaatgcagctagaaaaaaccacctggaaggaaaagctgcaatctcaaataaaatcaccagttgtatttttcagttattacaggaagcaggtaagcagctccctcaaagtctcttctctcaccttctctggtaagcatgtcgatgtctttcatgtgaagttggcattaatatgaacaacttgtttgcacgatgtctcaaaagctaagtgaatttaaatcaaacccagaacccttaaacttcactataacaccttatctggtttgggattattagtatcattgaattaaaaggaatcttaacaagtttgctgtaatctttatctggcacatgcactctctgtgcagcttacctctccaaggccatcttcactttaaggaatttaactatgaaggaaacccattttaatgttaagccgttctaacatgaagaactgaaatttactccctgtaattctatacaaatggtctttgttctgcctctgggagataatacagaatttcaattcctcttccacttgaaagccctgaaaagtagttgaagacagcaaccaaaccttctcctcctgccattccccaagtgagatatttgaactaaaaccccagagcgccctcctgttcaaaaactgaatgaaggctctattttcaatagagaaatagattcaaaagaccaaatgaagatcagaacattgtgtggtgggtatttgaagcaaagggaaggaaattaggataaaggggttttctgcagggattcagtcagttgctggttggtctgtagtatatgaaatttcagctaggaaaagatttgaactcttgccacacagtgtaaatagc

SEQ ID NO: 418751 - DNA, 252 bp, Homo sapiens
cattcaatgaaatacaacattcacatcaagtgaatcactcacatcgtcttggtgtggtggctcatgcctgtaatcccagcacttggggaggctgtggtgggaggattgcttgagcccaggagttccagaccagcttgggcaacacggcaagatccccgtctctttcctcacgtttgcttctctgccagaatgtcttcccgcactttccccagaacccaagttctcctaatcatctttcaagatccctttccc

SEQ ID NO: 418752 - DNA, 400 bp, Homo sapiens
aattttactacaaactctagctcatttattcatttttgtttttatgttcttttcatatccacgtattttttcttcagttgcttttgaaatcagaaagtcagtgcagggttgtagtgttgatgggctctacttctgatcttggtcactgtgaaaaaatcaagaaggcctgtggaaattttggcattccatgtgaacttcgagtaacatctgcgcataaaggaccagatgaaactctgaggattaaagctgagtatgaaggtaaaccacaagtaatatggacatttcaggtatttctgattttgctaaaagtaattacacactttagactaataatgctgaaaaaagagctttgtcagttttctaagggaaaaacacatgatatactaggctttcttttttt

SEQ ID NO: 418753 - DNA, 1307 bp, Homo sapiens
ggcgggaagccagtggggcgttgtttcgtccgatatccgcgtttcagtctccgcccatacccctccgggttaggcggctgtagcggagctcgaaaagagtggcgcagggtcgcgcggccccgcctccttccccgcccagcgaagctctctgaccacccctcttttctagagttctgcctcgcttcccggcgcggtcgcagccctcagcccacttaggataatggcgacagctgaggtactgaacattggtaaaaaattatatgagggtaaaacaaaagaagtctacgaattgttagacagtccaggaaaagtcctcctgcagtccaaggaccagattacagcaggaaatgcagctagaaaaaaccacctggaaggaaaagctgcaatctcaaataaaatcaccagttgtatttttcagttattacaggaagcaggtattaaaactgccttcaccagaaaatgtggggagacagctttcattgcaccgcagtgtgaaatgattccaattgaatgggtttgcagaagaatagcaactggttcttttctcaaaagaaatcctggtgtcaaggaaggatataagttttacccacctaaagtggagttgtttttcaaggatgatgccaataatgacccacagtggtctgaggaacagctgattgctgcaaaattttgctttgctggacttcttataggccagactgaagtggatatcatgagtcatgctacacaggctatatttgaaatactggagaaatcctggttgccccagaattgtacactggttgatatgaagattgaatttggtgttgatgtaaccaccaaagaaattgttcttgctgatgttattgacaatgattcctggagactctggccatcaggagatcgaagccaacagaaagacaaacaggtagataatgcttcaggtttttttatcctttttgagatcaagctgagattagccagtcgtgatgacaggcacctgtaatcccagctactcgggaggctgaggcatgagaattgcttgaacccgggaggcggaggttgcagtgagcctggatcgtgccactgcactccaacctgggcagcagagcaagactatcgtcttggtgtggtggctcatgcctgtaatcccagcacttggggaggctgtggtgggaggattgcttgagcccaggagttccagaccagcttgggcaacacggcaagatccccgtctctttcctcacgtttgcttctctgccagaatgtcttcccgcactttccccagaacccaagttctcctaatcatctttcaagatccctttccc

SEQ ID NO: 418754 - DNA, 765 bp, Homo sapiens
ggcgggaagccagtggggcgttgtttcgtccgatatccgcgtttcagtctccgcccatacccctccgggttaggcggctgtagcggagctcgaaaagagtggcgcagggtcgcgcggccccgcctccttccccgcccagcgaagctctctgaccacccctcttttctagagttctgcctcgcttcccggcgcggtcgcagccctcagcccacttaggataatggcgacagctgaggtactgaacattggtaaaaaattatatgagggtaaaacaaaagaagtctacgaattgttagacagtccaggaaaagtcctcctgcagtccaaggaccagattacagcaggaaatgcagctagaaaaaaccacctggaaggaaaagctgcaatctcaaataaaatcaccagttgtatttttcagttattacaggaagcaggtattaaaactgccttcaccagaaaatgtggggagacagctttcattgcaccgcagtgtgaaatgattccaattgaatgggtttgcagaagaatagcaactggttcttttctcaaaagaaatcctggtgtcaaggaaggatataagttttacccacctaaagtggagttgtttttcaaggatgatgccaataatgacccacagtggtctgaggaacagctgattgctgcaaaattttgctttgctggacttcttataggccagactgaagtggatatcatttctccagtatttcaaatatagcctgtgtagcatgactccccacgcgtccg

SEQ ID NO: 418755 - DNA, 363 bp, Homo sapiens
ggacgcgtgggtcgacccacgcagttctgcctcgcttcccggcgcggtcgcagccctcagcccacttaggataatggcgacagctgaggtactgaacattggtaaaaaattatatgagggtaaaacaaaagaagtctacgaattgttagacagtccaggaaaagtcctcctgcagtccaaggaccagattacagcaggaaatgcagctagaaaaaaccacctggaaggaaaagctgcaatctcaaataaaatcaccagttgtatttttcagttattacaggaagcaggtaccactgctcttaaccagacaattcgggtgagtgatgatttgatcgaagcagtcactccccgatcaggacactc

SEQ ID NO: 418756 - DNA, 910 bp, Homo sapiens
cacagtgcgcatgtgtgcggctgtgctttggctcttcgggtaaagatggcggagcgcgggtacagcttttcgctgactacattcagcccgtctggtaaacttgtccagattgaatatgctttggctgctgtagctggaggagccccgtccgtgggaattaaagctgcaaatggtgtggtattagcaactgagaaaaaacagaaatccattctgtatgatgagcgaagtgtacacaaagtagaaccaattaccaagcatataggtttggtgtacagtggcatgggccccgattacagagtgcttgtgcacagagctcgaaaactagctcaacaatactatcttgtgtaccaagaacccattcctacagctcagctggtacagagagtagcttctgtgatgcaagaatatactcagtcaggtggtgttcgtccatttggagtttctttacttatttgtggttggaatgagggacgaccatatttatttcagtcagatccatctggagcttactttgcctggaaagctacagcaatgggaaagaactatgtgaatgggaagactttccttgagaaaagatataatgaagatctggaacttgaagatgccattcatacagccatcttaaccctaaaggaaagctttgaagggcaaatgacagaggataacatagaagttggaatctgcaatgaagctggatttaggaggcttactccaactgaagttaaggattacttggctgccatagcataacaatgaagtgactgaaaaatccagaatttcagataatctatctacttaaacatgtttaaagtatgttttgttttgcagactttttgcatacttatttctacatggtttaaatcgactgtttttaaaatgacacttataaatcctaataaactgttaaacc

SEQ ID NO: 418757 - DNA, 887 bp, Homo sapiens
  misc_feature (47)..(47): n is a, c, g, or t
ataggctaggtgcgaggcctgggtggtgggagcgcgggtcagctttncgctgactacattcagcccgtctggtaaacttgtccagattgaatatgctttggctgctgtagctggaggagccccgtccgtgggaattaaagctgcaaatggtgtggtattagcaactgagaaaaaacagaaatccattctgtatgatgagcgaagtgtacacaaagtagaaccaattaccaagcatataggtttggtgtacagtggcatgggccccgattacagagtgcttgtgcacagagctcgaaaactagctcaacaatactatcttgtgtaccaagaacccattcctacagctcagctggtacagagagtagcttctgtgatgcaagaatatactcagtcaggtggtgttcgtccatttggagtttctttacttatttgtggttggaatgagggacgaccatatttatttcagtcagatccatctggagcttactttgcctggaaagctacagcaatgggaaagaactatgtgaatgggaagactttccttgagaaaagatataatgaagatctggaacttgaagatgccattcatacagccatcttaaccctaaaggaaagctttgaagggcaaatgacagaggataacatagaagttggaatctgcaatgaagctggatttaggaggcttactccaactgaagttaaggattacttggctgccatagcataacaatgaagtgactgaaaaatccagaatttcagataatctatctacttaaacatgtttaaagtatgttttgttttgcagactttttgcatacttatttctacatggtttaaatcgactgtttttaaaatgacacttataaatcctaataaactgttaaacc

SEQ ID NO: 418758 - DNA, 1524 bp, Homo sapiens
  misc_feature (1511)..(1511): n is a, c, g, or t
cacagtgcgcatgtgtgcggctgtgctttggctcttcgggtaaagatggcggagcgcgggtacagcttttcgctgactacattcagcccgtctggtaaacttgtccagattgaatatgctttggctgctgtagctggaggagccccgtccgtgggaattaaagctgcaaatggtgtggtattagcaactgagaaaaaacagaaatccattctgtatgatgagcgaagtgtacacaaagtagaaccaattaccaagcatataggtttggtgtacagtggcatgggccccgattacagagtgcttgtgcacagagctcgaaaactagctcaacaatactatcttgtgtaccaagaacccattcctacagctcagctggtacagagagtagcttctgtgatgcaagaatatactcagtcaggtggtgttcgtccatttggagtttctttacttatttgtggttggaatgagggacgaccatatttatttcagtcagatccatctggagcttactttgcctggaaagctacagcaatgggaaagaactatgtgaatgggaagactttccttgagaaaagatataatgaagatctggaacttgaagatgccattcatacagccatcttaaccctaaaggaaagctttgaagggcaaatgacagaggataacatagaagttggaatctgcaatgaagctggatttaggaggcttactccaactgaagttaaggattacttggctgccatagcataacaatgaagtgactgaaaaatccagaatttcagataatctatctacttaaacatgtttaaagtatgttttgttttgcagactttttgcatacttatttctacatggtttaaatcgactgtttttaaaatgacacttataaatcctaataaactgttaaacccaccttccagccttttaggagttgctaaaattttaacagttatttcctgctttttatcacagttgatttctgaagactacattgccaagcagaatgatgaaatgactttttcgttgtcaggcaattttggttaagtcaaatcttaatgccctcttcgctatcagatgttgcctgtgtttccataaagcaaaatgctgattttggtaaaaaacatgactgcttctagagctgggaggatctgcagactttcacggattcatggaacaagaaaagaagcataggtacttttaggtgccattaggtattgatcagtgaaatcctagggtgctctatgagattgtactaggcctatgaagagtggtaagccaaataggtctccatgggagatacattatgtaaataaataaacaatggtttgctggttcctgttggtgtctccacaagtaggtaaacatgtttaaaggaacccgggttcttagattttgttagactttttaaactcaaggatgagcataagtgcttgaaataaaatgctaatacttaagtgtcaaaaaaaaaaaaaaaaaaaaaaaaaaaaaaaaggggggggggggggaaaaancccccgggggggg

SEQ ID NO: 418759 - DNA, 1440 bp, Homo sapiens
  misc_feature (47)..(47): n is a, c, g, or t
ataggctaggtgcgaggcctgggtggtgggagcgcgggtcagctttncgctgactacattcagcccgtctggtaaacttgtccagattgaatatgctttggctgctgtagctggaggagccccgtccgtgggaattaaagctgcaaatggtgtggtattagcaactgagaaaaaacagaaatccattctgtatgatgagcgaagtgtacacaaagtagaaccaattaccaagcatataggtttggtgtacagtggcatgggccccgattacagagtgcttgtgcacagagctcgaaaactagctcaacaatactatcttgtgtaccaagaacccattcctacagctcagctggtacagagagtagcttctgtgatgcaagaatatactcagtcaggtggtgttcgtccatttggagtttctttacttatttgtggttggaatgagggacgaccatatttatttcagtcagatccatctggagcttactttgcctggaaagctacagcaatgggaaagaactatgtgaatgggaagactttccttgagaaaagatataatgaagatctggaacttgaagatgccattcatacagccatcttaaccctaaaggaaagctttgaagggcaaatgacagaggataacatagaagttggaatctgcaatgaagctggatttaggaggcttactccaactgaagttaaggattacttggctgccatagcataacaatgaagtgactgaaaaatccagaatttcagataatctatctacttaaacatgtttaaagtatgttttgttttgcagactttttgcatacttatttctacatggtttaaatcgactgtttttaaaatgacacttataaatcctaataaactgttaaacccaccttccagccttttaggagttgctaaaattttaacagttatttcctgctttttatcacagttgatttctgaagactacattgccaagcagaatgatgaaatgactttttcgttgtcaggcaattttggttaagtcaaatcttaatgccctcttcgctatcagatgttgcctgtgtttccataaagcaaaatgctgattttggtaaaaaacatgactgcttctagagctgggaggatctgcagactttcacggattcatggaacaagaaaagaagcataggtacttttaggtgccattaggtattgatcagtgaaatcctagggtgctctatgagattgtactaggcctatgaagagtggtaagccaaataggtctccatgggagatacattatgtaaataaataaacaatggtttgctggttcctgttggtgtctccacaagtaggtaaacatgtttaaaggaacccgggttcttagattttgttagactttttaaactcaaggatgagcataagtgcttgaaataaaatgctaatacttaagtgtcaaaa

SEQ ID NO: 418760 - DNA, 1441 bp, Homo sapiens
  misc_feature (31)..(31): n is a, c, g, or t
  misc_feature (35)..(35): n is a, c, g, or t
cggacgcgtgggtcgacccacgcgtcgcggngcgngggtacagcttttcgctgactacattcagcccgtctggtaaacttgtccagattgaatatgctttggctgctgtagctggaggagccccgtccgtgggaattaaagctgcaaatggtgtggtattagcaactgagaaaaaacagaaatccattctgtatgatgagcgaagtgtacacaaagtagaaccaattaccaagcatataggtttggtgtacagtggcatgggccccgattacagagtgcttgtgcacagagctcgaaaactagctcaacaatactatcttgtgtaccaagaacccattcctacagctcagctggtacagagagtagcttctgtgatgcaagaatatactcagtcaggtggtgttcgtccatttggagtttctttacttatttgtggttggaatgagggacgaccatatttatttcagtcagatccatctggagcttactttgcctggaaagctacagcaatgggaaagaactatgtgaatgggaagactttccttgagaaaagatataatgaagatctggaacttgaagatgccattcatacagccatcttaaccctaaaggaaagctttgaagggcaaatgacagaggataacatagaagttggaatctgcaatgaagctggatttaggaggcttactccaactgaagttaaggattacttggctgccatagcataacaatgaagtgactgaaaaatccagaatttcagataatctatctacttaaacatgtttaaagtatgttttgttttgcagactttttgcatacttatttctacatggtttaaatcgactgtttttaaaatgacacttataaatcctaataaactgttaaacccaccttccagccttttaggagttgctaaaattttaacagttatttcctgctttttatcacagttgatttctgaagactacattgccaagcagaatgatgaaatgactttttcgttgtcaggcaattttggttaagtcaaatcttaatgccctcttcgctatcagatgttgcctgtgtttccataaagcaaaatgctgattttggtaaaaaacatgactgcttctagagctgggaggatctgcagactttcacggattcatggaacaagaaaagaagcataggtacttttaggtgccattaggtattgatcagtgaaatcctagggtgctctatgagattgtactaggcctatgaagagtggtaagccaaataggtctccatgggagatacattatgtaaataaataaacaatggtttgctggttcctgttggtgtctccacaagtaggtaaacatgtttaaaggaacccgggttcttagattttgttagactttttaaactcaaggatgagcataagtgcttgaaataaaatgctaatacttaagtgtcaaaa

SEQ ID NO: 418761 - DNA, 1020 bp, Homo sapiens
  misc_feature (1007)..(1007): n is a, c, g, or t
cacagtgcgcatgtgtgcggctgtgctttggctcttcgggtaaagatggcggagcgcgggtacagcttttcgctgactacattcagcccgtctggtaaacttgtccagattgaatatgctttggctgctgtagctggaggagccccgtccgtgggaattaaagctgcaaatggtgtggtattagcaactgagaaaaaacagaaatccattctgtatgatgagcgaagtgtacacaaagtagaaccaattaccaagcatataggtttggtgtacagtggcatgggccccgattacagagtgcttgtgcacagagctcgaaaactagctcaacaatactatcttgtgtaccaagaacccattcctacagctcagctggtacagagagtagcttctgtgatgcaagaatatactcagtcaggtggtgttcgtccatttggagtttctttacttatttgtggttggaatgagggacgaccatatttatttcagtcagatccatctggagcttactttgcctggaaagctacagcaatgggaaagaactatgtgaatgggaagactttccttgagaaaagatataatgaagatctggaacttgaagatgccattcatacagccatcttaaccctaaaggaaagctttgaagggcaaatgacagaggataacatagaagttggaatctgcaatgaagctggatttaggaggcttactccaactgaagttaaggattacttggctgccatagcataacaatgaagtgactgaaaaatccagaatttcagataatctatctacttaaacatgtttaaagtatgttttgttttgcagactttttgcatacttatttctacatggtttaaatcgactgtttttaaaatgacacttataaatcctaataaactgttaaaccaaaaaaaaaaaaaaaaaaaaaaaaaaaaaaaaaaaaaaaaaaaaaaaaaaaaaaaaaaaaaaaaaaaaaaaaaaaaaggggggggggggggaaaaancccccgggggggg

SEQ ID NO: 418762 - DNA, 971 bp, Homo sapiens
  misc_feature (958)..(958): n is a, c, g, or t
cacagtgcgcatgtgtgcggctgtgctttggctcttcgggtaaagatggcggagcgcgggtacagcttttcgctgactacattcagcccgtctggtaaacttgtccagattgaatatgctttggctgctgtagctggaggagccccgtccgtgggaattaaagctgcaaatggtgtggtattagcaactgagaaaaaacagaaatccattctgtatgatgagcgaagtgtacacaaagtagaaccaattaccaagcatataggtttggtgtacagtggcatgggccccgattacagagtgcttgtgcacagagctcgaaaactagctcaacaatactatcttgtgtaccaagaacccattcctacagctcagctggtacagagagtagcttctgtgatgcaagaatatactcagtcaggtggtgttcgtccatttggagtttctttacttatttgtggttggaatgagggacgaccatatttatttcagtcagatccatctggagcttactttgcctggaaagctacagcaatgggaaagaactatgtgaatgggaagactttccttgagaaaagatataatgaagatctggaacttgaagatgccattcatacagccatcttaaccctaaaggaaagctttgaagggcaaatgacagaggataacatagaagttggaatctgcaatgaagctggatttaggaggcttactccaactgaagttaaggattacttggctgccatagcataacaatgaagtgactgaaaaatccagaatttcagataatctatctacttaaacatgtttaaagtatgttttgttttgcagactttttgcatacttatttctacatggtttaaatcgactgtttttaaaatgacacttataaatcctaataaactgttaaaccaaaaaaaaaaaaaaaaaaaaaaaaaaaaggggggggggggggaaaaancccccgggggggg

SEQ ID NO: 418763 - DNA, 856 bp, Homo sapiens
cacagtgcgcatgtgtgcggctgtgctttggctcttcgggtaaagatggcggagcgcgggtacagcttttcgctgactacattcagcccgtctggtaaacttgtccagattgaatatgctttggctgctgtagctggaggagccccgtccgtgggaattaaagctgcaaatggtgtggtattagcaactgagaaaaaacagaaatccattctgtatgatgagcgaagtgtacacaaagtagaaccaattaccaagcatataggtttggtgtacagtggcatgggccccgattacagagtgcttgtgcacagagctcgaaaactagctcaacaatactatcttgtgtaccaagaacccattcctacagctcagctggtacagagagtagcttctgtgatgcaagaatatactcagtcaggtggtgttcgtccatttggagtttctttacttatttgtggttggaatgagggacgaccatatttatttcagtcagatccatctggagcttactttgcctggaaagctacagcaatgggaaagaactatgtgaatgggaagactttccttgagaaaagatataatgaagatctggaacttgaagatgccattcatacagccatcttaaccctaaaggaaagctttgaagggcaaatgacagaggataacatagaagttggaatctgcaatgaagctggatttaggaggcttactccaactgaagttaaggattacttggctgccatagcataacaatgaagtgactgagttttgcagactttttgcatacttatttctacatggtttaaatcgactgtttttaaaatgacacttataaatcctaataaactgttaaacc

SEQ ID NO: 418764 - DNA, 1405 bp, Homo sapiens
cacagtgcgcatgtgtgcggctgtgctttggctcttcgggtaaagatggcggagcgcgggtacagcttttcgctgactacattcagcccgtctggtaaacttgtccagattgaatatgctttggctgctgtagctggaggagccccgtccgtgggaattaaagctgcaaatggtgtggtattagcaactgagaaaaaacagaaatccattctgtatgatgagcgaagtgtacacaaagtagaaccaattaccaagcatataggtttggtgtacagtggcatgggccccgattacagagtgcttgtgcacagagctcgaaaactagctcaacaatactatcttgtgtaccaagaacccattcctacagctcagctggtacagagagtagcttctgtgatgcaagaatatactcagtcaggtggtgttcgtccatttggagtttctttacttatttgtggttggaatgagggacgaccatatttatttcagtcagatccatctggagcttactttgcctggaaagctacagcaatgggaaagaactatgtgaatgggaagactttccttgagaaaaggaaagctttgaagggcaaatgacagaggataacatagaagttggaatctgcaatgaagctggatttaggaggcttactccaactgaagttaaggattacttggctgccatagcataacaatgaagtgactgaaaaatccagaatttcagataatctatctacttaaacatgtttaaagtatgttttgttttgcagactttttgcatacttatttctacatggtttaaatcgactgtttttaaaatgacacttataaatcctaataaactgttaaacccaccttccagccttttaggagttgctaaaattttaacagttatttcctgctttttatcacagttgatttctgaagactacattgccaagcagaatgatgaaatgactttttcgttgtcaggcaattttggttaagtcaaatcttaatgccctcttcgctatcagatgttgcctgtgtttccataaagcaaaatgctgattttggtaaaaaacatgactgcttctagagctgggaggatctgcagactttcacggattcatggaacaagaaaagaagcataggtacttttaggtgccattaggtattgatcagtgaaatcctagggtgctctatgagattgtactaggcctatgaagagtggtaagccaaataggtctccatgggagatacattatgtaaataaataaacaatggtttgctggttcctgttggtgtctccacaagtaggtaaacatgtttaaaggaacccgggttcttagattttgttagactttttaaactcaaggatgagcataagtgcttgaaataaaatgctaatacttaagtgtcaaaa

SEQ ID NO: 418765 - DNA, 701 bp, Homo sapiens
  misc_feature (592)..(592): n is a, c, g, or t
  misc_feature (612)..(612): n is a, c, g, or t
  misc_feature (653)..(653): n is a, c, g, or t
  misc_feature (666)..(666): n is a, c, g, or t
  misc_feature (695)..(695): n is a, c, g, or t
cacagtgcgcatgtgtgcggctgtgctttggctcttcgggtaaagatggcggagcgcgggtacagcttttcgctgactacattcagcccgtctggtaaacttgtccagattgaatatgctttggctgctgtagctggaggagccccgtccgtgggaattaaagctgcaaatggtgtggtattagcaactgagaaaaaacagaaatccattctgtatgatgagcgaagtgtacacaaagtagaaccaattaccaagcatataggtttggtgtacagtggcatgggccccgattacagagtgcttgtgcacagagctcgaaaactagctcaacaatactatcttgtgtaccaagaacccattcctacagctcagctggtacagagagtagcttctgtgatgcaagaatatactcagtcaggtggtgttcgtccatttggagtttctttacttatttgtggttggaatgagggacgaccatatttatttcagtcagatccatctggagcttactttgcctggaaagctacagcaatgggaaagaactatgtgaatgggaagactttccttgagaaaagatattaatgaagatctngggaactttgaaggatgccntttcattacagccatctttaaccctaaagggaaagcttttnaagggggcaaatnacagagggataacataggaagtttgggantcttgc

SEQ ID NO: 418766 - DNA, 926 bp, Homo sapiens
  misc_feature (778)..(779): n is a, c, g, or t
  misc_feature (781)..(781): n is a, c, g, or t
  misc_feature (784)..(784): n is a, c, g, or t
  misc_feature (792)..(792): n is a, c, g, or t
  misc_feature (795)..(795): n is a, c, g, or t
  misc_feature (803)..(803): n is a, c, g, or t
  misc_feature (809)..(810): n is a, c, g, or t
  misc_feature (815)..(815): n is a, c, g, or t
  misc_feature (824)..(824): n is a, c, g, or t
  misc_feature (828)..(828): n is a, c, g, or t
  misc_feature (833)..(833): n is a, c, g, or t
  misc_feature (840)..(840): n is a, c, g, or t
  misc_feature (844)..(844): n is a, c, g, or t
  misc_feature (866)..(866): n is a, c, g, or t
  misc_feature (870)..(871): n is a, c, g, or t
  misc_feature (878)..(878): n is a, c, g, or t
  misc_feature (880)..(880): n is a, c, g, or t
cacagtgcgcatgtgtgcggctgtgctttggctcttcgggtaaagatggcggagcgcgggtacagcttttcgctgactacattcagcccgtctggtaaacttgtccagattgaatatgctttggctgctgtagctggaggagccccgtccgtgggaattaaagctgcaaatggtgtggtattagcaactgagaaaaaacagaaatccattctgtatgatgagcgaagtgtacacaaagtagaaccaattaccaagcatataggtttggtgtacagtggcatgggccccgattacagagtgcttgtgcacagagctcgaaaactagctcaacaatactatcttgtgtaccaagaacccattcctacagctcagctggtacagagagtagcttctgtgatgcaagaatatactcagtcaggtggtgttcgtccatttggagtttctttacttatttgtggttggaatgagggacgaccatatttatttcagtcagatccatctggagcttactttgcctggaaagctacagcaatgggaaagaactatgtgaatgggaagactttccttgagaaaagatataatgaagatctggaacttgaagatgccattcatacagccatcttaaccctaaaggaaagctttgaagggcaaatgacagaggataacatagaagttggaatctgcaatgaagctggatttaggaggcttactccaactgaagttaaggattacttggctgccatagcataacaatgaagtgactgaatcgaattgatanntnttntaactttngtnttggtggnagttgnnacttntcacggtancggngaagncttactntagngccaaaaaaaaaaaatgggggncgannaatgggngngaaaaggtgtgacgcggggcaaccacccgcatgttagtcctccgta

SEQ ID NO: 418767 - DNA, 1463 bp, Homo sapiens
cacagtgcgcatgtgtgcggctgtgctttggctcttcgggtaaagatggcggagcgcgggtacagcttttcgctgactacattcagcccgtctggtaaacttgtccagattgaatatgctttggctgctgtagctggaggagccccgtccgtgggaattaaagctgcaaatggtgtggtattagcaactgagaaaaaacagaaatccattctgtatgatgagcgaagtgtacacaaagtagaaccaattaccaagcatataggtttggtgtacagtggcatgggccccgattacagagtgcttgtgcacagagctcgaaaactagctcaacaatactatcttgtgtaccaagaacccattcctacagctcagctggtacagagagtagcttctgtgatgcaagaatatactcagtcaggtggtgttcgtccatttggagtttctttacttatttgtggttggaatgagggacgaccatatttatttcagtcagatccatctggagcttactttgcctggaaagctacagcaatgggaaagaactatgtgaatgggaagactttccttgagaaaagatataatgaagatctggaacttgaagatgccattcatacagccatcttaaccctaaaggaaagctttgaagggcaaatgacagaggataacatagaagttggaatctgcaatgaagctggatttaggaggcttactccaactgaagttaaggattacttggctgccatagcataacaatgaagtgactgaaaaatccagaatttcagataatctatctacttaaacatgtttaaagtatgttttgttttgcagactttttgcatacttatttctacatggtttaaatcgactgtttttaaaatgacacttataaatcctaataaactgttaaacccaccttccagccttttaggagttgctaaaattttaacagttatttcctgctttttatcacagttgatttctgaagactacattgccaagcagaatgatgaaatgactttttcgttgtcaggcaattttggttaagtcaaatcttaatgccctcttcgctatcagatgttgcctgtgtttccataaagcaaaatgctgattttggtaaaaaacatgactgcttctagagctgggaggatctgcagactttcacggattcatggaacaagaaaagaagcataggtacttttaggtgccattaggtattgatcagtgaaatcctagggtgctctatgagattgtactaggcctatgaagagtggtaagccaaataggtctccatgggagatacattatgtaaataaataaacaatggtttgctggttcctgttggtgtctccacaagtaggtaaacatgtttaaaggaacccgggttcttagattttgttagactttttaaactcaaggatgagcataagtgcttgaaataaaatgctaatacttaagtgtcaaaa

SEQ ID NO: 418768 - DNA, 1509 bp, Homo sapiens
gcatgacgagaccgcgctacttgtagcaacttacgagtttcagtggcggaacggaatatgcccggaattcggccatacggccggggtaaagatggcggagcgcgggtacagcttttcgctgactacattcagcccgtctggtaaacttgtccagattgaatatgctttggctgctgtagctggaggagccccgtccgtgggaattaaagctgcaaatggtgtggtattagcaactgagaaaaaacagaaatccattctgtatgatgagcgaagtgtacacaaagtagaaccaattaccaagcatataggtttggtgtacagtggcatgggccccgattacagagtgcttgtgcacagagctcgaaaactagctcaacaatactatcttgtgtaccaagaacccattcctacagctcagctggtacagagagtagcttctgtgatgcaagaatatactcagtcaggtggtgttcgtccatttggagtttctttacttatttgtggttggaatgagggacgaccatatttatttcagtcagatccatctggagcttactttgcctggaaagctacagcaatgggaaagaactatgtgaatgggaagactttccttgagaaaagatataatgaagatctggaacttgaagatgccattcatacagccatcttaaccctaaaggaaagctttgaagggcaaatgacagaggataacatagaagttggaatctgcaatgaagctggatttaggaggcttactccaactgaagttaaggattacttggctgccatagcataacaatgaagtgactgaaaaatccagaatttcagataatctatctacttaaacatgtttaaagtatgttttgttttgcagactttttgcatacttatttctacatggtttaaatcgactgtttttaaaatgacacttataaatcctaataaactgttaaacccaccttccagccttttaggagttgctaaaattttaacagttatttcctgctttttatcacagttgatttctgaagactacattgccaagcagaatgatgaaatgactttttcgttgtcaggcaattttggttaagtcaaatcttaatgccctcttcgctatcagatgttgcctgtgtttccataaagcaaaatgctgattttggtaaaaaacatgactgcttctagagctgggaggatctgcagactttcacggattcatggaacaagaaaagaagcataggtacttttaggtgccattaggtattgatcagtgaaatcctagggtgctctatgagattgtactaggcctatgaagagtggtaagccaaataggtctccatgggagatacattatgtaaataaataaacaatggtttgctggttcctgttggtgtctccacaagtaggtaaacatgtttaaaggaacccgggttcttagattttgttagactttttaaactcaaggatgagcataagtgcttgaaataaaatgctaatacttaagtgtcaaaa

SEQ ID NO: 418769 - DNA, 1425 bp, Homo sapiens
  misc_feature (38)..(38): n is a, c, g, or t
tatacggtagcgaggcctgggtggcggttttcgctgangtacattcagcccgtctggtaaacttgtccagattgaatatgctttggctgctgtagctggaggagccccgtccgtgggaattaaagctgcaaatggtgtggtattagcaactgagaaaaaacagaaatccattctgtatgatgagcgaagtgtacacaaagtagaaccaattaccaagcatataggtttggtgtacagtggcatgggccccgattacagagtgcttgtgcacagagctcgaaaactagctcaacaatactatcttgtgtaccaagaacccattcctacagctcagctggtacagagagtagcttctgtgatgcaagaatatactcagtcaggtggtgttcgtccatttggagtttctttacttatttgtggttggaatgagggacgaccatatttatttcagtcagatccatctggagcttactttgcctggaaagctacagcaatgggaaagaactatgtgaatgggaagactttccttgagaaaagatataatgaagatctggaacttgaagatgccattcatacagccatcttaaccctaaaggaaagctttgaagggcaaatgacagaggataacatagaagttggaatctgcaatgaagctggatttaggaggcttactccaactgaagttaaggattacttggctgccatagcataacaatgaagtgactgaaaaatccagaatttcagataatctatctacttaaacatgtttaaagtatgttttgttttgcagactttttgcatacttatttctacatggtttaaatcgactgtttttaaaatgacacttataaatcctaataaactgttaaacccaccttccagccttttaggagttgctaaaattttaacagttatttcctgctttttatcacagttgatttctgaagactacattgccaagcagaatgatgaaatgactttttcgttgtcaggcaattttggttaagtcaaatcttaatgccctcttcgctatcagatgttgcctgtgtttccataaagcaaaatgctgattttggtaaaaaacatgactgcttctagagctgggaggatctgcagactttcacggattcatggaacaagaaaagaagcataggtacttttaggtgccattaggtattgatcagtgaaatcctagggtgctctatgagattgtactaggcctatgaagagtggtaagccaaataggtctccatgggagatacattatgtaaataaataaacaatggtttgctggttcctgttggtgtctccacaagtaggtaaacatgtttaaaggaacccgggttcttagattttgttagactttttaaactcaaggatgagcataagtgcttgaaataaaatgctaatacttaagtgtcaaaa

SEQ ID NO: 418770 - DNA, 1003 bp, Homo sapiens
  misc_feature (990)..(990): n is a, c, g, or t
cacagtgcgcatgtgtgcggctgtgctttggctcttcgggtaaagatggcggagcgcgggtacagcttttcgctgactacattcagcccgtctggtaaacttgtccagattgaatatgctttggctgctgtagctggaggagccccgtccgtgggaattaaagctgcaaatggtgtggtattagcaactgagaaaaaacagaaatccattctgtatgatgagcgaagtgtacacaaagtagaaccaattaccaagcatataggtttggtgtacagtggcatgggccccgattacagagtgcttgtgcacagagctcgaaaactagctcaacaatactatcttgtgtaccaagaacccattcctacagctcagctggtacagagagtagcttctgtgatgcaagaatatactcagtcaggtggtgttcgtccatttggagtttctttacttatttgtggttggaatgagggacgaccatatttatttcagtcagatccatctggagcttactttgcctggaaagctacagcaatgggaaagaactatgtgaatgggaagactttccttgagaaaagatataatgaagatctggaacttgaagatgccattcatacagccatcttaaccctaaaggaaagctttgaagggcaaatgacagaggataacatagaagttggaatctgcaatgaagctggatttaggaggcttactccaactgaagttaaggattacttggctgccatagcataacaatgaagtgactgaaaaatccagaatttcagataatctatctacttaaacatgtttaaagtatgttttgttttgcagactttttgcatacttatttctacatggtttaaatcgactgtttttaaaatgacacttataaatcctaataaactgttaaaccaaaaaaaaaaaaacaaaaaaaaaaaaaaaaaaaaaaaaaaaaaaaaaaaaaaaaaaaaaaggggggggggggggaaaaancccccgggggggg

SEQ ID NO: 418771 - DNA, 1440 bp, Homo sapiens
gcatgacgagaccgcgctacttgtagcaacttacgagtttcagtggcggaacggaatatgcccggaattcggccatacggccggggtaaagatggcggagcgcgggtacagcttttcgctgactacattcagcccgtctggtaaacttgtccagattgaatatgctttggctgctgtagctggaggagccccgtccgtgggaattaaagctgcaaatggtgtggtattagcaactgagaaaaaacagaaatccattctgtatgatgagcgaagtgtacacaaagtagaaccaattaccaagcatataggtttggtgtacagtggcatgggccccgattacagagctcagctggtacagagagtagcttctgtgatgcaagaatatactcagtcaggtggtgttcgtccatttggagtttctttacttatttgtggttggaatgagggacgaccatatttatttcagtcagatccatctggagcttactttgcctggaaagctacagcaatgggaaagaactatgtgaatgggaagactttccttgagaaaagatataatgaagatctggaacttgaagatgccattcatacagccatcttaaccctaaaggaaagctttgaagggcaaatgacagaggataacatagaagttggaatctgcaatgaagctggatttaggaggcttactccaactgaagttaaggattacttggctgccatagcataacaatgaagtgactgaaaaatccagaatttcagataatctatctacttaaacatgtttaaagtatgttttgttttgcagactttttgcatacttatttctacatggtttaaatcgactgtttttaaaatgacacttataaatcctaataaactgttaaacccaccttccagccttttaggagttgctaaaattttaacagttatttcctgctttttatcacagttgatttctgaagactacattgccaagcagaatgatgaaatgactttttcgttgtcaggcaattttggttaagtcaaatcttaatgccctcttcgctatcagatgttgcctgtgtttccataaagcaaaatgctgattttggtaaaaaacatgactgcttctagagctgggaggatctgcagactttcacggattcatggaacaagaaaagaagcataggtacttttaggtgccattaggtattgatcagtgaaatcctagggtgctctatgagattgtactaggcctatgaagagtggtaagccaaataggtctccatgggagatacattatgtaaataaataaacaatggtttgctggttcctgttggtgtctccacaagtaggtaaacatgtttaaaggaacccgggttcttagattttgttagactttttaaactcaaggatgagcataagtgcttgaaataaaatgctaatacttaagtgtcaaaa

SEQ ID NO: 418772 - DNA, 965 bp, Homo sapiens
  misc_feature (38)..(38): n is a, c, g, or t
  misc_feature (952)..(952): n is a, c, g, or t
tatacggtagcgaggcctgggtggcggttttcgctgangtacattcagcccgtctggtaaacttgtccagattgaatatgctttggctgctgtagctggaggagccccgtccgtgggaattaaagctgcaaatggtgtggtattagcaactgagaaaaaacagaaatccattctgtatgatgagcgaagtgtacacaaagtagaaccaattaccaagcatataggtttggtgtacagtggcatgggccccgattacagagtgcttgtgcacagagctcgaaaactagctcaacaatactatcttgtgtaccaagaacccattcctacagctcagctggtacagagagtagcttctgtgatgcaagaatatactcagtcaggtggtgttcgtccatttggagtttctttacttatttgtggttggaatgagggacgaccatatttatttcagtcagatccatctggagcttactttgcctggaaagctacagcaatgggaaagaactatgtgaatgggaagactttccttgagaaaagatataatgaagatctggaacttgaagatgccattcatacagccatcttaaccctaaaggaaagctttgaagggcaaatgacagaggataacatagaagttggaatctgcaatgaagctggatttaggaggcttactccaactgaagttaaggattacttggctgccatagcataacaatgaagtgactgaaaaatccagaatttcagataatctatctacttaaacatgtttaaagtatgttttgttttgcagactttttgcatacttatttctacatggtttaaatcgactgtttttaaaatgacacttataaatcctaataaactgttaaaccaaaaaaaaaaaaacaaaaaaaaaaaaaaaaaaaaaaaaaaaaaaaaaaaaaaaaaaaaaaggggggggggggggaaaaancccccgggggggg

SEQ ID NO: 418773 - DNA, 739 bp, Homo sapiens
  misc_feature (38)..(38): n is a, c, g, or t
tatacggtagcgaggcctgggtggcggttttcgctgangtacattcagcccgtctggtaaacttgtccagattgaatatgctttggctgctgtagctggaggagccccgtccgtgggaattaaagagtgcttgtgcacagagctcgaaaactagctcaacaatactatcttgtgtaccaagaacccattcctacagctcagctggtacagagagtagcttctgtgatgcaagaatatactcagtcaggtggtgttcgtccatttggagtttctttacttatttgtggttggaatgagggacgaccatatttatttcagtcagatccatctggagcttactttgcctggaaagctacagcaatgggaaagaactatgtgaatgggaagactttccttgagaaaagatataatgaagatctggaacttgaagatgccattcatacagccatcttaaccctaaaggaaagctttgaagggcaaatgacagaggataacatagaagttggaatctgcaatgaagctggatttaggaggcttactccaactgaagttaaggattacttggctgccatagcataacaatgaagtgactgaaaaatccagaatttcagataatctatctacttaaacatgtttaaagtatgttttgttttgcagactttttgcatacttatttctacatggtttaaatcgactgtttttaaaatgacacttataaatcctaataaactgttaaacc

SEQ ID NO: 418774 - DNA, 824 bp, Homo sapiens
attttcccttggccgttaatctcctgagggatgtgcccacagtatgcgccccccccagaagtagggtccctttccagagaggttccagccgtgcgagtgttcccagcgcgaacggtgtttaacccccgccccttgcccttcgcgttattaaatcctgccccctttattggagcccccgcctttgtccaagaaaaacctgtggtatcgcgctataaccttggcgcccccccccgggggagtatatttttttagaggcgccccgcgccctttttttgtttttttttttttttttttcaacaaaagcaagtttggtttatttgaatggtttcattaaataagtctacaaaggtaacaaactgaagcacaaagcgcaatcttacaagaagcgcaacacccagagttagtgcaaaatgtacaattaacggctgctgagaaacccccaaagtttgaatttttatttttatttttaacagtgtacattgttaaataatgtaaggaaaacatttataattcagaaagtttttaatgtggaaaaagatactcaaagtgtactattaacacaaaaataatttaaacagttcagtagcactagttcattcctctaggcttgttatttcatacacaggaggatgaaatcaacagtaaataacaccagttctgactttttttgtgtatgagtgaaaagatgtcaaaattattattaaacccaaataacaaatgataatgtgctgcatgaggctccactgctcctctggtataaagtatgtttcactcttgggtggcccccggacgcgtgggtcgacccacgcgtccgcgacgcgtgg

SEQ ID NO: 418775 - DNA, 2361 bp, Homo sapiens
  misc_feature (2096)..(2097): n is a, c, g, or t
  misc_feature (2154)..(2154): n is a, c, g, or t
  misc_feature (2361)..(2361): n is a, c, g, or t
ggtggtagttgggtgccacgacccttgtgtgtttgtctcggtcctttatttctgggttgtcgcctgtttgtggcacgccaagggtttcttctctcctcatatccctcggcgttctgttgtcctgctgccgttgttttgacgccgcgccgcttttttttttatctcttccttctctgggggactctctttcttgtcgtcgaatgtcttgtcgtgtcctctactgttgtcgtcccccgcggggtttttgttgtggtccgccccccccccttgttgtttgtctttgttgtagttttgtttttttttttcttcttcttgtttttttttttttttttttttttgtgtttttttttttttttgtttttttttttttttttttcaacaaaagcaagtttggtttatttgaatggtttcattaaataagtctacaaaggtaacaaactgaagcacaaagcgcaatcttacaagaagcgcaacacccagagttagtgcaaaatgtacaattaacggctgctgagaaacccccaaagtttgaatttttatttttatttttaacagtgtacattgttaaataatgtaaggaaaacatttataattcagaaagtttttaatgtggaaaaagatactcaaagtgtactattaacacaaaaataatttaaacagttcagtagcactagttcattcctctaggcttgttatttcatacacaggaggatgaaatcaacagtaaataacaccagttctgactttttttgtgtatgagtgaaaagatgtcaaaattattattaaacccaaataacaaatgataatgtgctgcatgaggctccactgctcctctggtataaagtatgtttcactcttgggtggcccctttctcagctactcagccccttgttggttctatccttactctctccacaagaaatacaagcagagaataaataaatcattttaaagcaggggtggaagcccttgcccttttcctttctaccttttaaaaaccttcagctctcatttgcatatttagggccgtagaccaacttacttacttattaagggaagcagggcccttaaggaatgaacagggtacaggagcctccagcctctttctgtggtagtggtggtggtggtggtgattcccagaatatgccattgacgtgggtaaaaggttggaaatattttcagtttcccaactaagagtcaagaagcaccccaaaattaagagtcctagcttctttctttgtcttcagagataacaaagatcctaaacatagccagttaggacagtatttccggaaagctctgaaaataattaataactacccattacaaggaggcatagcactgaataacactgattggttgcagttattacttacggggagtattatttatttgaaaatgtgaacatattagttgtacttctagaaataaaggtggcacaatagattatgatcctgcaaccatttggacatcataaaggaaatgagtaggaataagtattctttcctagaatgattaattcagatgtggaaagatagatagattaactttccacaaaatgtagtaccccaagctgagaaatgcatggtacatgtgcaacaagaggaaagcaatccaaacagtttttctgagagcaattttctccatctgtgacttttcactatcaggttccccaacttgaaaactagccccccacccccttctctttatgttcagtttcttctaggtcacgtctgttcaagcctagctcaaataagaaaggtttatatgacagtcactggccaggcatcacgtttgtttcctcattctttagtctttgtctttcacccagcacacaccattcttttaagttgtccaattttgttacaacaccccctcctcactattcccgaaacagaactttctgtttttaaccactgatgccaacctaacttcccaccctactcatcttacacctgctctagacaaagttgttgaatgacttaaaaaaatactttttcaatttccctttggcataaccactgctggactgctggggtcacatggacctacgatttccttccacatgccctttattgatctggggtctggtaagnngatgctaatggcagaagcaatagaagtccaaggcactaaaatgtccagcaagcaacnctgggaaacagaagtattcaagtacagtaatttatacaattttacattcacatttatttatctaatacaatggaaatacaaaggaaaagttaaagtgtctcaataagtaaaggacagagctagctttttttggaactttttaaacgtttcatattttactcttaaaactactgttgtccaacaacattttatatatcacagtgtttn

SEQ ID NO: 418776 - DNA, 960 bp, Homo sapiens
ggtggtagttgggtgccacgacccttgtgtgtttgtctcggtcctttatttctgggttgtcgcctgtttgtggcacgccaagggtttcttctctcctcatatccctcggcgttctgttgtcctgctgccgttgttttgacgccgcgccgcttttttttttatctcttccttctctgggggactctctttcttgtcgtcgaatgtcttgtcgtgtcctctactgttgtcgtcccccgcggggtttttgttgtggtccgccccccccccttgttgtttgtctttgttgtagttttgtttttttttttcttcttcttgtttttttttttttttttttttttgtgtttttttttttttttgtttttttttttttttttttcaacaaaagcaagtttggtttatttgaatggtttcattaaataagtctacaaaggtaacaaactgaagcacaaagcgcaatcttacaagaagcgcaacacccagagttagtgcaaaatgtacaattaacggctgctgagaaacccccaaagtttgaatttttatttttatttttaacagtgtacattgttaaataatgtaaggaaaacatttataattcagaaagtttttaatgtggaaaaagatactcaaagtgtactattaacacaaaaataatttaaacagttcagtagcactagttcattcctctaggcttgttatttcatacacaggaggatgaaatcaacagtaaataacaccagttctgactttttttgtgtatgagtgaaaagatgtcaaaattattattaaacccaaataacaaatgataatgtgctgcatgaggctccactgctcctctggtataaagtatgtttcactcttgggtggcccctttctcagctactcagccccttgttggttctatccttactctctccacaagaaatacaagcagagaaaggatagagccaaccgtggactagt

SEQ ID NO: 418777 - DNA, 907 bp, Homo sapiens
tgacttttaaattcatctaatttttattaatgattatgataacatataaaattatgctcagcagtacaaaatagatccatttagctcatcagcgttttacacatttataaattttataaaatatgaataccaatttcacagcattttctgataatgcctcactagagaataaaatttctatttttggaaaaaaccaacaacaacttttgaagctgacctggtttgccatgtttatttcgggtctgtggttatgcttatctctgattccagagtgaagggaggtgggcagggcgtgggtgtccattaaggcacctctgtccttcctgcaggccaaatcctgccctggcttgtcctgtgtcaagggacaatgtcctgctttacaaagtcaaggctgtgcccatagaaagccttgtaatcttttgggttctccgtttccttatgagtgatgcacaggctctgatgattgtcatcctcttcacagcctccatgaatctcctgatgaactccctcagaaggtggaaggagcacctgacaccgacccgagatcagcagcagctacgcccacgctgtgggcagttaagaggcagccagtggtaccagtcgtgagcgatcagatttgaggactcaggattctggtttcctgagtgtcatggacctgcgggctgcagaaatgacagcgacaggtcttcaggcaggtgccacagcacccacacactgccagcattttgtgcaaaatacccaaagccacatcaccagatctgggctctcctagcttccctttgctaaaatgctggccaaagagcttaacgagccactcaggggcacaagataggtgaaacctgcatgttttgtttgttaaactatttgccacatggcacaagaaaataacaaaaaataaacaaaagga

SEQ ID NO: 418778 - DNA, 662 bp, Homo sapiens
atggcaactctgtgggaatccttccagcagcccgcttatggctggagacagaggtgtggcttctatctaagcttttccctctgactcagtccaggaggcaactgtcttgggaagcaaatgataacagcatctgggagattctcttctggatggactagcagggaatcaggacatgaactcagtggactaactgcaccgagactcacctggtcattacttgaaggtcattacttaaacctccatgaatctcctgatgaactccctcagaaggtggaaggagcacctgacaccgacccgagatcagcagcagctacgcccacgctgtgggcagttaagaggcagccagtggtaccagtcgtgagcgatcagatttgaggactcaggattctggtttcctgagtgtcatggacctgcgggctgcagaaatgacagcgacaggtcttcaggcaggtgccacagcacccacacactgccagcattttgtgcaaaatacccaaagccacatcaccagatctgggctctcctagcttccctttgctaaaatgctggccaaagagcttaacgagccactcaggggcacaagataggtgaaacctgcatgttttgtttgttaaactatttgccacatggcacaagaaaataacaaaaaataaacaaaagga

SEQ ID NO: 418779 - DNA, 4880 bp, Homo sapiens
agaccacctgctgccgaatcacacgatgctgggtgaaaacgcggatggcctgggccccaccctggaatctcagagtccgaatacttaactacgggtgtggctctgaagtctgcgctttccaccagtacgccaggtggctccgtctttggcgcgcaagtttgagagccgtggggccccgccctccgccaaggtgggcgtgggtggcgtagcagagccccaagctcaggccgcctgcgcaggctagggccggaggcacgcaaccctgaggcagcgagtcgccaagtctcgtatgcgccccgcaacgcgggaactaggcgatcgctccacgctcctcccctcctttcccctcccacagcgtcctgcgcgcatgcgcttcgcagcttctctcgccgccgcgcccccagctgctctggttacggttggtgtttgcgaattctctgcggcaccttcttcgctgaactccaccgtcagttccataggcgcgcgcccgcgtcacgtgggccgaggttccggcgcggctgctggccggcggctgagccgggagaaaggagctgcggccaccgttcgccctacttctgcgcctcggggcgggcgcgccggtaaaaatggcgaaatgggggtaggcggcgctggacctgaagagatggggcgcgcaggtggggcggttgtcagagccccctgacgtgggcgccgggcttttatcggcgatttgatctggcgacctcgggccggcgcctaagaggtcagactgcggagcctgcgggtcgccagcggccccgccgagagccggaggcaatggatgaacagagcgtggagagcattgctgaggttttccgatgtttcatttgtatggagaaattgcgggatgcacgcctgtgtcctcattgctccaaactgtgttgtttcagctgtattaggcgctggctgacagagcagagagctcaatgtcctcattgccgtgctccactccagctacgagaactagtaaattgtcgttgggcagaagaagtaacacaacagcttgatactcttcaactctgcagtctcaccaaacatgaagaaaatgaaaaggacaaatgtgaaaatcaccatgaaaaacttagtgtattttgctggacttgtaagaagtgtatctgccatcagtgtgcactttggggaggaatgcatggcggacatacctttaaacctttggcagaaatttatgagcaacacgtcactaaagtgaatgaagaggtagccaaacttcgtcggcgtctcatggaactgatcagcttagttcaagaagtggaaaggaatgtagaagctgtaagaaatgcaaaagatgagcgtgttcgggaaattaggaatgcagtggagatgatgattgcacggttagacacacagctgaagaataagcttataacactgatgggtcagaagacatctctaacccaagaaacagagcttttggaatccttacttcaggaggtggagcaccagttgcggtcttgtagtaagagtgagttgatatctaagagctcagagatccttatgatgtttcagcaagttcatcggaagcccatggcatcttttgttaccactcctgttccaccagactttaccagtgaattagtgccatcttacgattcagctacttttgttttagagaatttcagcactttgcgtcagagagcagatcctgtttacagtccacctcttcaagtttcaggactttgctggaggttaaaagtttacccagatggaaatggagttgtgcgaggttactacttatctgtgtttctggagctctcagctggcttgcctgaaacttctaaatatgaatatcgtgtagagatggttcaccagtcctgtaatgatcctacaaaaaatatcattcgagaatttgcatctgactttgaagttggagaatgctggggctataatagatttttccgtttggacttactcgcaaatgaaggatacttgaatccacaaaatgatacagtgattttaaggtttcaggtacgttcaccaactttctttcaaaaatcccgggaccagcattggtacattactcagttggaagctgcacagactagttatatccaacaaataaacaaccttaaagagagacttactattgagctgtctcgaactcagaagtcaagagatttgtcaccaccagataaccatcttagcccccaaaatgatgatgctctggagacacgagctaagaagtctgcatgctctgacatgcttctcgaaggtggtcctactacagcttctgtaagagaggccaaagaggatgaagaagatgaggagaagattcagaatgaagattatcatcacgagctttcagatggagatctggatctggatcttgtttatgaggatgaagtaaatcagctcgatggcagcagttcctctgctagttccacagcaacaagtaatacagaagaaaatgatattgatgaagaaactatgtctggagaaaatgatgtggaatataacaacatggaattagaagagggagaactcatggaagatgcagctgctgcaggacccgcaggtagtagccatggttatgtgggttccagtagtagaatatcaagaagaacacatttatgctccgctgctaccagtagtttactagacattgatccattaattttaatacatttgttggaccttaaggaccggagcagtatagaaaatttgtggggcttacagcctcgcccacctgcttcacttctgcagcccacagcatcatattctcgaaaagataaagaccaaaggaagcaacaggcaatgtggcgagtgccctctgatttaaagatgctaaaaagactcaaaactcaaatggccgaagttcgatgtatgaaaactgatgtaaagaatacactttcagaaataaaaagcagcagtgctgcttctggagacatgcagacaagccttttttctgctgaccaggcagctctggctgcatgtggaactgaaaactctggcagattgcaggatttgggaatggaactcctggcaaagtcatcagttgccaattgttacatacgaaactccacaaataagaagagtaattcgcccaagccagctcgatccagtgtagcaggtagtctatcacttcgaagagcagtggaccctggagaaaatagtcgttcaaagggagactgtcagactctgtctgaaggctccccaggaagctctcagtctgggagcaggcacagttctccccgagccttgatacatggcagtatcggtgatattctgccaaaaactgaagaccggcagtgtaaagctttggattcagatgctgttgtggttgcagttttcagtggcttgcctgcggttgagaaaaggaggaaaatggtcaccttgggggctaatgctaaaggaggtcatctggaaggactgcagatgactgatttggaaaataattctgaaactggagagttacagcctgtactacctgaaggagcttcagctgcccctgaagaaggaatgagtagcgacagtgacattgaatgtgacactgagaatgaggagcaggaagagcataccagtgtgggcgggtttcacgactccttcatggtcatgacacagcccccggatgaagatacacattccagttttcctgatggtgaacaaataggccctgaagatctcagcttcaatacagatgaaaatagtggaaggtaattgccaaatcaagagaactgacttgcaagctaccttgaccctgaattttgctgtagttggtgctcaaatttgtcatcagtcagataatcagatttggtcttatttcttcattatctcgacctgaaatagtaatttggaaactgttggaaggtggcacagtttagtctaagacagcagtagtacatgggaaaaacagtatgggaagagttctttgtaatgtaaggaaataacaatgtagttctctattaatttagcaaatttgtacattcacaaaaggcagtttgtctactacagcagaaggctggttaactgccagaaaatgtacctccaggccctgcatgccgtcagtaacccgcccggcattggtgctctactgtctttggctagagcttagttgtgtttaaataatcatctttatatttggggttttaattacagttccattagtgcctgtagattagtgaacagaaaattgctttggaagagattctgccctgtagacactatgtgaataactgaagtaacactagactgaatctcctttttggagtatgtatcttctctcacttgttcaagtacaggcacactgttcaaccgcatggtatctttctgttgtgtgacttctacaaatgtaattttaaatgaaattaagttaacatggattcattacgttcctggccctgtagacacgtgtaagattatttaaaattctttcatttttttctgcctcttactatacgactgtagtgcaacaaatattttaaagcccccttttcttctttattttcattagttgtacattgatttcagtgtcaacacatttaaagattcattcatgttgcacagtggcttacatgaacgtgaaactgtgatataaggttttctttcatactcataattagcccaaaacagttgccaaactttgccattgtgctcctgcatttgtgtttgagctgctatatatttgtggaaattacactgaaagttgactaagagactattgaaaaagcatgaataattaaatatacatgtgagagacatctcatctgctgtattttacttagtgaatattgttcactcttccgtgtctgatgtcttgctgaatgctgtgactcatagtttacttttgttcaaaatagtttgcactttttgttaataaaatcaacttgagaaaaagatgcctctgctgt

SEQ ID NO: 418780 - DNA, 665 bp, Homo sapiens
tttaagctatttgcagatcagaatagaagagtgggcatttgtcctttcacatcacgtgattttcaaaggtgaaaaaaatttcttttgctaacttacgattcaaagaaaaatggtctcaaattaaagtgtggacaaaactgtagtattcccttttatagccttgcttaggtaagaatgttcactgagtgaataaattaggtttaaaaattaaaacaataatttagatcattttcccacaaagccttatcaaggatttgatggggaaggaagcacttgaaccacagcagttttatctgtaaacactgaacttggccatgcatcattttcatctgcccactggatgttgcacttctcactggcacagtgtttcaacagtggagtgtggttgtcatgaaaatgcagtattgacactataccactataaatgtggtcaaaattagactcagtgttgacattgacattgttgccattgtccttggaaaaggtgttactttcaaggagcctcctaaatgcaacagtaactttaatcataataattcaaggacaatggatggcacttctaggtaaagaaaaggtatatacatatgtgtttctacccatcctctttagtacagacctaaatgggattaatagccccagtgtggagagagggagagagaagagcg

SEQ ID NO: 418781 - DNA, 1458 bp, Homo sapiens
  misc_feature (1181)..(1181): n is a, c, g, or t
  misc_feature (1192)..(1192): n is a, c, g, or t
  misc_feature (1203)..(1203): n is a, c, g, or t
  misc_feature (1338)..(1338): n is a, c, g, or t
  misc_feature (1359)..(1359): n is a, c, g, or t
  misc_feature (1386)..(1386): n is a, c, g, or t
  misc_feature (1393)..(1393): n is a, c, g, or t
  misc_feature (1401)..(1401): n is a, c, g, or t
  misc_feature (1422)..(1422): n is a, c, g, or t
  misc_feature (1431)..(1431): n is a, c, g, or t
  misc_feature (1445)..(1445): n is a, c, g, or t
agaccacctgctgccgaatcacacgatgctgggtgaaaacgcggatggcctgggccccaccctggaatctcagagtccgaatacttaactacgggtgtggctctgaagtctgcgctttccaccagtacgccaggtggctccgtctttggcgcgcaagtttgagagccgtggggccccgccctccgccaaggtgggcgtgggtggcgtagcagagccccaagctcaggccgcctgcgcaggctagggccggaggcacgcaaccctgaggcagcgagtcgccaagtctcgtatgcgccccgcaacgcgggaactaggcgatcgctccacgctcctcccctcctttcccctcccacagcgtcctgcgcgcatgcgcttcgcagcttctctcgccgccgcgcccccagctgctctggttacggttggtgtttgcgaattctctgcggcaccttcttcgctgaactccaccgtcagttccataggcgcgcgcccgcgtcacgtgggccgaggttccggcgcggctgctggccggcggctgagccgggagaaaggagctgcggccaccgttcgccctacttctgcgcctcggggcgggcgcgccggtaaaaatggcgaaatgggggtaggcggcgctggacctgaagagatggggcgcgcaggtggggcggttgtcagagccccctgacgtgggcgccgggcttttatcggcgatttgatctggcgacctcgggccggcgcctaagaggtcagactgcggagcctgcgggtcgccagcggccccgccgagagccggaggcaatggatgaacagagcgtggagagcattgctgaggttttccgatgtttcatttgtatggagaaattgcgggatgcacgcctgtgtcctcattgctccaaactgtgttgtttcagctgtattaggcgctggctgacagagcagagagctcaatgtcctcattgccgagtctcgctctgtcgtccaggccggagtgcaatggcgtgatttcagctcactgcagcctcgacctcctgggctcagtgctccactccagctacgagaactagtaaattgtcgttgggcagaagaagtaacacaacagcttgatactcttcaactctgcagtctcaccaaacatgaagaaaatgaaaaggacaagtatgtcctcaatttctttgttcaatatngaatggatttngcctttgtatngtttaatgacactatatgggtagttgcctttagttatttatgaataagtagtgttatatttcttgtttttaattctttcagtcatgcgctgttactgttaagtaacatattcttattggtcatttaacaacagtnatttcatgccatgtatacacnagatacctctcggcctcccctcccccncacaganagtacttngctagatgataggcatacaanggtacatgngacatgattctgtnactgttaatgggg

SEQ ID NO: 418782 - DNA, 215 bp, Homo sapiens
cagttttagatttttgtgtttgattaaaaaaaaacagtagcatcatggcttttaacatattatgtgctaaaacagtaggctaaaaatattgtccattgatttccattagtaatgtatgtatgcccttatgtaaatgttaataagtcagaagttgttgaatcaaagcatttcaaggtgtgagccactgtgcctggcgatttttggatttttaaacc

SEQ ID NO: 418783 - DNA, 4763 bp, Homo sapiens
agaccacctgctgccgaatcacacgatgctgggtgaaaacgcggatggcctgggccccaccctggaatctcagagtccgaatacttaactacgggtgtggctctgaagtctgcgctttccaccagtacgccaggtggctccgtctttggcgcgcaagtttgagagccgtggggccccgccctccgccaaggtgggcgtgggtggcgtagcagagccccaagctcaggccgcctgcgcaggctagggccggaggcacgcaaccctgaggcagcgagtcgccaagtctcgtatgcgccccgcaacgcgggaactaggcgatcgctccacgctcctcccctcctttcccctcccacagcgtcctgcgcgcatgcgcttcgcagcttctctcgccgccgcgcccccagctgctctggttacggttggtgtttgcgaattctctgcggcaccttcttcgctgaactccaccgtcagttccataggcgcgcgcccgcgtcacgtgggccgaggttccggcgcggctgctggccggcggctgagccgggagaaaggagctgcggccaccgttcgccctacttctgcgcctcggggcgggcgcgccggtaaaaatggcgaaatgggggtaggcggcgctggacctgaagagatggggcgcgcaggtggggcggttgtcagagccccctgacgtgggcgccgggcttttatcggcgatttgatctggcgacctcgggccggcgcctaagaggtcagactgcggagcctgcgggtcgccagcggccccgccgagagccggaggcaatggatgaacagagcgtggagagcattgctgaggttttccgatgtttcatttgtatggagaaattgcgggatgcacgcctgtgtcctcattgctccaaactgtgttgtttcagctgtattaggcgctggctgacagagcagagagctcaatgtcctcattgccgtgctccactccagctacgagaactagtaaattgtcgttgggcagaagaagtaacacaacagcttgatactcttcaactctgcagtctcaccaaacatgaagaaaatgaaaaggacaaatgtgaaaatcaccatgaaaaacttagtgtattttgctggacttgtaagaagtgtatctgccatcagtgtgcactttggggaggaatgcatggcggacatacctttaaacctttggcagaaatttatgagcaacacgtcactaaagtgaatgaagaggtagccaaacttcgtcggcgtctcatggaactgatcagcttagttcaagaagtggaaaggaatgtagaagctgtaagaaatgcaaaagatgagcgtgttcgggaaattaggaatgcagtggagatgatgattgcacggttagacacacagctgaagaataagcttataacactgatgggtcagaagacatctctaacccaagaaacagagcttttggaatccttacttcaggaggtggagcaccagttgcggtcttgtagtaagagtgagttgatatctaagagctcagagatccttatgatgtttcagcaagttcatcggaagcccatggcatcttttgttaccactcctgttccaccagactttaccagtgaattagtgccatcttacgattcagctacttttgttttagagaatttcagcactttgcgtcagagagcagatcctgtttacagtccacctcttcaagtttcaggactttgctggaggttaaaagtttacccagatggaaatggagttgtgcgaggttactacttatctgtgtttctggagctctcagctggcttgcctgaaacttctaaatatgaatatcgtgtagagatggttcaccagtcctgtaatgatcctacaaaaaatatcattcgagaatttgcatctgactttgaagttggagaatgctggggctataatagatttttccgtttggacttactcgcaaatgaaggatacttgaatccacaaaatgatacagtgattttaaggtttcaggtacgttcaccaactttctttcaaaaatcccgggaccagcattggtacattactcagttggaagctgcacagactagttatatccaacaaataaacaaccttaaagagagacttactattgagctgtctcgaactcagaagtcaagagatttgtcaccaccagataaccatcttagcccccaaaatgatgatgctctggagacacgagctaagaagtctgcatgctctgacatgcttctcgaaggtggtcctactacagcttctgtaagagaggccaaagaggatgaagaagatgaggagaagattcagaatgaagattatcatcacgagctttcagatggagatctggatctggatcttgtttatgaggatgaagtaaatcagctcgatggcagcagttcctctgctagttccacagcaacaagtaatacagaagaaaatgatattgatgaagaaactatgtctggagaaaatgatgtggaatataacaacatggaattagaagagggagaactcatggaagatgcagctgctgcaggacccgcaggtagtagccatggttatgtgggttccagtagtagaatatcaagaagaacacatttatgctccgctgctaccagtagtttactagacattgatccattaattttaatacatttgttggaccttaaggaccggagcagtatagaaaatttgtggggcttacagcctcgcccacctgcttcacttctgcagcccacagcatcatattctcgaaaagataaagaccaaaggaagcaacaggcaatgtggcgagtgccctctgatttaaagatgctaaaaagactcaaaactcaaatggccgaagttcgatgtatgaaaactgatgtaaagaatacactttcagaaataaaaagcagcagtgctgcttctggagacatgcagacaagccttttttctgctgaccaggcagctctggctgcatgtggaactgaaaactctggcagattgcaggatttgggaatggaactcctggcaaagtcatcagttgccaattgttacatacgaaactccacaaataagaagagtaattcgcccaagccagctcgatccagtgtagcaggtagtctatcacttcgaagagcagtggaccctggagaaaatagtcgttcaaagggagactgtcagactctgtctgaaggctccccaggaagctctcagtctgggagcaggcacagttctccccgagccttgatacatggcagtatcggtgatattctgccaaaaactgaagaccggcagtgtaaagctttggattcagatgctgttgtggttgcagttttcagtggcttgcctgcggttgagaaaaggaggaaaatggtcaccttgggggctaatgctaaaggaggtcatctggaaggactgcagatgactgatttggaaaataattctgaaactggagagttacagcctgtactacctgaaggagcttcagctgcccctgaagaagatacacattccagttttcctgatggtgaacaaataggccctgaagatctcagcttcaatacagatgaaaatagtggaaggtaattgccaaatcaagagaactgacttgcaagctaccttgaccctgaattttgctgtagttggtgctcaaatttgtcatcagtcagataatcagatttggtcttatttcttcattatctcgacctgaaatagtaatttggaaactgttggaaggtggcacagtttagtctaagacagcagtagtacatgggaaaaacagtatgggaagagttctttgtaatgtaaggaaataacaatgtagttctctattaatttagcaaatttgtacattcacaaaaggcagtttgtctactacagcagaaggctggttaactgccagaaaatgtacctccaggccctgcatgccgtcagtaacccgcccggcattggtgctctactgtctttggctagagcttagttgtgtttaaataatcatctttatatttggggttttaattacagttccattagtgcctgtagattagtgaacagaaaattgctttggaagagattctgccctgtagacactatgtgaataactgaagtaacactagactgaatctcctttttggagtatgtatcttctctcacttgttcaagtacaggcacactgttcaaccgcatggtatctttctgttgtgtgacttctacaaatgtaattttaaatgaaattaagttaacatggattcattacgttcctggccctgtagacacgtgtaagattatttaaaattctttcatttttttctgcctcttactatacgactgtagtgcaacaaatattttaaagcccccttttcttctttattttcattagttgtacattgatttcagtgtcaacacatttaaagattcattcatgttgcacagtggcttacatgaacgtgaaactgtgatataaggttttctttcatactcataattagcccaaaacagttgccaaactttgccattgtgctcctgcatttgtgtttgagctgctatatatttgtggaaattacactgaaagttgactaagagactattgaaaaagcatgaataattaaatatacatgtgagagacatctcatctgctgtattttacttagtgaatattgttcactcttccgtgtctgatgtcttgctgaatgctgtgactcatagtttacttttgttcaaaatagtttgcactttttgttaataaaatcaacttgagaaaaagatgcctctgctgt

SEQ ID NO: 418784 - DNA, 2442 bp, Homo sapiens
atctcgctgactcttgaggatccagtctggagaaaatgatgtggaatataacaacatggaattagaagagggagaactcatggaagatgcagctgctgcaggacccgcaggtagtagccatggttatgtgggttccagtagtagaatatcaagaagaacacatttatgctccgctgctaccagtagtttactagacattgatccattaattttaatacatttgttggaccttaaggaccggagcagtatagaaaatttgtggggcttacagcctcgcccacctgcttcacttctgcagcccacagcatcatattctcgaaaagataaagaccaaaggaagcaacaggcaatgtggcgagtgccctctgatttaaagatgctaaaaagactcaaaactcaaatggccgaagttcgatgtatgaaaactgatgtaaagaatacactttcagaaataaaaagcagcagtgctgcttctggagacatgcagacaagccttttttctgctgaccaggcagctctggctgcatgtggaactgaaaactctggcagattgcaggatttgggaatggaactcctggcaaagtcatcagttgccaattgttacatacgaaactccacaaataagaagagtaattcgcccaagccagctcgatccagtgtagcaggtagtctatcacttcgaagagcagtggaccctggagaaaatagtcgttcaaagggagactgtcagactctgtctgaaggctccccaggaagctctcagtctgggagcaggcacagttctccccgagccttgatacatggcagtatcggtgatattctgccaaaaactgaagaccggcagtgtaaagctttggattcagatgctgttgtggttgcagttttcagtggcttgcctgcggttgagaaaaggaggaaaatggtcaccttgggggctaatgctaaaggaggtcatctggaaggactgcagatgactgatttggaaaataattctgaaactggagagttacagcctgtactacctgaaggagcttcagctgcccctgaagaaggaatgagtagcgacagtgacattgaatgtgacactgagaatgaggagcaggaagagcataccagtgtgggcgggtttcacgactccttcatggtcatgacacagcccccggatgaagatacacattccagttttcctgatggtgaacaaataggccctgaagatctcagcttcaatacagatgaaaatagtggaaggtaattgccaaatcaagagaactgacttgcaagctaccttgaccctgaattttgctgtagttggtgctcaaatttgtcatcagtcagataatcagatttggtcttatttcttcattatctcgacctgaaatagtaatttggaaactgttggaaggtggcacagtttagtctaagacagcagtagtacatgggaaaaacagtatgggaagagttctttgtaatgtaaggaaataacaatgtagttctctattaatttagcaaatttgtacattcacaaaaggcagtttgtctactacagcagaaggctggttaactgccagaaaatgtacctccaggccctgcatgccgtcagtaacccgcccggcattggtgctctactgtctttggctagagcttagttgtgtttaaataatcatctttatatttggggttttaattacagttccattagtgcctgtagattagtgaacagaaaattgctttggaagagattctgccctgtagacactatgtgaataactgaagtaacactagactgaatctcctttttggagtatgtatcttctctcacttgttcaagtacaggcacactgttcaaccgcatggtatctttctgttgtgtgacttctacaaatgtaattttaaatgaaattaagttaacatggattcattacgttcctggccctgtagacacgtgtaagattatttaaaattctttcatttttttctgcctcttactatacgactgtagtgcaacaaatattttaaagcccccttttcttctttattttcattagttgtacattgatttcagtgtcaacacatttaaagattcattcatgttgcacagtggcttacatgaacgtgaaactgtgatataaggttttctttcatactcataattagcccaaaacagttgccaaactttgccattgtgctcctgcatttgtgtttgagctgctatatatttgtggaaattacactgaaagttgactaagagactattgaaaaagcatgaataattaaatatacatgtgagagacatctcatctgctgtattttacttagtgaatattgttcactcttccgtgtctgatgtcttgctgaatgctgtgactcatagtttacttttgttcaaaatagtttgcactttttgttaataaaatcaacttgagaaaaagatgcctctgctgt

SEQ ID NO: 418785 - DNA, 4827 bp, Homo sapiens
agaccacctgctgccgaatcacacgatgctgggtgaaaacgcggatggcctgggccccaccctggaatctcagagtccgaatacttaactacgggtgtggctctgaagtctgcgctttccaccagtacgccaggtggctccgtctttggcgcgcaagtttgagagccgtggggccccgccctccgccaaggtgggcgtgggtggcgtagcagagccccaagctcaggccgcctgcgcaggctagggccggaggcacgcaaccctgaggcagcgagtcgccaagtctcgtatgcgccccgcaacgcgggaactaggcgatcgctccacgctcctcccctcctttcccctcccacagcgtcctgcgcgcatgcgcttcgcagcttctctcgccgccgcgcccccagctgctctggttacggttggtgtttgcgaattctctgcggcaccttcttcgctgaactccaccgtcagttccataggcgcgcgcccgcgtcacgtgggccgaggttccggcgcggctgctggccggcggctgagccgggagaaaggagctgcggccaccgttcgccctacttctgcgcctcggggcgggcgcgccggtaaaaatggcgaaatgggggtaggcggcgctggacctgaagagatggggcgcgcaggtggggcggttgtcagagccccctgacgtgggcgccgggcttttatcggcgatttgatctggcgacctcgggccggcgcctaagaggtcagactgcggagcctgcgggtcgccagcggccccgccgagagccggaggcaatggatgaacagagcgtggagagcattgctgaggttttccgatgtttcatttgtatggagaaattgcgggatgcacgcctgtgtcctcattgctccaaactgtgttgtttcagctgtattaggcgctggctgacagagcagagagctcaatgtcctcattgccgtgctccactccagctacgagaactagtaaattgtcgttgggcagaagaagtaacacaacagcttgatactcttcaactctgcagtctcaccaaacatgaagaaaatgaaaaggacaaatgtgaaaatcaccatgaaaaacttagtgtattttgctggacttgtaagaagtgtatctgccatcagtgtgcactttggggaggaatgcatggcggacatacctttaaacctttggcagaaatttatgagcaacacgtcactaaagtgaatgaagaggtagccaaacttcgtcggcgtctcatggaactgatcagcttagttcaagaagtggaaaggaatgtagaagctgtaagaaatgcaaaagatgagcgtgttcgggaaattaggaatgcagtggagatgatgattgcacggttagacacacagctgaagaataagcttataacactgatgggtcagaagacatctctaacccaagaaacagagcttttggaatccttacttcaggaggtggagcaccagttgcggtcttgtagtaagagtgagttgatatctaagagctcagagatccttatgatgtttcagcaagttcatcggaagcccatggcatcttttgttaccactcctgttccaccagactttaccagtgaattagtgccatcttacgattcagctacttttgttttagagaatttcagcactttgcgtcagagagcagatcctgtttacagtccacctcttcaagtttcaggactttgctggaggttaaaagtttacccagatggaaatggagttgtgcgaggttactacttatctgtgtttctggagctctcagctggcttgcctgaaacttctaaatatgaatatcgtgtagagatggttcaccagtcctgtaatgatcctacaaaaaatatcattcgagaatttgcatctgactttgaagttggagaatgctggggctataatagatttttccgtttggacttactcgcaaatgaaggatacttgaatccacaaaatgatacagtgattttaaggtttcaggtacgttcaccaactttctttcaaaaatcccgggaccagcattggtacattactcagttggaagctgcacagactagttatatccaacaaataaacaaccttaaagagagacttactattgagctgtctcgaactcagaagtcaagagatttgtcaccaccagataaccatcttagcccccaaaatgatgatgctctggagacacgagctaagaagtctgcatgctctgacatgcttctcgaaggtggtcctactacagcttctgtaagagaggccaaagaggatgaagaagatgaggagaagattcagaatgaagattatcatcacgagctttcagatggagatctggatctggatcttgtttatgaggatgaagtaaatcagctcgatggcagcagttcctctgctagttccacagcaacaagtaatacagaagaaaatgatattgatgaagaaactatgtctggagaaaatgatgtggaatataacaacatggaattagaagagggagaactcatggaagatgcagctgctgcaggacccgcaggtagtagccatggttatgtgggttccagtagtagaatatcaagaagaacacatttatgctccgctgctaccagtagtttactagacattgatccattaattttaatacatttgttggaccttaaggaccggagcagtatagaaaatttgtggggcttacagcctcgcccacctgcttcacttctgcagcccacagcatcatattctcgaaaagataaagaccaaaggaagcaacaggcaatgtggcgagtgccctctgatttaaagatgctaaaaagactcaaaactcaaatggccgaagttcgatgtatgaaaactgatgtaaagaatacactttcagaaataaaaagcagcagtgctgcttctggagacatgcagacaagccttttttctgctgaccaggcagctctggctgcatgtggaactgaaaactctggcagattgcaggatttgggaatggaactcctggcaaagtcatcagttgccaattgttacatacgaaactccacaaataagaagagtaattcgcccaagccagctcgatccagtgtagcaggtagtctatcacttcgaagagcagtggaccctggagaaaatagtcgttcaaagggagactgtcagactctgtctgaaggctccccaggaagctctcagtctgggagcaggcacagttctccccgagccttgatacatggcagtatcggtgatattctgccaaaaactgaagaccggcagtgtaaagctttggattcagatgctgttgtggttgcagttttcagtggcttgcctgcggttgagaaaaggaggaaaatggtcaccttgggggctaatgctaaaggaggtcatctggaaggactgcagatgactgatttggaaaataattctgaaactggagagttacagcctgtactacctgaaggagcttcagctgcccctgaagaaggaatgagtagcgacagtgacattgaatgtgacactgagaatgaggagcaggaagagcataccagtgtgggcgggtttcacgactccttcatggtcatgacacagcccccggatgaagatacacattccagttttcctgatggtgaacaaataggccctgaagatctcagcttcaatacagatgaaaatagtggaaggtaattgccaaatcaagagaactgacttgcaagctaccttgaccctgaattttgctgtagttggtgctcaaatttgtcatcagtcagataatcagatttggtcttatttcttcattatctcgacctgaaatagtaatttggaaactgttggaaggtggcacagtttagtctaagacagcagtagtacatgggaaaaacagtatgggaagagttctttgtaatgtaaggaaataacaatgtagttctctattaatttagcaaatttgtacattcacaaaaggcagtttgtctactacagcagaaggctggttaactgccagaaaatgtacctccaggccctgcatgccgtcagtaacccgcccggcattggtgctctactgtctttggctagagcttagttgtgtttaaataatcatctttatatttggggttttaattacagttccattagtgcctgtagattagtgaacagtaacactagactgaatctcctttttggagtatgtatcttctctcacttgttcaagtacaggcacactgttcaaccgcatggtatctttctgttgtgtgacttctacaaatgtaattttaaatgaaattaagttaacatggattcattacgttcctggccctgtagacacgtgtaagattatttaaaattctttcatttttttctgcctcttactatacgactgtagtgcaacaaatattttaaagcccccttttcttctttattttcattagttgtacattgatttcagtgtcaacacatttaaagattcattcatgttgcacagtggcttacatgaacgtgaaactgtgatataaggttttctttcatactcataattagcccaaaacagttgccaaactttgccattgtgctcctgcatttgtgtttgagctgctatatatttgtggaaattacactgaaagttgactaagagactattgaaaaagcatgaataattaaatatacatgtgagagacatctcatctgctgtattttacttagtgaatattgttcactcttccgtgtctgatgtcttgctgaatgctgtgactcatagtttacttttgttcaaaatagtttgcactttttgttaataaaatcaacttgagaaaaagatgcctctgctgt

SEQ ID NO: 418786 - DNA, 1682 bp, Homo sapiens
gctggtgggtttttgtagtgatacttgaatgcgtagtttaattggctttgaaatatgttttatgtttataaggtcttgaatcttgagaatatacaccattgcttcttgttccctttttaagctgtcccccattgtccccaggaggacaaaatgagacaattcctgtcatcttttaattgtgggtgtctattacacattttgtttttttctcctttatttttcctttgtgtttgcttatacctgactcagatcacaaattctctgaagacagagatttgttcacaacccagcacatctttatcacttaaataacacatttggtaagattatttaaagacttgggaaggaaaatactgcccttgttatatgcttttaaattttaaattttttatttattttttaatcatagatacacattccagttttcctgatggtgaacaaataggccctgaagatctcagcttcaatacagatgaaaatagtggaaggtaattgccaaatcaagagaactgacttgcaagctaccttgaccctgaattttgctgtagttggtgctcaaatttgtcatcagtcagataatcagatttggtcttatttcttcattatctcgacctgaaatagtaatttggaaactgttggaaggtggcacagtttagtctaagacagcagtagtacatgggaaaaacagtatgggaagagttctttgtaatgtaaggaaataacaatgtagttctctattaatttagcaaatttgtacattcacaaaaggcagtttgtctactacagcagaaggctggttaactgccagaaaatgtacctccaggccctgcatgccgtcagtaacccgcccggcattggtgctctactgtctttggctagagcttagttgtgtttaaataatcatctttatatttggggttttaattacagttccattagtgcctgtagattagtgaacagaaaattgctttggaagagattctgccctgtagacactatgtgaataactgaagtaacactagactgaatctcctttttggagtatgtatcttctctcacttgttcaagtacaggcacactgttcaaccgcatggtatctttctgttgtgtgacttctacaaatgtaattttaaatgaaattaagttaacatggattcattacgttcctggccctgtagacacgtgtaagattatttaaaattctttcatttttttctgcctcttactatacgactgtagtgcaacaaatattttaaagcccccttttcttctttattttcattagttgtacattgatttcagtgtcaacacatttaaagattcattcatgttgcacagtggcttacatgaacgtgaaactgtgatataaggttttctttcatactcataattagcccaaaacagttgccaaactttgccattgtgctcctgcatttgtgtttgagctgctatatatttgtggaaattacactgaaagttgactaagagactattgaaaaagcatgaataattaaatatacatgtgagagacatctcatctgctgtattttacttagtgaatattgttcactcttccgtgtctgatgtcttgctgaatgctgtgactcatagtttacttttgttcaaaatagtttgcactttttgttaataaaatcaacttgagaaaaagatgcctctgctgt

SEQ ID NO: 418787 - DNA, 4268 bp, Homo sapiens
agaccacctgctgccgaatcacacgatgctgggtgaaaacgcggatggcctgggccccaccctggaatctcagagtccgaatacttaactacgggtgtggctctgaagtctgcgctttccaccagtacgccaggtggctccgtctttggcgcgcaagtttgagagccgtggggccccgccctccgccaaggtgggcgtgggtggcgtagcagagccccaagctcaggccgcctgcgcaggctagggccggaggcacgcaaccctgaggcagcgagtcgccaagtctcgtatgcgccccgcaacgcgggaactaggcgatcgctccacgctcctcccctcctttcccctcccacagcgtcctgcgcgcatgcgcttcgcagcttctctcgccgccgcgcccccagctgctctggttacggttggtgtttgcgaattctctgcggcaccttcttcgctgaactccaccgtcagttccataggcgcgcgcccgcgtcacgtgggccgaggttccggcgcggctgctggccggcggctgagccgggagaaaggagctgcggccaccgttcgccctacttctgcgcctcggggcgggcgcgccggtaaaaatggcgaaatgggggtaggcggcgctggacctgaagagatggggcgcgcaggtggggcggttgtcagagccccctgacgtgggcgccgggcttttatcggcgatttgatctggcgacctcgggccggcgcctaagaggtcagactgcggagcctgcgggtcgccagcggccccgccgagagccggaggcaatggatgaacagagcgtggagagcattgctgaggttttccgatgtttcatttgtatggagaaattgcgggatgcacgcctgtgtcctcattgctccaaactgtgttgtttcagctgtattaggcgctggctgacagagcagagagctcaatgtcctcattgccgtgctccactccagctacgagaactagtaaattgtcgttgggcagaagaagtaacacaacagcttgatactcttcaactctgcagtctcaccaaacatgaagaaaatgaaaaggacaaatgtgaaaatcaccatgaaaaacttagtgtattttgctggacttgtaagaagtgtatctgccatcagtgtgcactttggggaggaatgcatggcggacatacctttaaacctttggcagaaatttatgagcaacacgtcactaaagtgaatgaagaggtagccaaacttcgtcggcgtctcatggaactgatcagcttagttcaagaagtggaaaggaatgtagaagctgtaagaaatgcaaaagatgagcgtgttcgggaaattaggaatgcagtggagatgatgattgcacggttagacacacagctgaagaataagcttataacactgatgggtcagaagacatctctaacccaagaaacagagcttttggaatccttacttcaggaggtggagcaccagttgcggtcttgtagtaagagtgagttgatatctaagagctcagagatccttatgatgtttcagcaagttcatcggaagcccatggcatcttttgttaccactcctgttccaccagactttaccagtgaattagtgccatcttacgattcagctacttttgttttagagaatttcagcactttgcgtcagagagcagatcctgtttacagtccacctcttcaagtttcaggactttgctggaggttaaaagtttacccagatggaaatggagttgtgcgaggttactacttatctgtgtttctggagctctcagctggcttgcctgaaacttctaaatatgaatatcgtgtagagatggttcaccagtcctgtaatgatcctacaaaaaatatcattcgagaatttgcatctgactttgaagttggagaatgctggggctataatagatttttccgtttggacttactcgcaaatgaaggatacttgaatccacaaaatgatacagtgattttaaggtttcaggtacgttcaccaactttctttcaaaaatcccgggaccagcattggtacattactcagttggaagctgcacagactagttatatccaacaaataaacaaccttaaagagagacttactattgagctgtctcgaactcagaagtcaagagatttgtcaccaccagataaccatcttagcccccaaaatgatgatgctctggagacacgagctaagaagtctgcatgctctgacatgcttctcgaaggtggtcctactacagcttctgtaagagaggccaaagaggatgaagaagatgaggagaagattcagaatgaagattatcatcacgagctttcagatggagatctggatctggatcttgtttatgaggatgaagtaaatcagctcgatggcagcagttcctctgctagttccacagcaacaagtaatacagaagaaaatgatattgatgaagaaactatgtctggagaaaatgatgtggaatataacaacatggaattagaagagggagaactcatggaagatgcagctgctgcaggacccgcaggtagtagccatggttatgtgggttccagtagtagaatatcaagaagaacacatttatgctccgctgctaccagtagtttactagacattgatccattaattttaatacatttgttggaccttaaggaccggagcagtatagaaaatttgtggggcttacagcctcgcccacctgcttcacttctgcagcccacagcatcatattctcgaaaagataaagaccaaaggaagcaacaggcaatgtggcgagtgccctctgatttaaagatgctaaaaagactcaaaactcaaatggccgaagttcgatgtatgaaaactgatgtaaagaatacactttcagaaataaaaagcagcagtgctgcttctggagacatgcagacaagccttttttctgctgaccaggcagctctggctgcatgtggaactgaaaactctggcagattgcaggatttgggaatggaactcctggcaaagtcatcagttgccaattgttacatacgaaactccacaaataagaagagtaattcgcccaagccagctcgatccagtgtagcaggtagtctatcacttcgaagagcagtggaccctggagaaaatagtcgttcaaagggagactgtcagactctgtctgaaggctccccaggaagctctcagtctgggagcaggcacagttctccccgagccttgatacatggcagtatcggtgatattctgccaaaaactgaagaccggcagtgtaaagctttggattcagatgctgttgtggttgcagttttcagtggcttgcctgcggttgagaaaaggaggaaaatggtcaccttgggggctaatgctaaaggaggtcatctggaaggactgcagatgactgatttggaaaataattctgaaactggagagttacagcctgtactacctgaaggagcttcagctgcccctgaagaagaaacatgttctccttccttcctgccaggaatgagtagcgacagtgacattgaatgtgacactgagaatgaggagcaggaagagcataccagtgtgggcgggtttcacgactccttcatggtcatgacacagcccccggatgaagatacacattccagttttcctgatggtgaacaaataggccctgaagatctcagcttcaatacagatgaaaatagtggaagataatttgatttgaaactgacactgcacctgatgggttaacaagatctaggcttcagaaggtgacagatatgagtgaggaccatgtgtggggcaaagcctcagaatgatgaaaaggttccggcactatagttggggccatgttgactccttttcaaccatttgtcacagacgtgagaagaagaaatgacttcaaaatcaagagaaaacaaatactgaaagtctctacttacatccaaattttaaaaaataaaatctgtagattaacaatctgatcattgctaaagtgaagctgtttttgtctatttgatatagctatactggtatccaaaatatgccagtcatctgtgtctttaaaattcagagattttagtcctctgttatgggcctggggaacgtgtactatcctataaacacatgattaggcgggggacacttcttagcgagagcactcacccttgttagtgagcactccagaggggccacccataggcattggccaggctggtctgctgttgactaggggagggtaacactaagacattcgtgactcttag

SEQ ID NO: 418788 - DNA, 2298 bp, Homo sapiens
tttaagctatttgcagatcagaatagaagagtgggcatttgtcctttcacatcacgtgattttcaaaggtgaaaaaaatttcttttgctaacttacgattcaaagaaaaatggtctcaaattaaagtgtggacaaaactgtagtattcccttttatagccttgcttaggtaagaatgttcactgagtgaataaattaggtttaaaaattaaaacaataatttagatcattttcccacaaagccttatcaaggatttgatggggaaggaagcacttgaaccacagcagttttatctgtaaacactgaacttggccatgcatcattttcatctgcccactggatgttgcacttctcactggcacagtgtttcaacagtggagtgtggttgtcatgaaaatgcagtattgacactataccactataaatgtggtcaaaattagactcagtgttgacattgacattgttgccattgtccttggaaaaggtgttactttcaaggagcctcctaaatgcaacagtaactttaatcataataattcaaggacaatggatggcacttctaggtaaagaaaaggtatatacatatgtgtttctacccatcctctttagtacagacctaaatgggattaatagccccagtgtgtgttgctgtaatgttgcctaacctcatgtccctcaaaagtacacatctagaaagtgaacaaaggaaacctgtaaattagggactgactccctttgaaactcacagtgaatgtacaaggagtttgtaatgacttcagttggtgacttgaagtttgtttccctaaccaatattacactcttgtttggatttattttactatttcctattctaacttgtttagcaggcaaacagattgatgcagaccatgttaaattgaaaaagggatactgccactctttaaggattgagtgtagaactttcaccaccactaaattacacaatgaataaaaatacaaaacacataattcacagactatacctcagcattaacagtttatagatattatatagatacttttatatctgtctaatatttttacaatcaccaggtacaccatcattaaatacaagttacagaaatatgtagataccattagttagagggttacttattgcttacgtcagcaagcagcaaataagggcacaggatttgaactgaagggaactacttcctatcaccagtggcgttaagagagaacactgcatttcacaaagcactgcttttatctagtttatagaaccaagagcagcatatatcagaccaataaccactattttagtatgtattatagaattttaaaggatttaccttacaaatggtacctaactactctataaatacgcatgttgtgaacaaatgaatagttgctatttttcacaatattggtttataacgaccacactagaactactttgctttattttgtagagagctaatggcatgagaaatgagttaacactgctgtgtagtcggacctacaaaatccagacccctaaagatgggtctgtgtttgtcccagttctatccagccatttttttccccactgagaaagcctagcatgtgtagtaactttttccctttaccctctttattctgatcaaaaacattaccaatagacaacaatagaaattttaaaaagcttttttttttacttcgctaagcactttggactataatgtgtaccaatagtctgctgcctttgttttcttgttttcttagataatttgatttgaaactgacactgcacctgatgggttaacaagatctaggcttcagaaggtgacagatatgagtgaggaccatgtgtggggcaaagcctcagaatgatgaaaaggttccggcactatagttggggccatgttgactccttttcaaccatttgtcacagacgtgagaagaagaaatgacttcaaaatcaagagaaaacaaatactgaaagtctctacttacatccaaattttaaaaaataaaatctgtagattaacaatctgatcattgctaaagtgaagctgtttttgtctatttgatatagctatactggtatccaaaatatgccagtcatctgtgtctttaaaattcagagattttagtcctctgttatgggcctggggaacgtgtactatcctataaacacatgattaggcgggggacacttcttagcgagagcactcacccttgttagtgagcactccagaggggccacccataggcattggccaggctggtctgctgttgactaggggagggtaacactaagacattcgtgactcttag

SEQ ID NO: 418789 - DNA, 1858 bp, Homo sapiens
agaccacctgctgccgaatcacacgatgctgggtgaaaacgcggatggcctgggccccaccctggaatctcagagtccgaatacttaactacgggtgtggctctgaagtctgcgctttccaccagtacgccaggtggctccgtctttggcgcgcaagtttgagagccgtggggccccgccctccgccaaggtgggcgtgggtggcgtagcagagccccaagctcaggccgcctgcgcaggctagggccggaggcacgcaaccctgaggcagcgagtcgccaagtctcgtatgcgccccgcaacgcgggaactaggcgatcgctccacgctcctcccctcctttcccctcccacagcgtcctgcgcgcatgcgcttcgcagcttctctcgccgccgcgcccccagctgctctggttacggttggtgtttgcgaattctctgcggcaccttcttcgctgaactccaccgtcagttccataggcgcgcgcccgcgtcacgtgggccgaggttccggcgcggctgctggccggcggctgagccgggagaaaggagctgcggccaccgttcgccctacttctgcgcctcggggcgggcgcgccggtaaaaatggcgaaatgggggtaggcggcgctggacctgaagagatggggcgcgcaggtggggcggttgtcagagccccctgacgtgggcgccgggcttttatcggcgatttgatctggcgacctcgggccggcgcctaagaggtcagactgcggagcctgcgggtcgccagcggccccgccgagagccggaggcaatggatgaacagagcgtggagagcattgctgaggttttccgatgtttcatttgtatggagaaattgcgggatgcacgcctgtgtcctcattgctccaaactgtgttgtttcagctgtattaggcgctggctgacagagcagagagctcaatgtcctcattgccgtgctccactccagctacgagaactagtaaattgtcgttgggcagaagaagtaacacaacagcttgatactcttcaactctgcagtctcaccaaacatgaagaaaatgaaaaggacaaatgtgaaaatcaccatgaaaaacttagtgtattttgctggacttgtaagaagtgtatctgccatcagtgtgcactttggggaggaatgcatggcggacatacctttaaacctttggcagaaatttatgagcaacacgtcactaaagtgaatgaagaggtagccaaacttcgtcggcgtctcatggaactgatcagcttagttcaagaagtggaaaggaatgtagaagctgtaagaaatgcaaaagatgagcgtgttcgggaaattaggaatgcagtggagatgatgattgcacggttagacacacagctgaagaataagcttataacactgatgggtcagaagacatctctaacccaagaaacagagcttttggaatccttacttcaggaggtggagcaccagttgcggtcttgtagtaagagtgagttgatatctaagagctcagagatccttatgatgtttcagcaagttcatcggaagcccatggcatcttttgttaccactcctgttccaccagactttaccagtgaattagtgccatcttacgattcagctacttttgttttagagaatttcaggtaagagtttttgacaattctggtttttttgtatgtgtatataaggaagagccagaaaggtattctttggtaagacagtaatctagtgaactgtgtcactcactttagaagtcttagaagaataagtttcctattagaaatgtagagataatttgtgctggattatattgtatctttagactgactgcttctctagtctggga

SEQ ID NO: 418790 - DNA, 1382 bp, Homo sapiens
  misc_feature (1105)..(1105): n is a, c, g, or t
  misc_feature (1116)..(1116): n is a, c, g, or t
  misc_feature (1127)..(1127): n is a, c, g, or t
  misc_feature (1262)..(1262): n is a, c, g, or t
  misc_feature (1283)..(1283): n is a, c, g, or t
  misc_feature (1310)..(1310): n is a, c, g, or t
  misc_feature (1317)..(1317): n is a, c, g, or t
  misc_feature (1325)..(1325): n is a, c, g, or t
  misc_feature (1346)..(1346): n is a, c, g, or t
  misc_feature (1355)..(1355): n is a, c, g, or t
  misc_feature (1369)..(1369): n is a, c, g, or t
agaccacctgctgccgaatcacacgatgctgggtgaaaacgcggatggcctgggccccaccctggaatctcagagtccgaatacttaactacgggtgtggctctgaagtctgcgctttccaccagtacgccaggtggctccgtctttggcgcgcaagtttgagagccgtggggccccgccctccgccaaggtgggcgtgggtggcgtagcagagccccaagctcaggccgcctgcgcaggctagggccggaggcacgcaaccctgaggcagcgagtcgccaagtctcgtatgcgccccgcaacgcgggaactaggcgatcgctccacgctcctcccctcctttcccctcccacagcgtcctgcgcgcatgcgcttcgcagcttctctcgccgccgcgcccccagctgctctggttacggttggtgtttgcgaattctctgcggcaccttcttcgctgaactccaccgtcagttccataggcgcgcgcccgcgtcacgtgggccgaggttccggcgcggctgctggccggcggctgagccgggagaaaggagctgcggccaccgttcgccctacttctgcgcctcggggcgggcgcgccggtaaaaatggcgaaatgggggtaggcggcgctggacctgaagagatggggcgcgcaggtggggcggttgtcagagccccctgacgtgggcgccgggcttttatcggcgatttgatctggcgacctcgggccggcgcctaagaggtcagactgcggagcctgcgggtcgccagcggccccgccgagagccggaggcaatggatgaacagagcgtggagagcattgctgaggttttccgatgtttcatttgtatggagaaattgcgggatgcacgcctgtgtcctcattgctccaaactgtgttgtttcagctgtattaggcgctggctgacagagcagagagctcaatgtcctcattgccgtgctccactccagctacgagaactagtaaattgtcgttgggcagaagaagtaacacaacagcttgatactcttcaactctgcagtctcaccaaacatgaagaaaatgaaaaggacaagtatgtcctcaatttctttgttcaatatngaatggatttngcctttgtatngtttaatgacactatatgggtagttgcctttagttatttatgaataagtagtgttatatttcttgtttttaattctttcagtcatgcgctgttactgttaagtaacatattcttattggtcatttaacaacagtnatttcatgccatgtatacacnagatacctctcggcctcccctcccccncacaganagtacttngctagatgataggcatacaanggtacatgngacatgattctgtnactgttaatgggg

SEQ ID NO: 418791 - DNA, 4778 bp, Homo sapiens
agaccacctgctgccgaatcacacgatgctgggtgaaaacgcggatggcctgggccccaccctggaatctcagagtccgaatacttaactacgggtgtggctctgaagtctgcgctttccaccagtacgccaggtggctccgtctttggcgcgcaagtttgagagccgtggggccccgccctccgccaaggtgggcgtgggtggcgtagcagagccccaagctcaggccgcctgcgcaggctagggccggaggcacgcaaccctgaggcagcgagtcgccaagtctcgtatgcgccccgcaacgcgggaactaggcgatcgctccacgctcctcccctcctttcccctcccacagcgtcctgcgcgcatgcgcttcgcagcttctctcgccgccgcgcccccagctgctctggttacggttggtgtttgcgaattctctgcggcaccttcttcgctgaactccaccgtcagttccataggcgcgcgcccgcgtcacgtgggccgaggttccggcgcggctgctggccggcggctgagccgggagaaaggagctgcggccaccgttcgccctacttctgcgcctcggggcgggcgcgccggtaaaaatggcgaaatgggggtaggcggcgctggacctgaagagatggggcgcgcaggtggggcggttgtcagagccccctgacgtgggcgccgggcttttatcggcgatttgatctggcgacctcgggccggcgcctaagaggtcagactgcggagcctgcgggtcgccagcggccccgccgagagccggaggcaatggatgaacagagcgtggagcgctggctgacagagcagagagctcaatgtcctcattgccgtgctccactccagctacgagaactagtaaattgtcgttgggcagaagaagtaacacaacagcttgatactcttcaactctgcagtctcaccaaacatgaagaaaatgaaaaggacaaatgtgaaaatcaccatgaaaaacttagtgtattttgctggacttgtaagaagtgtatctgccatcagtgtgcactttggggaggaatgcatggcggacatacctttaaacctttggcagaaatttatgagcaacacgtcactaaagtgaatgaagaggtagccaaacttcgtcggcgtctcatggaactgatcagcttagttcaagaagtggaaaggaatgtagaagctgtaagaaatgcaaaagatgagcgtgttcgggaaattaggaatgcagtggagatgatgattgcacggttagacacacagctgaagaataagcttataacactgatgggtcagaagacatctctaacccaagaaacagagcttttggaatccttacttcaggaggtggagcaccagttgcggtcttgtagtaagagtgagttgatatctaagagctcagagatccttatgatgtttcagcaagttcatcggaagcccatggcatcttttgttaccactcctgttccaccagactttaccagtgaattagtgccatcttacgattcagctacttttgttttagagaatttcagcactttgcgtcagagagcagatcctgtttacagtccacctcttcaagtttcaggactttgctggaggttaaaagtttacccagatggaaatggagttgtgcgaggttactacttatctgtgtttctggagctctcagctggcttgcctgaaacttctaaatatgaatatcgtgtagagatggttcaccagtcctgtaatgatcctacaaaaaatatcattcgagaatttgcatctgactttgaagttggagaatgctggggctataatagatttttccgtttggacttactcgcaaatgaaggatacttgaatccacaaaatgatacagtgattttaaggtttcaggtacgttcaccaactttctttcaaaaatcccgggaccagcattggtacattactcagttggaagctgcacagactagttatatccaacaaataaacaaccttaaagagagacttactattgagctgtctcgaactcagaagtcaagagatttgtcaccaccagataaccatcttagcccccaaaatgatgatgctctggagacacgagctaagaagtctgcatgctctgacatgcttctcgaaggtggtcctactacagcttctgtaagagaggccaaagaggatgaagaagatgaggagaagattcagaatgaagattatcatcacgagctttcagatggagatctggatctggatcttgtttatgaggatgaagtaaatcagctcgatggcagcagttcctctgctagttccacagcaacaagtaatacagaagaaaatgatattgatgaagaaactatgtctggagaaaatgatgtggaatataacaacatggaattagaagagggagaactcatggaagatgcagctgctgcaggacccgcaggtagtagccatggttatgtgggttccagtagtagaatatcaagaagaacacatttatgctccgctgctaccagtagtttactagacattgatccattaattttaatacatttgttggaccttaaggaccggagcagtatagaaaatttgtggggcttacagcctcgcccacctgcttcacttctgcagcccacagcatcatattctcgaaaagataaagaccaaaggaagcaacaggcaatgtggcgagtgccctctgatttaaagatgctaaaaagactcaaaactcaaatggccgaagttcgatgtatgaaaactgatgtaaagaatacactttcagaaataaaaagcagcagtgctgcttctggagacatgcagacaagccttttttctgctgaccaggcagctctggctgcatgtggaactgaaaactctggcagattgcaggatttgggaatggaactcctggcaaagtcatcagttgccaattgttacatacgaaactccacaaataagaagagtaattcgcccaagccagctcgatccagtgtagcaggtagtctatcacttcgaagagcagtggaccctggagaaaatagtcgttcaaagggagactgtcagactctgtctgaaggctccccaggaagctctcagtctgggagcaggcacagttctccccgagccttgatacatggcagtatcggtgatattctgccaaaaactgaagaccggcagtgtaaagctttggattcagatgctgttgtggttgcagttttcagtggcttgcctgcggttgagaaaaggaggaaaatggtcaccttgggggctaatgctaaaggaggtcatctggaaggactgcagatgactgatttggaaaataattctgaaactggagagttacagcctgtactacctgaaggagcttcagctgcccctgaagaaggaatgagtagcgacagtgacattgaatgtgacactgagaatgaggagcaggaagagcataccagtgtgggcgggtttcacgactccttcatggtcatgacacagcccccggatgaagatacacattccagttttcctgatggtgaacaaataggccctgaagatctcagcttcaatacagatgaaaatagtggaaggtaattgccaaatcaagagaactgacttgcaagctaccttgaccctgaattttgctgtagttggtgctcaaatttgtcatcagtcagataatcagatttggtcttatttcttcattatctcgacctgaaatagtaatttggaaactgttggaaggtggcacagtttagtctaagacagcagtagtacatgggaaaaacagtatgggaagagttctttgtaatgtaaggaaataacaatgtagttctctattaatttagcaaatttgtacattcacaaaaggcagtttgtctactacagcagaaggctggttaactgccagaaaatgtacctccaggccctgcatgccgtcagtaacccgcccggcattggtgctctactgtctttggctagagcttagttgtgtttaaataatcatctttatatttggggttttaattacagttccattagtgcctgtagattagtgaacagaaaattgctttggaagagattctgccctgtagacactatgtgaataactgaagtaacactagactgaatctcctttttggagtatgtatcttctctcacttgttcaagtacaggcacactgttcaaccgcatggtatctttctgttgtgtgacttctacaaatgtaattttaaatgaaattaagttaacatggattcattacgttcctggccctgtagacacgtgtaagattatttaaaattctttcatttttttctgcctcttactatacgactgtagtgcaacaaatattttaaagcccccttttcttctttattttcattagttgtacattgatttcagtgtcaacacatttaaagattcattcatgttgcacagtggcttacatgaacgtgaaactgtgatataaggttttctttcatactcataattagcccaaaacagttgccaaactttgccattgtgctcctgcatttgtgtttgagctgctatatatttgtggaaattacactgaaagttgactaagagactattgaaaaagcatgaataattaaatatacatgtgagagacatctcatctgctgtattttacttagtgaatattgttcactcttccgtgtctgatgtcttgctgaatgctgtgactcatagtttacttttgttcaaaatagtttgcactttttgttaataaaatcaacttgagaaaaagatgcctctgctgt

SEQ ID NO: 418792 - DNA, 4907 bp, Homo sapiens
agaccacctgctgccgaatcacacgatgctgggtgaaaacgcggatggcctgggccccaccctggaatctcagagtccgaatacttaactacgggtgtggctctgaagtctgcgctttccaccagtacgccaggtggctccgtctttggcgcgcaagtttgagagccgtggggccccgccctccgccaaggtgggcgtgggtggcgtagcagagccccaagctcaggccgcctgcgcaggctagggccggaggcacgcaaccctgaggcagcgagtcgccaagtctcgtatgcgccccgcaacgcgggaactaggcgatcgctccacgctcctcccctcctttcccctcccacagcgtcctgcgcgcatgcgcttcgcagcttctctcgccgccgcgcccccagctgctctggttacggttggtgtttgcgaattctctgcggcaccttcttcgctgaactccaccgtcagttccataggcgcgcgcccgcgtcacgtgggccgaggttccggcgcggctgctggccggcggctgagccgggagaaaggagctgcggccaccgttcgccctacttctgcgcctcggggcgggcgcgccggtaaaaatggcgaaatgggggtaggcggcgctggacctgaagagatggggcgcgcaggtggggcggttgtcagagccccctgacgtgggcgccgggcttttatcggcgatttgatctggcgacctcgggccggcgcctaagaggtcagactgcggagcctgcgggtcgccagcggccccgccgagagccggaggcaatggatgaacagagcgtggagagcattgctgaggttttccgatgtttcatttgtatggagaaattgcgggatgcacgcctgtgtcctcattgctccaaactgtgttgtttcagctgtattaggcgctggctgacagagcagagagctcaatgtcctcattgccgtgctccactccagctacgagaactagtaaattgtcgttgggcagaagaagtaacacaacagcttgatactcttcaactctgcagtctcaccaaacatgaagaaaatgaaaaggacaaatgtgaaaatcaccatgaaaaacttagtgtattttgctggacttgtaagaagtgtatctgccatcagtgtgcactttggggaggaatgcatggcggacatacctttaaacctttggcagaaatttatgagcaacacgtcactaaagtgaatgaagaggtagccaaacttcgtcggcgtctcatggaactgatcagcttagttcaagaagtggaaaggaatgtagaagctgtaagaaatgcaaaagatgagcgtgttcgggaaattaggaatgcagtggagatgatgattgcacggttagacacacagctgaagaataagcttataacactgatgggtcagaagacatctctaacccaagaaacagagcttttggaatccttacttcaggaggtggagcaccagttgcggtcttgtagtaagagtgagttgatatctaagagctcagagatccttatgatgtttcagcaagttcatcggaagcccatggcatcttttgttaccactcctgttccaccagactttaccagtgaattagtgccatcttacgattcagctacttttgttttagagaatttcagcactttgcgtcagagagcagatcctgtttacagtccacctcttcaagtttcaggactttgctggaggttaaaagtttacccagatggaaatggagttgtgcgaggttactacttatctgtgtttctggagctctcagctggcttgcctgaaacttctaaatatgaatatcgtgtagagatggttcaccagtcctgtaatgatcctacaaaaaatatcattcgagaatttgcatctgactttgaagttggagaatgctggggctataatagatttttccgtttggacttactcgcaaatgaaggatacttgaatccacaaaatgatacagtgattttaaggtttcaggtacgttcaccaactttctttcaaaaatcccgggaccagcattggtacattactcagttggaagctgcacagactagttatatccaacaaataaacaaccttaaagagagacttactattgagctgtctcgaactcagaagtcaagagatttgtcaccaccagataaccatcttagcccccaaaatgatgatgctctggagacacgagctaagaagtctgcatgctctgacatgcttctcgaaggtggtcctactacagcttctgtaagagaggccaaagaggatgaagaagatgaggagaagattcagaatgaagattatcatcacgagctttcagatggagatctggatctggatcttgtttatgaggatgaagtaaatcagctcgatggcagcagttcctctgctagttccacagcaacaagtaatacagaagaaaatgatattgatgaagaaactatgtctggagaaaatgatgtggaatataacaacatggaattagaagagggagaactcatggaagatgcagctgctgcaggacccgcaggtagtagccatggttatgtgggttccagtagtagaatatcaagaagaacacatttatgctccgctgctaccagtagtttactagacattgatccattaattttaatacatttgttggaccttaaggaccggagcagtatagaaaatttgtggggcttacagcctcgcccacctgcttcacttctgcagcccacagcatcatattctcgaaaagataaagaccaaaggaagcaacaggcaatgtggcgagtgccctctgatttaaagatgctaaaaagactcaaaactcaaatggccgaagttcgatgtatgaaaactgatgtaaagaatacactttcagaaataaaaagcagcagtgctgcttctggagacatgcagacaagccttttttctgctgaccaggcagctctggctgcatgtggaactgaaaactctggcagattgcaggatttgggaatggaactcctggcaaagtcatcagttgccaattgttacatacgaaactccacaaataagaagagtaattcgcccaagccagctcgatccagtgtagcaggtagtctatcacttcgaagagcagtggaccctggagaaaatagtcgttcaaagggagactgtcagactctgtctgaaggctccccaggaagctctcagtctgggagcaggcacagttctccccgagccttgatacatggcagtatcggtgatattctgccaaaaactgaagaccggcagtgtaaagctttggattcagatgctgttgtggttgcagttttcagtggcttgcctgcggttgagaaaaggaggaaaatggtcaccttgggggctaatgctaaaggaggtcatctggaaggactgcagatgactgatttggaaaataattctgaaactggagagttacagcctgtactacctgaaggagcttcagctgcccctgaagaagaaacatgttctccttccttcctgccaggaatgagtagcgacagtgacattgaatgtgacactgagaatgaggagcaggaagagcataccagtgtgggcgggtttcacgactccttcatggtcatgacacagcccccggatgaagatacacattccagttttcctgatggtgaacaaataggccctgaagatctcagcttcaatacagatgaaaatagtggaaggtaattgccaaatcaagagaactgacttgcaagctaccttgaccctgaattttgctgtagttggtgctcaaatttgtcatcagtcagataatcagatttggtcttatttcttcattatctcgacctgaaatagtaatttggaaactgttggaaggtggcacagtttagtctaagacagcagtagtacatgggaaaaacagtatgggaagagttctttgtaatgtaaggaaataacaatgtagttctctattaatttagcaaatttgtacattcacaaaaggcagtttgtctactacagcagaaggctggttaactgccagaaaatgtacctccaggccctgcatgccgtcagtaacccgcccggcattggtgctctactgtctttggctagagcttagttgtgtttaaataatcatctttatatttggggttttaattacagttccattagtgcctgtagattagtgaacagaaaattgctttggaagagattctgccctgtagacactatgtgaataactgaagtaacactagactgaatctcctttttggagtatgtatcttctctcacttgttcaagtacaggcacactgttcaaccgcatggtatctttctgttgtgtgacttctacaaatgtaattttaaatgaaattaagttaacatggattcattacgttcctggccctgtagacacgtgtaagattatttaaaattctttcatttttttctgcctcttactatacgactgtagtgcaacaaatattttaaagcccccttttcttctttattttcattagttgtacattgatttcagtgtcaacacatttaaagattcattcatgttgcacagtggcttacatgaacgtgaaactgtgatataaggttttctttcatactcataattagcccaaaacagttgccaaactttgccattgtgctcctgcatttgtgtttgagctgctatatatttgtggaaattacactgaaagttgactaagagactattgaaaaagcatgaataattaaatatacatgtgagagacatctcatctgctgtattttacttagtgaatattgttcactcttccgtgtctgatgtcttgctgaatgctgtgactcatagtttacttttgttcaaaatagtttgcactttttgttaataaaatcaacttgagaaaaagatgcctctgctgt

SEQ ID NO: 418793 - DNA, 4241 bp, Homo sapiens
agaccacctgctgccgaatcacacgatgctgggtgaaaacgcggatggcctgggccccaccctggaatctcagagtccgaatacttaactacgggtgtggctctgaagtctgcgctttccaccagtacgccaggtggctccgtctttggcgcgcaagtttgagagccgtggggccccgccctccgccaaggtgggcgtgggtggcgtagcagagccccaagctcaggccgcctgcgcaggctagggccggaggcacgcaaccctgaggcagcgagtcgccaagtctcgtatgcgccccgcaacgcgggaactaggcgatcgctccacgctcctcccctcctttcccctcccacagcgtcctgcgcgcatgcgcttcgcagcttctctcgccgccgcgcccccagctgctctggttacggttggtgtttgcgaattctctgcggcaccttcttcgctgaactccaccgtcagttccataggcgcgcgcccgcgtcacgtgggccgaggttccggcgcggctgctggccggcggctgagccgggagaaaggagctgcggccaccgttcgccctacttctgcgcctcggggcgggcgcgccggtaaaaatggcgaaatgggggtaggcggcgctggacctgaagagatggggcgcgcaggtggggcggttgtcagagccccctgacgtgggcgccgggcttttatcggcgatttgatctggcgacctcgggccggcgcctaagaggtcagactgcggagcctgcgggtcgccagcggccccgccgagagccggaggcaatggatgaacagagcgtggagagcattgctgaggttttccgatgtttcatttgtatggagaaattgcgggatgcacgcctgtgtcctcattgctccaaactgtgttgtttcagctgtattaggcgctggctgacagagcagagagctcaatgtcctcattgccgtgctccactccagctacgagaactagtaaattgtcgttgggcagaagaagtaacacaacagcttgatactcttcaactctgcagtctcaccaaacatgaagaaaatgaaaaggacaaatgtgaaaatcaccatgaaaaacttagtgtattttgctggacttgtaagaagtgtatctgccatcagtgtgcactttggggaggaatgcatggcggacatacctttaaacctttggcagaaatttatgagcaacacgtcactaaagtgaatgaagaggtagccaaacttcgtcggcgtctcatggaactgatcagcttagttcaagaagtggaaaggaatgtagaagctgtaagaaatgcaaaagatgagcgtgttcgggaaattaggaatgcagtggagatgatgattgcacggttagacacacagctgaagaataagcttataacactgatgggtcagaagacatctctaacccaagaaacagagcttttggaatccttacttcaggaggtggagcaccagttgcggtcttgtagtaagagtgagttgatatctaagagctcagagatccttatgatgtttcagcaagttcatcggaagcccatggcatcttttgttaccactcctgttccaccagactttaccagtgaattagtgccatcttacgattcagctacttttgttttagagaatttcagcactttgcgtcagagagcagatcctgtttacagtccacctcttcaagtttcaggactttgctggaggttaaaagtttacccagatggaaatggagttgtgcgaggttactacttatctgtgtttctggagctctcagctggcttgcctgaaacttctaaatatgaatatcgtgtagagatggttcaccagtcctgtaatgatcctacaaaaaatatcattcgagaatttgcatctgactttgaagttggagaatgctggggctataatagatttttccgtttggacttactcgcaaatgaaggatacttgaatccacaaaatgatacagtgattttaaggtttcaggtacgttcaccaactttctttcaaaaatcccgggaccagcattggtacattactcagttggaagctgcacagactagttatatccaacaaataaacaaccttaaagagagacttactattgagctgtctcgaactcagaagtcaagagatttgtcaccaccagataaccatcttagcccccaaaatgatgatgctctggagacacgagctaagaagtctgcatgctctgacatgcttctcgaaggtggtcctactacagcttctgtaagagaggccaaagaggatgaagaagatgaggagaagattcagaatgaagattatcatcacgagctttcagatggagatctggatctggatcttgtttatgaggatgaagtaaatcagctcgatggcagcagttcctctgctagttccacagcaacaagtaatacagaagaaaatgatattgatgaagaaactatgtctggagaaaatgatgtggaatataacaacatggaattagaagagggagaactcatggaagatgcagctgctgcaggacccgcaggtagtagccatggttatgtgggttccagtagtagaatatcaagaagaacacatttatgctccgctgctaccagtagtttactagacattgatccattaattttaatacatttgttggaccttaaggaccggagcagtatagaaaatttgtggggcttacagcctcgcccacctgcttcacttctgcagcccacagcatcatattctcgaaaagataaagaccaaaggaagcaacaggcaatgtggcgagtgccctctgatttaaagatgctaaaaagactcaaaactcaaatggccgaagttcgatgtatgaaaactgatgtaaagaatacactttcagaaataaaaagcagcagtgctgcttctggagacatgcagacaagccttttttctgctgaccaggcagctctggctgcatgtggaactgaaaactctggcagattgcaggatttgggaatggaactcctggcaaagtcatcagttgccaattgttacatacgaaactccacaaataagaagagtaattcgcccaagccagctcgatccagtgtagcaggtagtctatcacttcgaagagcagtggaccctggagaaaatagtcgttcaaagggagactgtcagactctgtctgaaggctccccaggaagctctcagtctgggagcaggcacagttctccccgagccttgatacatggcagtatcggtgatattctgccaaaaactgaagaccggcagtgtaaagctttggattcagatgctgttgtggttgcagttttcagtggcttgcctgcggttgagaaaaggaggaaaatggtcaccttgggggctaatgctaaaggaggtcatctggaaggactgcagatgactgatttggaaaataattctgaaactggagagttacagcctgtactacctgaaggagcttcagctgcccctgaagaaggaatgagtagcgacagtgacattgaatgtgacactgagaatgaggagcaggaagagcataccagtgtgggcgggtttcacgactccttcatggtcatgacacagcccccggatgaagatacacattccagttttcctgatggtgaacaaataggccctgaagatctcagcttcaatacagatgaaaatagtggaagataatttgatttgaaactgacactgcacctgatgggttaacaagatctaggcttcagaaggtgacagatatgagtgaggaccatgtgtggggcaaagcctcagaatgatgaaaaggttccggcactatagttggggccatgttgactccttttcaaccatttgtcacagacgtgagaagaagaaatgacttcaaaatcaagagaaaacaaatactgaaagtctctacttacatccaaattttaaaaaataaaatctgtagattaacaatctgatcattgctaaagtgaagctgtttttgtctatttgatatagctatactggtatccaaaatatgccagtcatctgtgtctttaaaattcagagattttagtcctctgttatgggcctggggaacgtgtactatcctataaacacatgattaggcgggggacacttcttagcgagagcactcacccttgttagtgagcactccagaggggccacccataggcattggccaggctggtctgctgttgactaggggagggtaacactaagacattcgtgactcttag

SEQ ID NO: 418794 - DNA, 1816 bp, Homo sapiens
agaccacctgctgccgaatcacacgatgctgggtgaaaacgcggatggcctgggccccaccctggaatctcagagtccgaatacttaactacgggtgtggctctgaagtctgcgctttccaccagtacgccaggtggctccgtctttggcgcgcaagtttgagagccgtggggccccgccctccgccaaggtgggcgtgggtggcgtagcagagccccaagctcaggccgcctgcgcaggctagggccggaggcacgcaaccctgaggcagcgagtcgccaagtctcgtatgcgccccgcaacgcgggaactaggcgatcgctccacgctcctcccctcctttcccctcccacagcgtcctgcgcgcatgcgcttcgcagcttctctcgccgccgcgcccccagctgctctggttacggttggtgtttgcgaattctctgcggcaccttcttcgctgaactccaccgtcagttccataggcgcgcgcccgcgtcacgtgggccgaggttccggcgcggctgctggccggcggctgagccgggagaaaggagctgcggccaccgttcgccctacttctgcgcctcggggcgggcgcgccggtaaaaatggcgaaatgggggtaggcggcgctggacctgaagagatggggcgcgcaggtggggcggttgtcagagccccctgacgtgggcgccgggcttttatcggcgatttgatctggcgacctcgggccggcgcctaagaggtcagactgcggagcctgcgggtcgccagcggccccgccgagagccggaggcaatggatgaacagagcgtggagagcattgctgaggttttccgatgtttcatttgtatggagaaattgcgggatgcacgcctgtgtcctcattgctccaaactgtgttgtttcagctgtattaggcgctggctgacagagcagagagctcaatgtcctcattgccgtgctccactccagctacgagaactagtaaattgtcgttgggcagaagaagtaacacaacagcttgatactcttcaactctgcagtctcaccaaacatgaagaaaatgaaaaggacaaatgtgaaaatcaccatgaaaaacttagtgtattttgctggacttgtaagaagtgtatctgccatcagtgtgcactttggggaggaatgcatggcggacatacctttaaacctttggcagaaatttatgagcaacacgtcactaaagtgaatgaagaggtagccaaacttcgtcggcgtctcatggaactgatcagcttagttcaagaagtggaaaggaatgtagaagctgtaagaaatgcaaaagatgagcgtgttcgggaaattaggaatgcagtggagatgatgattgcacggttagacacacagctgaagaataagcttataacactgatgggtcagaagacatctctaacccaagaaacagagcttttggaatccttacttcaggaggtggagcaccagggagcaagttgcttttggaagaaatggtgtcaaggaaggatatatacattgcggtcttgtagtaagagtgagttgatatctaagagctcagagatccttatgatgtttcagcaagttcatcggaagcccatggcatcttttgttaccactcctgttccaccagactttaccagtgaattagtgccatcttacgattcagctacttttgttttagagaatttcagcactttgcgtcagagagcagatcctgtttacagtccacctcttcaagtttcaggactttgctggaggttaaaagtttacccagatggaaatggagttgtgcgggcctgtagcg

SEQ ID NO: 418795 - DNA, 763 bp, Homo sapiens
cgaactcagaagtcaagagatttgtcaccaccagataaccatcttagcccccaaaatgatgatgctctggagacacgagctaagaagtctgcatgctctgacatgcttctcgaaggtggtcctactacagcttctgtaagagaggccaaagaggatgaagaagatgaggagaagattcagaatgaagattatcatgtaataatgaggccagttttagatttttgtgtttgattaaaaaaaaacagtagcatcatggcttttaacatattatgtgctaaaacagtaggctaaaaatattgtccattgatttccattagtaatgtatgtatgcccttatgtaaatgttaataagtcagaagttgttgaatcaaagcatttcaaggttgtgaaaaaaacaatacattgtataaaacaaaccgtgatacacattttaaaacctaaactaccatacattgtggattttaaaaatgtgttctggccgggtgcggtggctcacacctgtaatcccagcactttgggaggccaaggtgggtggatcacatgaggtcaggagttcgagactatcctggccaacatggccaaaccctgtctctacgaaaaatacaaaaattagctgggtgtggtggtgcttgcctgtaatcccagctacttgggaggctgaggtaggagaatcacttgaacctaggaggcggaggttgcagtgagccaagattgtgccactgcactccagcctgggagacagagcaagactctgtctcaaaga

SEQ ID NO: 418796 - DNA, 499 bp, Homo sapiens
  misc_feature (499)..(499): n is a, c, g, or t
cttccatcttccttccagggatcctggacacactggagggccccaacatcccgcccatccagagggtccccagagacatccctgccatgctccctgctgctcggcttcccaccaccgtcctcaacgccacagccaaagctgttgcggtgaccctgcagtcacactgaccccacctgaaattcttggccagtcctctttcccgcagctgcagagaggaggaagactattaaaggacagtcctgatgacatgtttcgtagatggggtttgcagctgccactgagctgtagctgcgtaagtacctccttgatgcctgtcgggtgggcagccacttcgtgggcagcgctgcccacgaagtgcacctaattggaagcaccaccctagcaatatcaaccattaaccttccctctacacttatcatcttcacaattctaattctactgactatcctagaaatcgctgtcgccttaatccaagctacgttttcacatcgtgggcagn

SEQ ID NO: 418797 - DNA, 1631 bp, Homo sapiens
  misc_feature (26)..(26): n is a, c, g, or t
  misc_feature (1557)..(1557): n is a, c, g, or t
  misc_feature (1564)..(1564): n is a, c, g, or t
  misc_feature (1566)..(1566): n is a, c, g, or t
  misc_feature (1569)..(1569): n is a, c, g, or t
atgcaggctggtacggccgagtgtangatccgggcttctcctttttgtgttccggccgatcccacctctcctcgaccctggacgtctaccttccggaggcccacatcttgcccactccgcgcgcggggctagcgcgggtttcagcgacgggagccctcaagggacatggcaactacagcggcgccggcgggcggcgcccgaaatggagctggcccggaatggggagggttcgaagaaaacatccagggcggaggctcagctgtgattgacatggagaacatggatgatacctcaggctctagcttcgaggatatgggtgagctgcatcagcgcctgcgcgaggaagaagtagacgctgatgcagctgatgcagctgctgctgaagaggaggatggagagttcctgggcatgaagggctttaagggacagctgagccggcaggtggcagatcagatgtggcaggctgggaaaagacaagcctccagggccttcagcttgtacgccaacatcgacatcctcagaccctactttgatgtggagcctgctcaggtgcgaagcaggctcctggagtccatgatccctatcaagatggtcaacttcccccagaaaattgcaggtgaactctatggacctctcatgctggtcttcactctggttgctatcctactccatgggatgaagacgtctgacactattatccgggagggcaccctgatgggcacagccattggcacctgcttcggctactggctgggagtctcatccttcatttacttccttgcctacctgtgcaacgcccagatcaccatgctgcagatgttggcactgctgggctatggcctctttgggcattgcattgtcctgttcatcacctataatatccacctccacgccctcttctacctcttctggctgttggtgggtggactgtccacactgcgcatggtagcagtgttggtgtctcggaccgtgggccccacacagcggctgctcctctgtggcaccctggctgccctacacatgctcttcctgctctatctgcattttgcctaccacaaagtggtagaggggatcctggacacactggagggccccaacatcccgcccatccagagggtccccagagacatccctgccatgctccctgctgctcggcttcccaccaccgtcctcaacgccacagccaaagctgttgcggtgaccctgcagtcacactgaccccacctgaaattcttggccagtcctctttcccgcagctgcagagaggaggaagactattaaaggacagtcctgatgacatgtttcgtagatggggtttgcagctgccactgagctgtagctgcgtaagtacctccttgatgcctgtcggcacttctgaaaggcacaaggccaagaactcctggccaggactgcaaggctctgcagccaatgcagaaaatgggtcagctcctttgagaacccctccccacctaccccttccttcctctttatctctcccacattgtcttgctaaatatagacttggtaattaaaatgttgattgaagtctggaaaacncaacacncncanccacaccaattcccagacgtatatggtaccgcctcacactcgtcccgtatctcgcgttgggt

SEQ ID NO: 418798 - DNA, 2046 bp, Homo sapiens
  misc_feature (26)..(26): n is a, c, g, or t
atgcaggctggtacggccgagtgtangatccgggcttctcctttttgtgttccggccgatcccacctctcctcgaccctggacgtctaccttccggaggcccacatcttgcccactccgcgcgcggggctagcgcgggtttcagcgacgggagccctcaagggacatggcaactacagcggcgccggcgggcggcgcccgaaatggagctggcccggaatggggagggttcgaagaaaacatccagggcggaggctcagctgtgattgacatggagaacatggatgatacctcaggctctagcttcgaggatatgggtgagctgcatcagcgcctgcgcgaggaagaagtagacgctgatgcagctgatgcagctgctgctgaagaggaggatggagagttcctgggcatgaagggctttaagggacagctgagccggcaggtggcagatcagatgtggcaggctgggaaaagacaagcctccagggccttcagcttgtacgccaacatcgacatcctcagaccctactttgatgtggagcctgctcaggtgcgaagcaggctcctggagtccatgatccctatcaagatggtcaacttcccccagaaaattgcaggtgaactctatggacctctcatgctggtcttcactctggttgctatcctactccatgggatgaagacgtctgacactattatccgggagggcaccctgatgggcacagccattggcacctgcttcggctactggctgggagtctcatccttcatttacttccttgcctacctgtgcaacgcccagatcaccatgctgcagatgttggcactgctgggctatggcctctttgggcattgcattgtcctgttcatcacctataatatccacctccacgccctcttctacctcttctggctgttggtgggtggactgtccacactgcgcatggtagcagtgttggtgtctcggaccgtgggccccacacagcggctgctcctctgtggcaccctggctgccctacacatgctcttcctgctctatctgcattttgcctaccacaaagtggtagaggggatcctggacacactggagggccccaacatcccgcccatccagagggtccccagagacatccctgccatgctccctgctgctcggcttcccaccaccgtcctcaacgccacagccaaagctgttgcggtgaccctgcagtcacactgaccccacctgaaattcttggccagtcctctttcccgcagctgcagagaggaggaagactattaaaggacagtcctgatgacatgtttcgtagatggggtttgcagctgccactgagctgtagctgcgtaagtacctccttgatgcctgtcggcacttctgaaaggcacaaggccaagaactcctggccaggactgcaaggctctgcagccaatgcagaaaatgggtcagctcctttgagaacccctccccacctaccccttccttcctctttatctctcccacattgtcttgctaaatatagacttggtaattaaaatgttgattgaagtctggaaaaaaaaaaaaaaaaaaaaaaaaggggggggggcccaaaagttattccccgcggggggcccaggttataggcgtccccaggcttcctgtggctacacagggggccccaaattagaggagccgatataataaacgcaaggcaccgggccgccggtttcaacaacggctcgtgacggggaacaccggctaccctgggagactctgggcgacgggacaccttatacctccgggcgggggggggacactattgtgggcgcaatacttaccttacggagtactttcaaagagccttcctaagggggctaaagtctcttcacacactttcttcaaaagcccggggttacctaacagcggctgttctcaacatcttaacgcgtggccatatatgcctcgtggcgcgccttgttgaagaaagcttggaggccacaaagcgcggagttcgacacattctcgttgcaccatctctttttacccgcgggctattgtgaacacaac

SEQ ID NO: 418799 - DNA, 1518 bp, Homo sapiens
  misc_feature (6)..(8): n is a, c, g, or t
  misc_feature (38)..(38): n is a, c, g, or t
ggtccnnnccatctaacggctaggtacgaggctgggtntaccctggacgtctaccttccggaggcccacatcttgcccactccgcgcgcggggctagcgcgggtttcagcgacgggagccctcaagggacatggcaactacagcggcgccggcgggcggcgcccgaaatggagctggcccggaatggggagggttcgaagaaaacatccagggcggaggctcagctgtgattgacatggagaacatggatgatacctcaggctctagcttcgaggatatgggtgagctgcatcagcgcctgcgcgaggaagaagtagacgctgatgcagctgatgcagctgctgctgaagaggaggatggagagttcctgggcatgaagggctttaagggacagctgagccggcaggtggcagatcagatgtggcaggctgggaaaagacaagcctccagggccttcagcttgtacgccaacatcgacatcctcagaccctactttgatgtggagcctgctcaggtgcgaagcaggctcctggagtccatgatccctatcaagatggtcaacttcccccagaaaattgcaggtgaactctatggacctctcatgctggtcttcactctggttgctatcctactccatgggatgaagacgtctgacactattatccgggagggcaccctgatgggcacagccattggcacctgcttcggctactggctgggagtctcatccttcatttacttccttgcctacctgtgcaacgcccagatcaccatgctgcagatgttggcactgctgggctatggcctctttgggcattgcattgtcctgttcatcacctataatatccacctccacgccctcttctacctcttctggctgttggtgggtggactgtccacactgcgcatggtagcagtgttggtgtctcggaccgtgggccccacacagcggctgctcctctgtggcaccctggctgccctacacatgctcttcctgctctatctgcattttgcctaccacaaagtggtagaggggatcctggacacactggagggccccaacatcccgcccatccagagggtccccagagacatccctgccatgctccctgctgctcggcttcccaccaccgtcctcaacgccacagccaaagctgttgcggtgaccctgcagtcacactgaccccacctgaaattcttggccagtcctctttcccgcagctgcagagaggaggaagactattaaaggacagtcctgatgacatgtttcgtagatggggtttgcagctgccactgagctgtagctgcgtaagtacctccttgatgcctgtcggcacttctgaaaggcacaaggccaagaactcctggccaggactgcaaggctctgcagccaatgcagaaaatgggtcagctcctttgagaacccctccccacctaccccttccttcctctttatctctcccacattgtcttgctaaatatagacttggtaattaaaatgttgattgaagtctggaa

SEQ ID NO: 418800 - DNA, 1645 bp, Homo sapiens
  misc_feature (26)..(26): n is a, c, g, or t
atgcaggctggtacggccgagtgtangatccgggcttctcctttttgtgttccggccgatcccacctctcctcgaccctggacgtctaccttccggaggcccacatcttgcccactccgcgcgcggggctagcgcgggtttcagcgacgggagccctcaagggacatggcaactacagcggcgccggcgggcggcgcccgaaatggagctggcccggaatggggagggttcgaagaaaacatccagtggaagaacaaagccctaaaccctgggatgagcagaggacttaatggatggaacagaaaagtcctgcactctaggagccattgtcttcacagggcggaggctcagctgtgattgacatggagaacatggatgatacctcaggctctagcttcgaggatatgggtgagctgcatcagcgcctgcgcgaggaagaagtagacgctgatgcagctgatgcagctgctgctgaagaggaggatggagagttcctgggcatgaagggctttaagggacagctgagccggcaggtggcagatcagatgtggcaggctgggaaaagacaagcctccagggccttcagcttgtacgccaacatcgacatcctcagaccctactttgatgtggagcctgctcaggtgcgaagcaggctcctggagtccatgatccctatcaagatggtcaacttcccccagaaaattgcaggtgaactctatggacctctcatgctggtcttcactctggttgctatcctactccatgggatgaagacgtctgacactattatccgggagggcaccctgatgggcacagccattggcacctgcttcggctactggctgggagtctcatccttcatttacttccttgcctacctgtgcaacgcccagatcaccatgctgcagatgttggcactgctgggctatggcctctttgggcattgcattgtcctgttcatcacctataatatccacctccacgccctcttctacctcttctggctgttggtgggtggactgtccacactgcgcatggtagcagtgttggtgtctcggaccgtgggccccacacagcggctgctcctctgtggcaccctggctgccctacacatgctcttcctgctctatctgcattttgcctaccacaaagtggtagaggggatcctggacacactggagggccccaacatcccgcccatccagagggtccccagagacatccctgccatgctccctgctgctcggcttcccaccaccgtcctcaacgccacagccaaagctgttgcggtgaccctgcagtcacactgaccccacctgaaattcttggccagtcctctttcccgcagctgcagagaggaggaagactattaaaggacagtcctgatgacatgtttcgtagatggggtttgcagctgccactgagctgtagctgcgtaagtacctccttgatgcctgtcggcacttctgaaaggcacaaggccaagaactcctggccaggactgcaaggctctgcagccaatgcagaaaatgggtcagctcctttgagaacccctccccacctaccccttccttcctctttatctctcccacattgtcttgctaaatatagacttggtaattaaaatgttgattgaagtctggaa

SEQ ID NO: 418801 - DNA, 1610 bp, Homo sapiens
  misc_feature (6)..(8): n is a, c, g, or t
  misc_feature (38)..(38): n is a, c, g, or t
ggtccnnnccatctaacggctaggtacgaggctgggtntaccctggacgtctaccttccggaggcccacatcttgcccactccgcgcgcggggctagcgcgggtttcagcgacgggagccctcaagggacatggcaactacagcggcgccggcgggcggcgcccgaaatggagctggcccggaatggggagggttcgaagaaaacatccagtggaagaacaaagccctaaaccctgggatgagcagaggacttaatggatggaacagaaaagtcctgcactctaggagccattgtcttcacagggcggaggctcagctgtgattgacatggagaacatggatgatacctcaggctctagcttcgaggatatgggtgagctgcatcagcgcctgcgcgaggaagaagtagacgctgatgcagctgatgcagctgctgctgaagaggaggatggagagttcctgggcatgaagggctttaagggacagctgagccggcaggtggcagatcagatgtggcaggctgggaaaagacaagcctccagggccttcagcttgtacgccaacatcgacatcctcagaccctactttgatgtggagcctgctcaggtgcgaagcaggctcctggagtccatgatccctatcaagatggtcaacttcccccagaaaattgcaggtgaactctatggacctctcatgctggtcttcactctggttgctatcctactccatgggatgaagacgtctgacactattatccgggagggcaccctgatgggcacagccattggcacctgcttcggctactggctgggagtctcatccttcatttacttccttgcctacctgtgcaacgcccagatcaccatgctgcagatgttggcactgctgggctatggcctctttgggcattgcattgtcctgttcatcacctataatatccacctccacgccctcttctacctcttctggctgttggtgggtggactgtccacactgcgcatggtagcagtgttggtgtctcggaccgtgggccccacacagcggctgctcctctgtggcaccctggctgccctacacatgctcttcctgctctatctgcattttgcctaccacaaagtggtagaggggatcctggacacactggagggccccaacatcccgcccatccagagggtccccagagacatccctgccatgctccctgctgctcggcttcccaccaccgtcctcaacgccacagccaaagctgttgcggtgaccctgcagtcacactgaccccacctgaaattcttggccagtcctctttcccgcagctgcagagaggaggaagactattaaaggacagtcctgatgacatgtttcgtagatggggtttgcagctgccactgagctgtagctgcgtaagtacctccttgatgcctgtcggcacttctgaaaggcacaaggccaagaactcctggccaggactgcaaggctctgcagccaatgcagaaaatgggtcagctcctttgagaacccctccccacctaccccttccttcctctttatctctcccacattgtcttgctaaatatagacttggtaattaaaatgttgattgaagtctggaa

SEQ ID NO: 418802 - DNA, 1035 bp, Homo sapiens
  misc_feature (26)..(26): n is a, c, g, or t
  misc_feature (1035)..(1035): n is a, c, g, or t
atgcaggctggtacggccgagtgtangatccgggcttctcctttttgtgttccggccgatcccacctctcctcgaccctggacgtctaccttccggaggcccacatcttgcccactccgcgcgcggggctagcgcgggtttcagcgacgggagccctcaagggacatggcaactacagcggcgccggcgggcggcgcccgaaatggagctggcccggaatggggagggttcgaagaaaacatccagggcggaggctcagctgtgattgacatggagaacatggatgatacctcaggctctagcttcgaggatatgggtgagctgcatcagcgcctgcgcgaggaagaagtagacgctgatgcagctgatgcagctgctgctgaagaggaggatggagagttcctgggcatgaagggctttaagggacagctgagccggcaggtggcagatcagatgtggcaggctgggaaaagacaagcctccagggccttcagcttgtacgccaacatcgacatcctcagaccctactttgatgtggagcctgctcaggtgcgaagcaggctcctggagtccatgatccctatcaagatggtcaacttcccccagaaaattgcaggtgaactctatggacctctcatgctggtcttcactctggttgctatcctactccatgggatgaagacgtctgacactattatccgggagggcaccctgatgggcacagccattggcacctgcttcggctactggctgggagtctcatccttcatttacttccttgcctacctgtgcaacgcccagatcaccatgctgcagatgttggcactgctgggtatggctcttgggcattgcttgtctgtcatcactataaattcactcagcctcttaccttcgtggggggggtggccctggctgtacgtgggtcgacgggcccaaggggcttggactggggctaggtccggtctgtggcccagggaggcggcggggcctccggggatggggcgcccactgccaactgcaagagggggccgcgcn

SEQ ID NO: 418803 - DNA, 1712 bp, Homo sapiens
  misc_feature (26)..(26): n is a, c, g, or t
atgcaggctggtacggccgagtgtangatccgggcttctcctttttgtgttccggccgatcccacctctcctcgaccctggacgtctaccttccggaggcccacatcttgcccactccgcgcgcggggctagcgcgggtttcagcgacgggagccctcaagggacatggcaactacagcggcgccggcgggcggcgcccgaaatggagctggcccggaatggggagggttcgaagaaaacatccagggcggaggctcagctgtgattgacatggagaacatggatgatacctcaggctctagcttcgaggatatgggtgagctgcatcagcgcctgcgcgaggaagaagtagacgctgatgcagctgatgcagctgctgctgaagaggaggatggagagttcctgggcatgaagggctttaagggacagctgagccggcaggtggcagatcagatgtggcaggctgggaaaagacaagcctccagggccttcagcttgtacgccaacatcgacatcctcagaccctactttgatgtggagcctgctcaggtgcgaagcaggctcctggagtccatgatccctatcaagatggtcaacttcccccagaaaattgcaggtgaactctatggacctctcatgctggtcttcactctggttgctatcctactccatgggatgaagacgtctgacactattatccgtaagcaggacagacaactttgggggggtggctgcactaggttgaaagctgcctgaggatacaatggtggagtgagacaggaacagcccctgcggaaggccctaggtgaggctgagatcagaggcctcctaggactaaatagagccttcaccccacagcgggagggcaccctgatgggcacagccattggcacctgcttcggctactggctgggagtctcatccttcatttacttccttgcctacctgtgcaacgcccagatcaccatgctgcagatgttggcactgctgggctatggcctctttgggcattgcattgtcctgttcatcacctataatatccacctccacgccctcttctacctcttctggctgttggtgggtggactgtccacactgcgcatggtagcagtgttggtgtctcggaccgtgggccccacacagcggctgctcctctgtggcaccctggctgccctacacatgctcttcctgctctatctgcattttgcctaccacaaagtggtagaggggatcctggacacactggagggccccaacatcccgcccatccagagggtccccagagacatccctgccatgctccctgctgctcggcttcccaccaccgtcctcaacgccacagccaaagctgttgcggtgaccctgcagtcacactgaccccacctgaaattcttggccagtcctctttcccgcagctgcagagaggaggaagactattaaaggacagtcctgatgacatgtttcgtagatggggtttgcagctgccactgagctgtagctgcgtaagtacctccttgatgcctgtcggcacttctgaaaggcacaaggccaagaactcctggccaggactgcaaggctctgcagccaatgcagaaaatgggtcagctcctttgagaacccctccccacctaccccttccttcctctttatctctcccacattgtcttgctaaatatagacttggtaattaaaatgttgattgaagtctggaa

SEQ ID NO: 418804 - DNA, 1454 bp, Homo sapiens
  misc_feature (26)..(26): n is a, c, g, or t
atgcaggctggtacggccgagtgtangatccgggcttctcctttttgtgttccggccgatcccacctctcctcgaccctggacgtctaccttccggaggcccacatcttgcccactccgcgcgcggggctagcgcgggtttcagcgacgggagccctcaagggacatggcaactacagcggcgccggcgggcggcgcccgaaatggagctggcccggaatggggagggttcgaagaaaacatccagggcggaggctcagctgtgattgacatggagaacatggatgatacctcaggctctagcttcgaggatatgggtgagctgcatcagcgcctgcgcgaggaagaagtagacgctgatgcagctgatgcagctgctgctgaagaggaggatggagagttcctgggcatgaagggctttaagggacagctgagccggcaggtggcagatcagatgtggcaggctgggaaaagacaagcctccagggccttcagcttgtacgccaacatcgacatcctcagaccctactttgatgtggagcctgctcaggtgcgaagcaggctcctggagtccatgatccctatcaagatggtcaacttcccccagaaaattgcaggtgaactctatggacctctcatgctggtcttcactctggttgctatcctactccatgggatgaagacgtctgacactattatccagatcaccatgctgcagatgttggcactgctgggctatggcctctttgggcattgcattgtcctgttcatcacctataatatccacctccacgccctcttctacctcttctggctgttggtgggtggactgtccacactgcgcatggtagcagtgttggtgtctcggaccgtgggccccacacagcggctgctcctctgtggcaccctggctgccctacacatgctcttcctgctctatctgcattttgcctaccacaaagtggtagaggggatcctggacacactggagggccccaacatcccgcccatccagagggtccccagagacatccctgccatgctccctgctgctcggcttcccaccaccgtcctcaacgccacagccaaagctgttgcggtgaccctgcagtcacactgaccccacctgaaattcttggccagtcctctttcccgcagctgcagagaggaggaagactattaaaggacagtcctgatgacatgtttcgtagatggggtttgcagctgccactgagctgtagctgcgtaagtacctccttgatgcctgtcggcacttctgaaaggcacaaggccaagaactcctggccaggactgcaaggctctgcagccaatgcagaaaatgggtcagctcctttgagaacccctccccacctaccccttccttcctctttatctctcccacattgtcttgctaaatatagacttggtaattaaaatgttgattgaagtctggaa

SEQ ID NO: 418805 - DNA, 1906 bp, Homo sapiens
  misc_feature (26)..(26): n is a, c, g, or t
atgcaggctggtacggccgagtgtangatccgggcttctcctttttgtgttccggccgatcccacctctcctcgaccctggacgtctaccttccggaggcccacatcttgcccactccgcgcgcggggctagcgcgggtttcagcgacgggagccctcaagggacatggcaactacagcggcgccggcgggcggcgcccgaaatggagctggcccggaatggggagggttcgaagaaaacatccagggcggaggctcagctgtgattgacatggagaacatggatgatacctcaggctctagcttcgaggatatgggtgagctgcatcagcgcctgcgcgaggaagaagtagacgctgatgcagctgatgcagctgctgctgaagaggaggatggagagttcctgggcatgaagggctttaagggacagctgagccggcaggtggcagatcagatgtggcaggctgggaaaagacaagcctccagggccttcagcttgtacgccaacatcgacatcctcagaccctactttgatgtggagcctgctcaggtgcgaagcaggctcctggagtccatgatccctatcaagatggtcaacttcccccagaaaattgcaggtgaactctatggacctctcatgctggtcttcactctggttgctatcctactccatgggatgaagacgtctgacactattatccgtaagcaggacagacaactttgggggggtggctgcactaggttgaaagctgcctgaggatacaatggtggagtgagacaggaacagcccctgcggaaggccctaggtgaggctgagatcagaggcctcctaggactaaatagagccttcaccccacagcgggagggcaccctgatgggcacagccattggcacctgcttcggctactggctgggagtctcatccttcatttacttccttgcctacctgtgcaacgcccagatcaccatgctgcagatgttggcactgctggtaaggagccaggtgtggtgggcaagagtgatgttaaaaagagtagccaggccttggtcggcatctgtcctggggccccaaagcctggaatgggaggagtaggccaatggaccatgtgtttcccagggtccccatgaggggccagaaagcagcccaacctgaatgattttcctctccaccatcctccttcccagggctatggcctctttgggcattgcattgtcctgttcatcacctataatatccacctccacgccctcttctacctcttctggctgttggtgggtggactgtccacactgcgcatggtagcagtgttggtgtctcggaccgtgggccccacacagcggctgctcctctgtggcaccctggctgccctacacatgctcttcctgctctatctgcattttgcctaccacaaagtggtagaggggatcctggacacactggagggccccaacatcccgcccatccagagggtccccagagacatccctgccatgctccctgctgctcggcttcccaccaccgtcctcaacgccacagccaaagctgttgcggtgaccctgcagtcacactgaccccacctgaaattcttggccagtcctctttcccgcagctgcagagaggaggaagactattaaaggacagtcctgatgacatgtttcgtagatggggtttgcagctgccactgagctgtagctgcgtaagtacctccttgatgcctgtcggcacttctgaaaggcacaaggccaagaactcctggccaggactgcaaggctctgcagccaatgcagaaaatgggtcagctcctttgagaacccctccccacctaccccttccttcctctttatctctcccacattgtcttgctaaatatagacttggtaattaaaatgttgattgaagtctggaa

SEQ ID NO: 418806 - DNA, 1782 bp, Homo sapiens
  misc_feature (26)..(26): n is a, c, g, or t
atgcaggctggtacggccgagtgtangatccgggcttctcctttttgtgttccggccgatcccacctctcctcgaccctggacgtctaccttccggaggcccacatcttgcccactccgcgcgcggggctagcgcgggtttcagcgacgggagccctcaagggacatggcaactacagcggcgccggcgggcggcgcccgaaatggagctggcccggaatggggagggttcgaagaaaacatccagtggaagaacaaagccctaaaccctgggatgagcagaggacttaatggatggaacagaaaagtcctgcactctaggagccattgtcttcacagggcggaggctcagctgtgattgacatggagaacatggatgatacctcaggctctagcttcgaggatatgggtgagctgcatcagcgcctgcgcgaggaagaagtagacgctgatgcagctgatgcagctgctgctgaagaggaggatggagagttcctgggcatgaagggctttaagggacagctgagccggcaggtggcagatcagatgtggcaggctgggaaaagacaagcctccagggccttcagcttgtacgccaacatcgacatcctcagaccctactttgatgtggagcctgctcaggtgcgaagcaggctcctggagtccatgatccctatcaagatggtcaacttcccccaggtgaatagagggtggccatgtctggagagccgggggaagcaccagggcagagggtgggaccaccaggcaaatcctgggaagccataaacagatgagctgttgtaccctccagcctgaatgaattggtatattgacagaaaattgcaggtgaactctatggacctctcatgctggtcttcactctggttgctatcctactccatgggatgaagacgtctgacactattatccgggagggcaccctgatgggcacagccattggcacctgcttcggctactggctgggagtctcatccttcatttacttccttgcctacctgtgcaacgcccagatcaccatgctgcagatgttggcactgctgggctatggcctctttgggcattgcattgtcctgttcatcacctataatatccacctccacgccctcttctacctcttctggctgttggtgggtggactgtccacactgcgcatggtagcagtgttggtgtctcggaccgtgggccccacacagcggctgctcctctgtggcaccctggctgccctacacatgctcttcctgctctatctgcattttgcctaccacaaagtggtagaggggatcctggacacactggagggccccaacatcccgcccatccagagggtccccagagacatccctgccatgctccctgctgctcggcttcccaccaccgtcctcaacgccacagccaaagctgttgcggtgaccctgcagtcacactgaccccacctgaaattcttggccagtcctctttcccgcagctgcagagaggaggaagactattaaaggacagtcctgatgacatgtttcgtagatggggtttgcagctgccactgagctgtagctgcgtaagtacctccttgatgcctgtcggcacttctgaaaggcacaaggccaagaactcctggccaggactgcaaggctctgcagccaatgcagaaaatgggtcagctcctttgagaacccctccccacctaccccttccttcctctttatctctcccacattgtcttgctaaatatagacttggtaattaaaatgttgattgaagtctggaa

SEQ ID NO: 418807 - DNA, 992 bp, Homo sapiens
  misc_feature (26)..(26): n is a, c, g, or t
  misc_feature (900)..(900): n is a, c, g, or t
  misc_feature (908)..(908): n is a, c, g, or t
atgcaggctggtacggccgagtgtangatccgggcttctcctttttgtgttccggccgatcccacctctcctcgaccctggacgtctaccttccggaggcccacatcttgcccactccgcgcgcggggctagcgcgggtttcagcgacgggagccctcaagggacatggcaactacagcggcgccggcgggcggcgcccgaaatggagctggcccggaatggggagggttcgaagaaaacatccaggctctagcttcgaggatatgggtgagctgcatcagcgcctgcgcgaggaagaagtagacgctgatgcagctgatgcagctgctgctgaagaggaggatggagagttcctgggcatgaagggctttaagggacagctgagccggcaggtggcagatcagatgtggcaggctgggaaaagacaagcctccagggccttcagcttgtacgccaacatcgacatcctcagaccctactttgatgtggagcctgctcaggtgcgaagcaggctcctggagtccatgatccctatcaagatggtcaacttcccccagaaaattgcaggtgaactctatggacctctcatgctggtcttcactctggttgctatcctactccatgggatgaagacgtctgacactattatccgggagggcaccctgatgggcacagccattggcacctgcttcggctactggctgggagtctcatccttcatttacttccttgcctacctgtgcaacgcccagatcaccatgctgcagatgttggcactgctgggctatggcctctttgggcattgcattgtcctgttcatcacctataatatccacctccacgccctcttctacctcttctggctgttggtgggtggactgtccacactgcgcatgtccntgggtccngccgggcccccggggtcctttggccggggcctccggctcgcgcctcgttggcccggggggccggtggggcccccaggcaacccc

SEQ ID NO: 418808 - DNA, 1553 bp, Homo sapiens
  misc_feature (26)..(26): n is a, c, g, or t
atgcaggctggtacggccgagtgtangatccgggcttctcctttttgtgttccggccgatcccacctctcctcgaccctggacgtctaccttccggaggcccacatcttgcccactccgcgcgcggggctagcgcgggtttcagcgacgggagccctcaagggacatggcaactacagcggcgccggcgggcggcgcccgaaatggagctggcccggaatggggagggttcgaagaaaacatccagggcggaggctcagctgtgattgacatggagaacatggatgatacctcaggctctagcttcgaggatatgggtgagctgcatcagcgcctgcgcgaggaagaagtagacgctgatgcagctgatgcagctgctgctgaagaggaggatggagagttcctgggcatgaagggctttaagggacagctgagccggcaggtggcagatcagatgtggcaggctgggaaaagacaagcctccagggccttcagcttgtacgccaacatcgacatcctcagaccctactttgatgtggagcctgctcaggtgcgaagcaggctcctggagtccatgatccctatcaagatggtcaacttcccccagaaaattgcaggtgaactctatggacctctcatgctggtcttcactctggttgctatcctactccatgggatgaagacgtctgacactattatccgggagggcaccctgatgggcacagccattggcacctgcttcggctactggctgggagtctcatccttcatttacttccttgcctacctgtgcaacgcccagatcaccatgctgcagatgttggcactgctgggctatggcctctttgggcattgcattgtcctgttcatcacctataatatccacctccacgccctcttctacctcttctggctgttggtgggtggactgtccacactgcgcatggtagcagtgttggtgtctcggaccgtgggccccacacagcggctgctcctctgtggcaccctggctgccctacacatgctcttcctgctctatctgcattttgcctaccacaaagtggtagaggggatcctggacacactggagggccccaacatcccgcccatccagagggtccccagagacatccctgccatgctccctgctgctcggcttcccaccaccgtcctcaacgccacagccaaagctgttgcggtgaccctgcagtcacactgaccccacctgaaattcttggccagtcctctttcccgcagctgcagagaggaggaagactattaaaggacagtcctgatgacatgtttcgtagatggggtttgcagctgccactgagctgtagctgcgtaagtacctccttgatgcctgtcggcacttctgaaaggcacaaggccaagaactcctggccaggactgcaaggctctgcagccaatgcagaaaatgggtcagctcctttgagaacccctccccacctaccccttccttcctctttatctctcccacattgtcttgctaaatatagacttggtaattaaaatgttgattgaagtctggaa

SEQ ID NO: 418809 - DNA, 1530 bp, Homo sapiens
  misc_feature (26)..(26): n is a, c, g, or t
  misc_feature (1502)..(1502): n is a, c, g, or t
atgcaggctggtacggccgagtgtangatccgggcttctcctttttgtgttccggccgatcccacctctcctcgaccctggacgtctaccttccggaggcccacatcttgcccactccgcgcgcggggctagcgcgggtttcagcgacgggagccctcaagggacatggcaactacagcggcgccggcgggcggcgcccgaaatggagctggcccggaatggggagggttcgaagaaaacatccagggcggaggctcagctgtgattgacatggagaacatggatgatacctcaggctctagcttcgaggatatgggtgagctgcatcagcgcctgcgcgaggaagaagtagacgctgatgcagctgatgcagctgctgctgaagaggaggatggagagttcctgggcatgaagggctttaagggacagctgagccggcaggtggcagatcagatgtggcaggctgggaaaagacaagcctccagggccttcagcttgtacgccaacatcgacatcctcagaccctactttgatgtggagcctgctcaggtgcgaagcaggctcctggagtccatgatccctatcaagatggtcaacttcccccagaaaattgcaggtgaactctatggacctctcatgctggtcttcactctggttgctatcctactccatgggatgaagacgtctgacactattatccgggagggcaccctgatgggcacagccattggcacctgcttcggctactggctgggagtctcatccttcatttacttccttgcctacctgtgcaacgcccagatcaccatgctgcagatgttggcactgctgggctatggcctctttgggcattgcattgtcctgttcatcacctataatatccacctccacgccctcttctacctcttctggctgttggtgggtggactgtccacactgcgcatggtagcagtgttggtgtctcggaccgtgggccccacacagcggctgctcctctgtggcaccctggctgccctacacatgctcttcctgctctatctgcattttgcctaccacaaagtggtagaggggatcctggacacactggagggccccaacatcccgcccatccagagggtccccagagacatccctgccatgctccctgctgctcggcttcccaccaccgtcctcaacgccacagccaaagctgttgcggtgaccctgcagtcacactgaccccacctgaaattcttggccagtcctctttcccgcagctgcagagaggaggaagactattaaaggacagtcctgatgacatgtttcgtagatggggtttgcagctgccactgagctgtagctgcgtaagtacctccttgatgcctgtcggcacttctgaaaggcacaaggccaagaactgtgggcgcgaggaggggagagggggggcgagcgcgaatggcgaggagagagaggggggggggggggggggggggggggggggggggggggggcggggggggggngggggggggggggggggaaggggagggg

SEQ ID NO: 418810 - DNA, 1550 bp, Homo sapiens
  misc_feature (26)..(26): n is a, c, g, or t
  misc_feature (1550)..(1550): n is a, c, g, or t
atgcaggctggtacggccgagtgtangatccgggcttctcctttttgtgttccggccgatcccacctctcctcgaccctggacgtctaccttccggaggcccacatcttgcccactccgcgcgcggggctagcgcgggtttcagcgacgggagccctcaagggacatggcaactacagcggcgccggcgggcggcgcccgaaatggagctggcccggaatggggagggttcgaagaaaacatccagggcggaggctcagctgtgattgacatggagaacatggatgatacctcaggctctagcttcgaggatatgggtgagctgcatcagcgcctgcgcgaggaagaagtagacgctgatgcagctgatgcagctgctgctgaagaggaggatggagagttcctgggcatgaagggctttaagggacagctgagccggcaggtggcagatcagatgtggcaggctgggaaaagacaagcctccagggccttcagcttgtacgccaacatcgacatcctcagaccctactttgatgtggagcctgctcaggtgcgaagcaggctcctggagtccatgatccctatcaagatggtcaacttcccccagaaaattgcaggtgaactctatggacctctcatgctggtcttcactctggttgctatcctactccatgggatgaagacgtctgacactattatccgggagggcaccctgatgggcacagccattggcacctgcttcggctactggctgggagtctcatccttcatttacttccttgcctacctgtgcaacgcccagatcaccatgctgcagatgttggcactgctgggctatggcctctttgggcattgcattgtcctgttcatcacctataatatccacctccacgccctcttctacctcttctggctgttggtgggtggactgtccacactgcgcatggtagcagtgttggtgtctcggaccgtgggccccacacagcggctgctcctctgtggcaccctggctgccctacacatgctcttcctgctctatctgcattttgcctaccacaaagtggtagaggggatcctggacacactggagggccccaacatcccgcccatccagagggtccccagagacatccctgccatgctccctgctgctcggcttcccaccaccgtcctcaacgccacagccaaagctgttgcggtgaccctgcagtcacactgaccccacctgaaattcttggccagtcctctttcccgcagctgcagagaggaggaagactattaaaggacagtcctgatgacatgtttcgtagatggggtttgcagctgccactgagctgtagctgcgtaagtacctccttgatgcctgtcgggtgggcagccacttcgtgggcagcgctgcccacgaagtgcacctaattggaagcaccaccctagcaatatcaaccattaaccttccctctacacttatcatcttcacaattctaattctactgactatcctagaaatcgctgtcgccttaatccaagctacgttttcacatcgtgggcagn

SEQ ID NO: 418811 - DNA, 1747 bp, Homo sapiens
  misc_feature (26)..(26): n is a, c, g, or t
atgcaggctggtacggccgagtgtangatccgggcttctcctttttgtgttccggccgatcccacctctcctcgaccctggacgtctaccttccggaggcccacatcttgcccactccgcgcgcggggctagcgcgggtttcagcgacgggagccctcaagggacatggcaactacagcggcgccggcgggcggcgcccgaaatggagctggcccggaatggggagggttcgaagaaaacatccagggcggaggctcagctgtgattgacatggagaacatggatgatacctcaggctctagcttcgaggatatgggtgagctgcatcagcgcctgcgcgaggaagaagtagacgctgatgcagctgatgcagctgctgctgaagaggaggatggagagttcctgggcatgaagggctttaagggacagctgagccggcaggtggcagatcagatgtggcaggctgggaaaagacaagcctccagggccttcagcttgtacgccaacatcgacatcctcagaccctactttgatgtggagcctgctcaggtgcgaagcaggctcctggagtccatgatccctatcaagatggtcaacttcccccagaaaattgcaggtgaactctatggacctctcatgctggtcttcactctggttgctatcctactccatgggatgaagacgtctgacactattatccgggagggcaccctgatgggcacagccattggcacctgcttcggctactggctgggagtctcatccttcatttacttccttgcctacctgtgcaacgcccagatcaccatgctgcagatgttggcactgctggtaaggagccaggtgtggtgggcaagagtgatgttaaaaagagtagccaggccttggtcggcatctgtcctggggccccaaagcctggaatgggaggagtaggccaatggaccatgtgtttcccagggtccccatgaggggccagaaagcagcccaacctgaatgattttcctctccaccatcctccttcccagggctatggcctctttgggcattgcattgtcctgttcatcacctataatatccacctccacgccctcttctacctcttctggctgttggtgggtggactgtccacactgcgcatggtagcagtgttggtgtctcggaccgtgggccccacacagcggctgctcctctgtggcaccctggctgccctacacatgctcttcctgctctatctgcattttgcctaccacaaagtggtagaggggatcctggacacactggagggccccaacatcccgcccatccagagggtccccagagacatccctgccatgctccctgctgctcggcttcccaccaccgtcctcaacgccacagccaaagctgttgcggtgaccctgcagtcacactgaccccacctgaaattcttggccagtcctctttcccgcagctgcagagaggaggaagactattaaaggacagtcctgatgacatgtttcgtagatggggtttgcagctgccactgagctgtagctgcgtaagtacctccttgatgcctgtcggcacttctgaaaggcacaaggccaagaactcctggccaggactgcaaggctctgcagccaatgcagaaaatgggtcagctcctttgagaacccctccccacctaccccttccttcctctttatctctcccacattgtcttgctaaatatagacttggtaattaaaatgttgattgaagtctggaa

SEQ ID NO: 418812 - DNA, 1360 bp, Homo sapiens
  misc_feature (26)..(26): n is a, c, g, or t
atgcaggctggtacggccgagtgtangatggggagggtcgaagaaaacatccaggcggaggctcagctgtgattgacatggagaacatggatgatacctcaggctctagcttcgaggatatgggtgagctgcatcagcgcctgcgcgaggaagaagtagacgctgatgcagctgatgcagctgctgctgaagaggaggatggagagttcctgggcatgaagggctttaagggacagctgagccggcaggtggcagatcagatgtggcaggctgggaaaagacaagcctccagggccttcagcttgtacgccaacatcgacatcctcagaccctactttgatgtggagcctgctcaggtgcgaagcaggctcctggagtccatgatccctatcaagatggtcaacttcccccagaaaattgcaggtgaactctatggacctctcatgctggtcttcactctggttgctatcctactccatgggatgaagacgtctgacactattatccgggagggcaccctgatgggcacagccattggcacctgcttcggctactggctgggagtctcatccttcatttacttccttgcctacctgtgcaacgcccagatcaccatgctgcagatgttggcactgctgggctatggcctctttgggcattgcattgtcctgttcatcacctataatatccacctccacgccctcttctacctcttctggctgttggtgggtggactgtccacactgcgcatggtagcagtgttggtgtctcggaccgtgggccccacacagcggctgctcctctgtggcaccctggctgccctacacatgctcttcctgctctatctgcattttgcctaccacaaagtggtagaggggatcctggacacactggagggccccaacatcccgcccatccagagggtccccagagacatccctgccatgctccctgctgctcggcttcccaccaccgtcctcaacgccacagccaaagctgttgcggtgaccctgcagtcacactgaccccacctgaaattcttggccagtcctctttcccgcagctgcagagaggaggaagactattaaaggacagtcctgatgacatgtttcgtagatggggtttgcagctgccactgagctgtagctgcgtaagtacctccttgatgcctgtcggcacttctgaaaggcacaaggccaagaactcctggccaggactgcaaggctctgcagccaatgcagaaaatgggtcagctcctttgagaacccctccccacctaccccttccttcctctttatctctcccacattgtcttgctaaatatagacttggtaattaaaatgttgattgaagtctggaa

SEQ ID NO: 418813 - DNA, 1504 bp, Homo sapiens
  misc_feature (26)..(26): n is a, c, g, or t
atgcaggctggtacggccgagtgtangatccgggcttctcctttttgtgttccggccgatcccacctctcctcgaccctggacgtctaccttccggaggcccacatcttgcccactccgcgcgcggggctagcgcgggtttcagcgacgggagccctcaagggacatggcaactacagcggcgccggcgggcggcgcccgaaatggagctggcccggaatggggagggttcgaagaaaacatccaggctctagcttcgaggatatgggtgagctgcatcagcgcctgcgcgaggaagaagtagacgctgatgcagctgatgcagctgctgctgaagaggaggatggagagttcctgggcatgaagggctttaagggacagctgagccggcaggtggcagatcagatgtggcaggctgggaaaagacaagcctccagggccttcagcttgtacgccaacatcgacatcctcagaccctactttgatgtggagcctgctcaggtgcgaagcaggctcctggagtccatgatccctatcaagatggtcaacttcccccagaaaattgcaggtgaactctatggacctctcatgctggtcttcactctggttgctatcctactccatgggatgaagacgtctgacactattatccgggagggcaccctgatgggcacagccattggcacctgcttcggctactggctgggagtctcatccttcatttacttccttgcctacctgtgcaacgcccagatcaccatgctgcagatgttggcactgctgggctatggcctctttgggcattgcattgtcctgttcatcacctataatatccacctccacgccctcttctacctcttctggctgttggtgggtggactgtccacactgcgcatggtagcagtgttggtgtctcggaccgtgggccccacacagcggctgctcctctgtggcaccctggctgccctacacatgctcttcctgctctatctgcattttgcctaccacaaagtggtagaggggatcctggacacactggagggccccaacatcccgcccatccagagggtccccagagacatccctgccatgctccctgctgctcggcttcccaccaccgtcctcaacgccacagccaaagctgttgcggtgaccctgcagtcacactgaccccacctgaaattcttggccagtcctctttcccgcagctgcagagaggaggaagactattaaaggacagtcctgatgacatgtttcgtagatggggtttgcagctgccactgagctgtagctgcgtaagtacctccttgatgcctgtcggcacttctgaaaggcacaaggccaagaactcctggccaggactgcaaggctctgcagccaatgcagaaaatgggtcagctcctttgagaacccctccccacctaccccttccttcctctttatctctcccacattgtcttgctaaatatagacttggtaattaaaatgttgattgaagtctggaa

SEQ ID NO: 418814 - DNA, 1081 bp, Homo sapiens
gttagagatgaataaaattcaggccttgccctccagaacctcatggccttgtgctgcctttgctttaatctctcctctcctctcccaggctcctggagtccatgatccctatcaagatggtcaacttcccccagaaaattgcaggtgaactctatggacctctcatgctggtcttcactctggttgctatcctactccatgggatgaagacgtctgacactattatccgggagggcaccctgatgggcacagccattggcacctgcttcggctactggctgggagtctcatccttcatttacttccttgcctacctgtgcaacgcccagatcaccatgctgcagatgttggcactgctgggctatggcctctttgggcattgcattgtcctgttcatcacctataatatccacctccacgccctcttctacctcttctggctgttggtgggtggactgtccacactgcgcatggtagcagtgttggtgtctcggaccgtgggccccacacagcggctgctcctctgtggcaccctggctgccctacacatgctcttcctgctctatctgcattttgcctaccacaaagtggtagaggggatcctggacacactggagggccccaacatcccgcccatccagagggtccccagagacatccctgccatgctccctgctgctcggcttcccaccaccgtcctcaacgccacagccaaagctgttgcggtgaccctgcagtcacactgaccccacctgaaattcttggccagtcctctttcccgcagctgcagagaggaggaagactattaaaggacagtcctgatgacatgtttcgtagatggggtttgcagctgccactgagctgtagctgcgtaagtacctccttgatgcctgtcggcacttctgaaaggcacaaggccaagaactcctggccaggactgcaaggctctgcagccaatgcagaaaatgggtcagctcctttgagaacccctccccacctaccccttccttcctctttatctctcccacattgtcttgctaaatatagacttggtaattaaaatgttgattgaagtctggaa

SEQ ID NO: 418815 - DNA, 1693 bp, Homo sapiens
cccccgtccacgtccccagcttccggaagttgcttttgtccaaacatccgggcttctcctttttgtgttccggccgatcccacctctcctcgaccctggacgtctaccttccggaggcccacatcttgcccactccgcgcgcggggctagcgcgggtttcagcgacgggagccctcaagggacatggcaactacagcggcgccggcgggcggcgcccgaaatggagctggcccggaatggggagggttcgaagaaaacatccagtggaagaacaaagccctaaaccctgggatgagcagaggacttaatggatggaacagaaaagtcctgcactctaggagccattgtcttcacagggcggaggctcagctgtgattgacatggagaacatggatgatacctcaggctctagcttcgaggatatgggtgagctgcatcagcgcctgcgcgaggaagaagtagacgctgatgcagctgatgcagctgctgctgaagaggaggatggagagttcctgggcatgaagggctttaagggacagctgagccggcaggtggcagatcaggctcctggagtccatgatccctatcaagatggtcaacttcccccaggtgaatagagggtggccatgtctggagagccgggggaagcaccagggcagagggtgggaccaccaggcaaatcctgggaagccataaacagatgagctgttgtaccctccagcctgaatgaattggtatattgacagaaaattgcaggtgaactctatggacctctcatgctggtcttcactctggttgctatcctactccatgggatgaagacgtctgacactattatccgggagggcaccctgatgggcacagccattggcacctgcttcggctactggctgggagtctcatccttcatttacttccttgcctacctgtgcaacgcccagatcaccatgctgcagatgttggcactgctgggctatggcctctttgggcattgcattgtcctgttcatcacctataatatccacctccacgccctcttctacctcttctggctgttggtgggtggactgtccacactgcgcatggtagcagtgttggtgtctcggaccgtgggccccacacagcggctgctcctctgtggcaccctggctgccctacacatgctcttcctgctctatctgcattttgcctaccacaaagtggtagaggggatcctggacacactggagggccccaacatcccgcccatccagagggtccccagagacatccctgccatgctccctgctgctcggcttcccaccaccgtcctcaacgccacagccaaagctgttgcggtgaccctgcagtcacactgaccccacctgaaattcttggccagtcctctttcccgcagctgcagagaggaggaagactattaaaggacagtcctgatgacatgtttcgtagatggggtttgcagctgccactgagctgtagctgcgtaagtacctccttgatgcctgtcggcacttctgaaaggcacaaggccaagaactcctggccaggactgcaaggctctgcagccaatgcagaaaatgggtcagctcctttgagaacccctccccacctaccccttccttcctctttatctctcccacattgtcttgctaaatatagacttggtaattaaaatgttgattgaagtctggaa

SEQ ID NO: 418816 - DNA, 1849 bp, Homo sapiens
  misc_feature (26)..(26): n is a, c, g, or t
atgcaggctggtacggccgagtgtangatccgggcttctcctttttgtgttccggccgatcccacctctcctcgaccctggacgtctaccttccggaggcccacatcttgcccactccgcgcgcggggctagcgcgggtttcagcgacgggagccctcaagggacatggcaactacagcggcgccggcgggcggcgcccgaaatggagctggcccggaatggggagggttcgaagaaaacatccagggcggaggctcagctgtgattgacatggagaacatggatgatacctcaggctctagcttcgaggatatgggtgagctgcatcagcgcctgcgcgaggaagaagtagacgctgatgcagctgatgcagctgctgctgaagaggaggatggagagttcctgggcatgaagggctttaagggacagctgagccggcaggtggcagatcagatgtggcaggctgggaaaagacaagcctccagggccttcagcttgtacgccaacatcgacatcctcagaccctactttgatgtggagcctgctcaggtgcgaagcaggctcctggagtccatgatccctatcaagatggtcaacttcccccaggtgaatagagggtggccatgtctggagagccgggggaagcaccagggcagagggtgggaccaccaggcaaatcctgggaagccataaacagatgagctgttgtaccctccagcctgaatgaattggtatattgacagaaaattgcaggtgaactctatggacctctcatgctggtcttcactctggttgctatcctactccatgggatgaagacgtctgacactattatccgtaagcaggacagacaactttgggggggtggctgcactaggttgaaagctgcctgaggatacaatggtggagtgagacaggaacagcccctgcggaaggccctaggtgaggctgagatcagaggcctcctaggactaaatagagccttcaccccacagcgggagggcaccctgatgggcacagccattggcacctgcttcggctactggctgggagtctcatccttcatttacttccttgcctacctgtgcaacgcccagatcaccatgctgcagatgttggcactgctgggctatggcctctttgggcattgcattgtcctgttcatcacctataatatccacctccacgccctcttctacctcttctggctgttggtgggtggactgtccacactgcgcatggtagcagtgttggtgtctcggaccgtgggccccacacagcggctgctcctctgtggcaccctggctgccctacacatgctcttcctgctctatctgcattttgcctaccacaaagtggtagaggggatcctggacacactggagggccccaacatcccgcccatccagagggtccccagagacatccctgccatgctccctgctgctcggcttcccaccaccgtcctcaacgccacagccaaagctgttgcggtgaccctgcagtcacactgaccccacctgaaattcttggccagtcctctttcccgcagctgcagagaggaggaagactattaaaggacagtcctgatgacatgtttcgtagatggggtttgcagctgccactgagctgtagctgcgtaagtacctccttgatgcctgtcggcacttctgaaaggcacaaggccaagaactcctggccaggactgcaaggctctgcagccaatgcagaaaatgggtcagctcctttgagaacccctccccacctaccccttccttcctctttatctctcccacattgtcttgctaaatatagacttggtaattaaaatgttgattgaagtctggaa

SEQ ID NO: 418817 - DNA, 839 bp, Homo sapiens
  misc_feature (26)..(26): n is a, c, g, or t
atgcaggctggtacggccgagtgtangatccgggcttctcctttttgtgttccggccgatcccacctctcctcgaccctggacgtctaccttccggaggcccacatcttgcccactccgcgcgcggggctagcgcgggtttcagcgacgggagccctcaagggacatggcaactacagcggcgccggcgggcggcgcccgaaatggagctggcccggaatggggagggttcgaagaaaacatccagggcggaggctcagctgtgattgacatggagaacatggatgatacctcaggctctagcttcgaggatatgggtgactgctgctgaagaggaggatggagagttcctgggcatgaagggctttaagggacagctgagccggcaggtggcagatcagatgtggcaggctgggaaaagacaagcctccagggccttcagcttgtacgccaacatcgacatcctcagaccctactttgatgtggagcctgctcaggtgcgaagcaggtgaggagccttctcttgaagaagcttccctcctaacacctagaccttcatgcacactacagtcagatttcaagccctgggctctgatgggctccccgtcttcatgaccccatcacctctcatcactgcacctgtcactgaaacaagtaataatagcacaccatcttcctcttcttttccatctaactgactactcatcttccctcaaaacctacctcagatgtcacttcctctgttccacattcctcaatcccatccccagtttgttctctcctggtgttcctatagaactctgtgcttgccagccgggcatggtggctcacgcctggaat

SEQ ID NO: 418818 - DNA, 2269 bp, Homo sapiens
aagaggactagaggctggagagtaaaaagaactgggggtaagagcccctctgcctagcactgctcccccaaggctcccagaaatctcaggtcagaggcacggacagcctctggagctctcgtctggtgggaccatgaactgccagcagctgtggctgggcttcctactccccatgacagtctcaggccgggtcctggggcttgcagaggtggcgcccgtggactacctgtcacaatatgggtacctacagaagcctctagaaggatctaataacttcaagccagaagatatcaccgaggctctgagagcttttcaggaagcatctgaacttccagtctcaggtcagctggatgatgccacaagggcccgcatgaggcagcctcgttgtggcctagaggatcccttcaaccagaagacccttaaatacctgttgctgggccgctggagaaagaagcacctgactttccgcatcttgaacctgccctccacccttccaccccacacagcccgggcagccctgcgtcaagccttccaggactggagcaatgtggctcccttgaccttccaagaggtgcaggctggtgcggctgacatccgcctctccttccatggccgccaaagctcgtactgttccaatacttttgatgggcctgggagagtcctggcccatgccgacatcccagagctgggcagtgtgcacttcgacgaagacgagttctggactgaggggacctaccgtggggtgaacctgcgcatcattgcagcccatgaagtgggccatgctctggggcttgggcactcccgatattcccaggccctcatggccccagtctacgagggctaccggccccactttaagctgcacccagatgatgtggcagggatccaggctctctatggcaagaagagtccagtgataagggatgaggaagaagaagagacagagctgcccactgtgcccccagtgcccacagaacccagtcccatgccagacccttgcagtagtgaactggatgccatgatgctggggccccgtgggaagacctatgctttcaagggggactatgtgtggactgtatcagattcaggaccgggccccttgttccgagtgtctgccctttgggaggggctccccggaaacctggatgctgctgtctactcgcctcgaacacaatggattcacttctttaagggagacaaggtgtggcgctacattaatttcaagatgtctcctggcttccccaagaagctgaatagggtagaacctaacctggatgcagctctctattggcctctcaaccaaaaggtgttcctctttaagggctccgggtactggcagtgggacgagctagcccgaactgacttcagcagctaccccaaaccaatcaagggtttgtttacgggagtgccaaaccagccctcggctgctatgagttggcaagatggccgagtctacttcttcaagggcaaagtctactggcgcctcaaccagcagcttcgagtagagaaaggctatcccagaaatatttcccacaactggatgcactgtcgtccccggactatagacactaccccatcaggtgggaataccactccctcaggtacgggcataaccttggataccactctctcagccacagaaaccacgtttgaatactgactgctcacccacagacacaatcttggacattaacccctgaggctccaccacccaccctttcatttcccccccagaagcctaaggcctaatagctgaatgaaatacctgtctgctcagtagaaccttgcaggtgctgtagcaggcgcaagaccgtagatctcaggcctctaacacttccaactccagccaccactttcctgtgcattttcactcctgagaagtgctcccctaactcagatcccctaacttagatttggcccccaactccatttcctgtctgtcttagacagcccttccaactgtgtcatctcttctctggaggtcaatggtggagggagatgcctgggtcctgttcttcctacataaaatgcaagaaaacagcatggccagtaaactgagcaagggccttggaatccttgagaatcacatttatgtgcttatgattacgggcaagctaattaaccttgttgaatctcagattccccatttgcaacattaggttaagaccagtactgcaggattgttgcactaaatgaaatactgtatgtgaagtgcctggcacagtgtctggtacatttgtgtttaataaaagctaactccatgttcata

SEQ ID NO: 418819 - DNA, 3832 bp, Homo sapiens
ggcacgagtctttttctcccttaagttcccctgttcaaggcataccttagaggtatgggccagagaggactgggtcagagagcagggagtggctgggaaggtaagggacagtgatgggcattcctgagagaactgggtgatgacaggggaatctgaaaggggagaaagaagcatccaagagacagtgaacatagctgggggaattttaaaggtatgcattaattagagtttataataggcagggtgtgctctagcctagcgggctctgacctccttcctgttcacctttgcctttgtccagggagagtcctggcccatgccgacatcccagagctgggcagtgtgcacttcgacgaagacgagttctggactgaggggacctaccgtggggtgaacctgcgcatcattgcagcccatgaagtgggccatgctctggggcttgggcactcccgatattcccaggccctcatggccccagtctacgagggctaccggccccactttaagctgcacccagatgatgtggcagggatccaggctctctatggcaagaagagtccagtgataagggatgaggaagaagaagagacagagctgcccactgtgcccccagtgcccacagaacccagtcccatgccagacccttgcagtagtgaactggatgccatgatgctgggtgaggcccctcccctccaggtgatcctgaggcctggacaaatgggagtgacatgggacttcagcatgagcaatggaggttagaccccaggcattaatgaccatggaaggagacatgtgacatggggagggagagttcggagccaaattaaaggtggcttaggcaggcacttaccaaggctgccacgctctaagggccactagaacacatctggaaatgcagcaagatggagaaaactatattacccagattgcctgttagagagggtgcacctggttggaaggacaactaggaagccacttggaggggagggtgaggttcctaaggaggaatagctatctgcagggcttttgttttgttgagtggaccaaagctgaaacgctctgagcaacaaagcattctgagtcctctttgtctgcctttaattttctctttgaattaaagttgaatgaatttttgaagaatcagcctgcagggagagggcaaattgttagtcagcctgagatacccccaagtttctgtctacttgacctctgtctttttgacttgttgacacaccattacgctcagggccccgtgggaagacctatgctttcaagggggactatgtgtggactgtatcagattcaggaccgggccccttgttccgagtgtctgccctttgggaggggctccccggaaacctggatgctgctgtctactcgcctcgaacacaatggattcacttctttaagggtaaggaggctagttacagtgtcttacttgaggagggcctaatcttaaagaaactataaaagggagggagatgagaagtttctgaataggtggaccggaggagaccaaaagctatcacctgaggacagaggtgacttgttctttcctcacatgctctcaggagacaaggtgtggcgctacattaatttcaagatgtctcctggcttccccaagaagctgaatagggtagaacctaacctggatgcagctctctattggcctctcaaccaaaaggtgttcctctttaaggtataaagttcaaagcaagggcaaatcccttcttaggaggagtgggctaccttatactgagaagcaaagcttgcgcttgaagggagatgttctgcagctgcagtgggctgggggtggacccctgggggtcctaagctctctcctcttcctctcccctctccccacccatcccatatccagggctccgggtactggcagtgggacgagctagcccgaactgacttcagcagctaccccaaaccaatcaagggtttgtttacgggagtgccaaaccagccctcggctgctatgagttggcaagatggccgagtctacttcttcaagggcaaagtctactggcgcctcaaccagcagcttcgagtagagaaaggctatcccagaaatatttcccacaactggatgcactgtcgtccccggactatagacactaccccatcaggtgggaataccactccctcaggtacgggcataaccttggataccactctctcagccacagaaaccacgtttgaatactgactgctcacccacagacacaatcttggacattaacccctgaggctccaccacccaccctttcatttcccccccagaagcctaaggcctaatagctgaatgaaatacctgtctgctcagtagaaccttgcaggtgctgtagcaggcgcaagaccgtagatctcaggcctctaacacttccaactccagccaccactttcctgtgcattttcactcctgagaagtgctcccctaactcagatcccctaacttagatttggcccccaactccatttcctgtctgtcttagacagcccttccaactgtgtcatctcttctctggaggtcaatggtggagggagatgcctgggtcctgttcttcctacataaaatgcaagaaaacagcatggccagtaaactgagcaagggccttggaatccttgagaatcacatttatgtgcttatgattacgggcaagctaattaaccttgttgaatctcagattccccatttgcaacattaggttaagaccagtactgcaggattgttgcactaaatgaaatactgtatgtgaagtgcctggcacagtgtctggtacatttgtgtttaataaaagctaactccatgttcataagagaggactgaacagctcttcctctagctgtctggctgtataactcttacagtagtctgtataataagggcatctctattagatctttaggggacagaggatttgtcaagatggttagctctttgttttggggtgcagagaaagaaaagagcagcaacagcagaggctggactccctggttcagtatttaatgccattttattcacatgctcccatgttctccctccctcccattgtagccttgctgcccaggggagggatatgtcttcctttatgcatctgggaaaccaggaacagaccctgcgcaggagagtcagagggggaagagttagaatgggtcagtggctggaacaaagttctggttaaggaggaaattagtgccacccacggtgagaagcagagaaggcacttgcatcctatgcagccctgaagaccaggctcctttgggcaaaaggcaagactctggcaggtgggtcaatgctctctccttggagcaagaagccagcttttggggaaggcaggtcctgaggcaggcactgccctgtggtcttccccaggttgaggagagaagtggaagccccatggaagacagtgctcccagctgaggtaggaggcggaggtgggggtgggggtagtttaagcctatggggcccagggggaaaggccaaacagaaacccaactaccccctaatgaagggcctggaggttggggtatcttggagctcctcagagcccttcttcccatcaaaaaggtatcaaatgccttggaagctccctgatcctacaaaacaaaaaaatgcttatttttaccactgtgaggcaagctgaggtgaacatttaaaaggctatttcaagacgaggtgcggtggctataatcctagcactttgggaggctgaagcaggaggatcacttgagcccaggagttcaagaccagcttgggcaacatagggagaccctgtctctgcaaaaaaataaaaacgaatacataaaaattaaaaaaaaa

SEQ ID NO: 418820 - DNA, 2023 bp, Homo sapiens
ggcacgagtctttttctcccttaagttcccctgttcaaggcataccttagaggtatgggccagagaggactgggtcagagagcagggagtggctgggaaggtaagggacagtgatgggcattcctgagagaactgggtgatgacaggggaatctgaaaggggagaaagaagcatccaagagacagtgaacatagctgggggaattttaaaggtatgcattaattagagtttataataggcagggtgtgctctagcctagcgggctctgacctccttcctgttcacctttgcctttgtccagggagagtcctggcccatgccgacatcccagagctgggcagtgtgcacttcgacgaagacgagttctggactgaggggacctaccgtggggtgaacctgcgcatcattgcagcccatgaagtgggccatgctctggggcttgggcactcccgatattcccaggccctcatggccccagtctacgagggctaccggccccactttaagctgcacccagatgatgtggcagggatccaggctctctatggcaagaagagtccagtgataagggatgaggaagaagaagagacagagctgcccactgtgcccccagtgcccacagaacccagtcccatgccagacccttgcagtagtgaactggatgccatgatgctgggtgaggcccctcccctccaggctgttggcaggcggtgggggcagcctgctgatcctgaggcctggacaaatgggagtgacatgggacttcagcatgagcaatggagggccccgtgggaagacctatgctttcaagggggactatgtgtggactgtatcagattcaggaccgggccccttgttccgagtgtctgccctttgggaggggctccccggaaacctggatgctgctgtctactcgcctcgaacacaatggattcacttctttaagggagacaaggtgtggcgctacattaatttcaagatgtctcctggcttccccaagaagctgaatagggtagaacctaacctggatgcagctctctattggcctctcaaccaaaaggtgttcctctttaagggctccgggtactggcagtgggacgagctagcccgaactgacttcagcagctaccccaaaccaatcaagggtttgtttacgggagtgccaaaccagccctcggctgctatgagttggcaagatggccgagtctacttcttcaagggcaaagtctactggcgcctcaaccagcagcttcgagtagagaaaggctatcccagaaatatttcccacaactggatgcactgtcgtccccggactatagacactaccccatcaggtgggaataccactccctcaggtacgggcataaccttggataccactctctcagccacagaaaccacgtttgaatactgactgctcacccacagacacaatcttggacattaacccctgaggctccaccacccaccctttcatttcccccccagaagcctaaggcctaatagctgaatgaaatacctgtctgctcagtagaaccttgcaggtgctgtagcaggcgcaagaccgtagatctcaggcctctaacacttccaactccagccaccactttcctgtgcattttcactcctgagaagtgctcccctaactcagatcccctaacttagatttggcccccaactccatttcctgtctgtcttagacagcccttccaactgtgtcatctcttctctggaggtcaatggtggagggagatgcctgggtcctgttcttcctacataaaatgcaagaaaacagcatggccagtaaactgagcaagggccttggaatccttgagaatcacatttatgtgcttatgattacgggcaagctaattaaccttgttgaatctcagattccccatttgcaacattaggttaagaccagtactgcaggattgttgcactaaatgaaatactgtatgtgaagtgcctggcacagtgtctggtacatttgtgtttaataaaagctaactccatgttcata

SEQ ID NO: 418821 - DNA, 3003 bp, Homo sapiens
  misc_feature (2908)..(2908): n is a, c, g, or t
aagaggactagaggctggagagtaaaaagaactgggggtaagagcccctctgcctagcactgctcccccaaggctcccagaaatctcaggtcagaggcacggacagcctctggagctctcgtctggtgggaccatgaactgccagcagctgtggctgggcttcctactccccatgacagtctcaggccgggtcctggggcttgcagaggtggcgcccgtggactacctgtcacaatatgggtacctacagaagcctctagaaggatctaataacttcaagccagaagatatcaccgaggctctgagagcttttcaggaagcatctgaacttccagtctcaggtcagctggatgatgccacaagggcccgcatgaggcagcctcgttgtggcctagaggatcccttcaaccagaagacccttaaatacctgttgctgggccgctggagaaagaagcacctgactttccgcatcttgaacctgccctccacccttccaccccacacagcccgggcagccctgcgtcaagccttccaggactggagcaatgtggctcccttgaccttccaagaggtgcaggctggtgcggctgacatccgcctctccttccatggccgccaaagctcgtactgttccaatacttttgatgggcctgggagagtcctggcccatgccgacatcccagagctgggcagtgtgcacttcgacgaagacgagttctggactgaggggacctaccgtggggtgaacctgcgcatcattgcagcccatgaagtgggccatgctctggggcttgggcactcccgatattcccaggccctcatggccccagtctacgagggctaccggccccactttaagctgcacccagatgatgtggcagggatccaggctctctatggcaagaagagtccagtgataagggatgaggaagaagaagagacagagctgcccactgtgcccccagtgcccacagaacccagtcccatgccagacccttgcagtagtgaactggatgccatgatgctggggccccgtgggaagacctatgctttcaagggggactatgtgtggactgtatcagattcaggaccgggccccttgttccgagtgtctgccctttgggaggggctccccggaaacctggatgctgctgtctactcgcctcgaacacaatggattcacttctttaagggagacaaggtgtggcgctacattaatttcaagatgtctcctggcttccccaagaagctgaatagggtagaacctaacctggatgcagctctctattggcctctcaaccaaaaggtgttcctctttaagggctccgggtactggcagtgggacgagctagcccgaactgacttcagcagctaccccaaaccaatcaagggtttgtttacgggagtgccaaaccagccctcggctgctatgagttggcaagatggccgagtctacttcttcaagggcaaagtctactggcgcctcaaccagcagcttcgagtagagaaaggctatcccagaaatatttcccacaactggatgcactgtcgtccccggactatagacactaccccatcaggtgggaataccactccctcaggtacgggcataaccttggataccactctctcagccacagaaaccacgtttgaatactgactgctcacccacagacacaatcttggacattaacccctgaggctccaccacccaccctttcatttcccccccagaagcctaaggcctaatagctgaatgaaatacctgtctgctcagtagaaccttgcaggtgctgtagcaggcgcaagaccgtagatctcaggcctctaacacttccaactccagccaccactttcctgtgcattttcactcctgagaagtgctcccctaactcagatcccctaacttagatttggcccccaactccatttcctgtctgtcttagacagcccttccaactgtgtcatctcttctctggaggtcaatggtggagggagatgcctgggtcctgttcttcctacataaaatgcaagaaaacagcatggccagtaaactgagcaagggccttggaatccttgagaatcacatttatgtgcttatgattacgggcaagctaattaaccttgttgaatctcagattccccatttgcaacattaggttaagaccagtactgcaggattgttgcactaaatgaaatactgtatgtgaagtgcctggcacagtgtctggtacatttgtgtttaataaaagctaactccatgttcataagagaggactgaacagctcttcctctagctgtctggctgtataactcttacagtagtctgtataataagggcatctctattagatctttaggggacagaggatttgtcaagatggttagctctttgttttggggtgcagagaaagaaaagagcagcaacagcagaggctggactccctggttcagtatttaatgccattttattcacatgctcccatgttctccctccctcccattgtagccttgctgcccaggggagggatatgtcttcctttatgcatctgggaaaccaggaacagaccctgcgcaggagagtcagagggggaagagttagaatgggtcagtggctggaacaaagttctggttaaggaggaaattagtgccacccacggtgagaagcagagaaggcacttgcatcctatgcagccctgaagaccaggctcctttgggcaaaaggcaagactctggcaggtgggtcaatgctctctccttggagcaagaagccagcttttggggaaggcaggtcctgaggcaggcactgccctgtggtcttccccaggttgaggagagaagtggaagccccatggaagacagtgctcccagctgaggtaggaggcggaggtgggggtgggggcccccnggtacccccgggacaatagggagccggtataaggccggtggggtgtcaattttataaccactggaagtttttttttctcttgaactttatttaaa

SEQ ID NO: 418822 - DNA, 2755 bp, Homo sapiens
aagaggactagaggctggagagtaaaaagaactgggggtaagagcccctctgcctagcactgctcccccaaggctcccagaaatctcaggtcagaggcacggacagcctctggagctctcgtctggtgggaccatgaactgccagcagctgtggctgggcttcctactccccatgacagtctcaggccgggtcctggggcttgcagaggtggcgcccgtggactacctgtcacaatatgggtacctacagaagcctctagaaggatctaataacttcaagccagaagatatcaccgaggctctgagagcttttcaggaagcatctgaacttccagtctcaggtcagctggatgatgccacaagggcccgcatgaggcagcctcgttgtggcctagaggatcccttcaaccagaagacccttaaatacctgttgctgggccgctggagaaagaagcacctgactttccgcatcttgaacctgccctccacccttccaccccacacagcccgggcagccctgcgtcaagccttccaggactggagcaatgtggctcccttgaccttccaagaggtgcaggctggtgcggctgacatccgcctctccttccatggccgccaaagctcgtactgttccaatacttttgatgggcctgggagagtcctggcccatgccgacatcccagagctgggcagtgtgcacttcgacgaagacgagttctggactgaggggacctaccgtggggtgaacctgcgcatcattgcagcccatgaagtgggccatgctctggggcttgggcactcccgatattcccaggccctcatggccccagtctacgagggctaccggccccactttaagctgcacccagatgatgtggcagggatccaggctctctatggcaagaagagtccagtgataagggatgaggaagaagaagagacagagctgcccactgtgcccccagtgcccacagaacccagtcccatgccagacccttgcagtagtgaactggatgccatgatgctggggccccgtgggaagacctatgctttcaagggggactatgtgtggactgtatcagattcaggaccgggccccttgttccgagtgtctgccctttgggaggggctccccggaaacctggatgctgctgtctactcgcctcgaacacaatggattcacttctttaagggagacaaggtgtggcgctacattaatttcaagatgtctcctggcttccccaagaagctgaatagggtagaacctaacctggatgcagctctctattggcctctcaaccaaaaggtgttcctctttaagggctccgggtactggcagtgggacgagctagcccgaactgacttcagcagctaccccaaaccaatcaagggtttgtttacgggagtgccaaaccagccctcggctgctatgagttggcaagatggccgagtctacttcttcaagggcaaagtctactggcgcctcaaccagcagcttcgagtagagaaaggctatcccagaaatatttcccacaactggatgcactgtcgtccccggactatagacactaccccatcaggtgggaataccactccctcaggtacgggcataaccttggataccactctctcagccacagaaaccacgtttgaatactgactgctcacccacagacacaatcttggacattaacccctgaggctccaccacccaccctttcatttcccccccagaagcctaaggcctaatagctgaatgaaatacctgtctgctcagtagaaccttgcaggtgctgtagcaggcgcaagaccgtagatctcaggcctctaacacttccaactccagccaccactttcctgtgcattttcactcctgagaagtgctcccctaactcagatcccctaacttagatttggcccccaactccatttcctgtctgtcttagacagcccttccaactgtgtcatctcttctctggaggtcaatggtggagggagatgcctgggtcctgttcttcctacataaaatgcaagaaaacagcatggccagtaaactgagcaagggccttggaatccttgagaatcacatttatgtgcttatgattacgggcaagctaattaaccttgttgaatctcagattccccatttgcaacattaggttaagaccagtactgcaggattgttgcactaaatgaaatactgtatgtgaagtgcctggcacagtgtctggtacatttgtgtttaataaaagctaactccatgttcataagagaggactgaacagctcttcctctagctgtctggctgtataactcttacagtagtctgtataataagggcatctctattagatctttaggggacagaggatttgtcaagatggttagctctttgttttggggtgcagagaaagaaaagagcagcaacagcagaggctggactccctggttcagtatttaatgccattttattcacatgctcccatgttctccctccctcccattgtagccttgctgcccaggggagggatatgtcttcctttatgcatctgggaaaccagcactgtgaggcaagctgaggtgaacatttaaaaggctatttcaagacgaggtgcggtggctataatcctagcactttgggaggctgaagcaggaggatcacttgagcccaggagttcaagaccagcttgggcaacatagggagaccctgtctctgcaaaaaaataaaaacgaatacataaaaattaaaaaaaaa

SEQ ID NO: 418823 - DNA, 2610 bp, Homo sapiens
aagaggactagaggctggagagtaaaaagaactgggggtaagagcccctctgcctagcactgctcccccaaggctcccagaaatctcaggtcagaggcacggacagcctctggagctctcgtctggtgggaccatgaactgccagcagctgtggctgggcttcctactccccatgacagtctcaggccgggtcctggggcttgcagaggtggcgcccgtggactacctgtcacaatatgggtacctacagaagcctctagaaggatctaataacttcaagccagaagatatcaccgaggctctgagagcttttcaggaagcatctgaacttccagtctcaggtcagctggatgatgccacaagggcccgcatgaggcagcctcgttgtggcctagaggatcccttcaaccagaagacccttaaatacctgttgctgggccgctggagaaagaagcacctgactttccgcatcttgaacctgccctccacccttccaccccacacagcccgggcagccctgcgtcaagccttccaggactggagcaatgtggctcccttgaccttccaagaggtgcaggctggtgcggctgacatccgcctctccttccatggccgccaaagctcgtactgttccaatacttttgatgggcctgggagagtcctggcccatgccgacatcccagagctgggcagtgtgcacttcgacgaagacgagttctggactgaggggacctaccgtggggtgaacctgcgcatcattgcagcccatgaagtgggccatgctctggggcttgggcactcccgatattcccaggccctcatggccccagtctacgagggctaccggccccactttaagctgcacccagatgatgtggcagggatccaggctctctatggcaagaagagtccagtgataagggatgaggaagaagaagagacagagctgcccactgtgcccccagtgcccacagaacccagtcccatgccagacccttgcagtagtgaactggatgccatgatgctggggccccgtgggaagacctatgctttcaagggggactatgtgtggactgtatcagattcaggaccgggccccttgttccgagtgtctgccctttgggaggggctccccggaaacctggatgctgctgtctactcgcctcgaacacaatggattcacttctttaagggagacaaggtgtggcgctacattaatttcaagatgtctcctggcttccccaagaagctgaatagggtagaacctaacctggatgcagctctctattggcctctcaaccaaaaggtgttcctctttaagggctccgggtactggcagtgggacgagctagcccgaactgacttcagcagctaccccaaaccaatcaagggtttgtttacgggagtgccaaaccagccctcggctgctatgagttggcaagatggccgagtctacttcttcaagggcaaagtctactggcgcctcaaccagcagcttcgagtagagaaaggctatcccagaaatatttcccacaactggatgcactgtcgtccccggactatagacactaccccatcaggtgggaataccactccctcaggtacgggcataaccttggataccactctctcagccacagaaaccacgtttgaatactgactgctcacccacagacacaatcttggacattaacccctgaggctccaccacccaccctttcatttcccccccagaagcctaaggcctaatagctgaatgaaatacctgtctgctcagtagaaccttgcaggtgctgtagcaggcgcaagaccgtagatctcaggcctctaacacttccaactccagccaccactttcctgtgcattttcactcctgagaagtgctcccctaactcagatcccctaacttagatttggcccccaactccatttcctgtctgtcttagacagcccttccaactgtgtcatctcttctctggaggtcaatggtggagggagatgcctgggtcctgttcttcctacataaaatgcaagaaaacagcatggccagtaaactgagcaagggccttggaatccttgagaatcacatttatgtgcttatgattacgggcaagctaattaaccttgttgaatctcagattccccatttgcaacattaggttaagaccagtactgcaggattgttgcactaaatgaaatactgtatgtgaagtgcctggcacagtgtctggtacatttgtgtttaataaaagctaactccatgttcataagagaggactgaacagctcttcctctagctgtctggctgtataactcttacagtagtctgtataataagggcatctctattagatctttaggggacagaggatttgtcaagatggttagctctttgttttggggtgcagagaaagaaaagagcagcaacagcagaggctggactccctggttcagtatttaatgccattttattcacatgctcccatgttctccctccctcccattgtagccttgctgcccaggggagggatatgtcttcctttatgcatctgggaaaccagaacggacagaccgtgagacatcgcagggatcctctaatcacctttgcaa

SEQ ID NO: 418824 - DNA, 1922 bp, Homo sapiens
aagaggactagaggctggagagtaaaaagaactgggggtaagagcccctctgcctagcactgctcccccaaggctcccagaaatctcaggtcagaggcacggacagcctctggagctctcgtctggtgggaccatgaactgccagcagctgtggctgggcttcctactccccatgacagtctcaggccgggtcctggggcttgcagaggtggcgcccgtggactacctgtcacaatatgggtacctacagaagcctctagaaggatctaataacttcaagccagaagatatcaccgaggctctgagggagagtcctggcccatgccgacatcccagagctgggcagtgtgcacttcgacgaagacgagttctggactgaggggacctaccgtggggtgaacctgcgcatcattgcagcccatgaagtgggccatgctctggggcttgggcactcccgatattcccaggccctcatggccccagtctacgagggctaccggccccactttaagctgcacccagatgatgtggcagggatccaggctctctatggcaagaagagtccagtgataagggatgaggaagaagaagagacagagctgcccactgtgcccccagtgcccacagaacccagtcccatgccagacccttgcagtagtgaactggatgccatgatgctggggccccgtgggaagacctatgctttcaagggggactatgtgtggactgtatcagattcaggaccgggccccttgttccgagtgtctgccctttgggaggggctccccggaaacctggatgctgctgtctactcgcctcgaacacaatggattcacttctttaagggagacaaggtgtggcgctacattaatttcaagatgtctcctggcttccccaagaagctgaatagggtagaacctaacctggatgcagctctctattggcctctcaaccaaaaggtgttcctctttaagggctccgggtactggcagtgggacgagctagcccgaactgacttcagcagctaccccaaaccaatcaagggtttgtttacgggagtgccaaaccagccctcggctgctatgagttggcaagatggccgagtctacttcttcaagggcaaagtctactggcgcctcaaccagcagcttcgagtagagaaaggctatcccagaaatatttcccacaactggatgcactgtcgtccccggactatagacactaccccatcaggtgggaataccactccctcaggtacgggcataaccttggataccactctctcagccacagaaaccacgtttgaatactgactgctcacccacagacacaatcttggacattaacccctgaggctccaccacccaccctttcatttcccccccagaagcctaaggcctaatagctgaatgaaatacctgtctgctcagtagaaccttgcaggtgctgtagcaggcgcaagaccgtagatctcaggcctctaacacttccaactccagccaccactttcctgtgcattttcactcctgagaagtgctcccctaactcagatcccctaacttagatttggcccccaactccatttcctgtctgtcttagacagcccttccaactgtgtcatctcttctctggaggtcaatggtggagggagatgcctgggtcctgttcttcctacataaaatgcaagaaaacagcatggccagtaaactgagcaagggccttggaatccttgagaatcacatttatgtgcttatgattacgggcaagctaattaaccttgttgaatctcagattccccatttgcaacattaggttaagaccagtactgcaggattgttgcactaaatgaaatactgtatgtgaagtgcctggcacagtgtctggtacatttgtgtttaataaaagctaactccatgttcata

SEQ ID NO: 418825 - DNA, 2309 bp, Homo sapiens
tagagatggggtttcaccatgttgcccaggctggtcttaaattcctgagctcaggcaatccacccgcctcagcctcccaaagtcctaggattataggcgtgagccaccacacccggcaagaatgcacattttaacaatcctccttctccctttctggtgtctctcaaacctagaacgtgtctcccgctgatatcaacataatattgcctaccacaaatgaaaacgctctaggattcccttttcccctctgtatggggactctgagcaaaacttacaggagactggtgtggaggacaggtgctgtgagttctctccctaagcagcattactttaccttataggcaagaagagtccagtgataagggatgaggaagaagaagagacagagctgcccactgtgcccccagtgcccacagaacccagtcccatgccagacccttgcagtagtgaactggatgccatgatgctgggtgaggcccctcccctccaggctgttggcaggcggtgggggcagcctgctgatcctgaggcctggacaaatgggagtgacatgggacttcagcatgagcaatggaggttagaccccaggcattaatgaccatggaaggagacatgtgacatggggagggagagttcggagccaaattaaaggtggcttaggcaggcacttaccaaggctgccacgctctaagggccactagaacacatctggaaatgcagcaagatggagaaaactatattacccagattgcctgttagagagggtgcacctggttggaaggacaactaggaagccacttggaggggagggtgaggttcctaaggaggaatagctatctgcagggcttttgttttgttgagtggaccaaagctgaaacgctctgagcaacaaagcattctgagtcctctttgtctgcctttaattttctctttgaattaaagttgaatgaatttttgaagaatcagcctgcagggagagggcaaattgttagtcagcctgagatacccccaagtttctgtctacttgacctctgtctttttgacttgttgacacaccattacgctcagggccccgtgggaagacctatgctttcaagggggactatgtgtggactgtatcagattcaggaccgggccccttgttccgagtgtctgccctttgggaggggctccccggaaacctggatgctgctgtctactcgcctcgaacacaatggattcacttctttaagggagacaaggtgtggcgctacattaatttcaagatgtctcctggcttccccaagaagctgaatagggtagaacctaacctggatgcagctctctattggcctctcaaccaaaaggtgttcctctttaagggctccgggtactggcagtgggacgagctagcccgaactgacttcagcagctaccccaaaccaatcaagggtttgtttacgggagtgccaaaccagccctcggctgctatgagttggcaagatggccgagtctacttcttcaagggcaaagtctactggcgcctcaaccagcagcttcgagtagagaaaggctatcccagaaatatttcccacaactggatgcactgtcgtccccggactatagacactaccccatcaggtgggaataccactccctcaggtacgggcataaccttggataccactctctcagccacagaaaccacgtttgaatactgactgctcacccacagacacaatcttggacattaacccctgaggctccaccacccaccctttcatttcccccccagaagcctaaggcctaatagctgaatgaaatacctgtctgctcagtagaaccttgcaggtgctgtagcaggcgcaagaccgtagatctcaggcctctaacacttccaactccagccaccactttcctgtgcattttcactcctgagaagtgctcccctaactcagatcccctaacttagatttggcccccaactccatttcctgtctgtcttagacagcccttccaactgtgtcatctcttctctggaggtcaatggtggagggagatgcctgggtcctgttcttcctacataaaatgcaagaaaacagcatggccagtaaactgagcaagggccttggaatccttgagaatcacatttatgtgcttatgattacgggcaagctaattaaccttgttgaatctcagattccccatttgcaacattaggttaagaccagtactgcaggattgttgcactaaatgaaatactgtatgtgaagtgcctggcacagtgtctggtacatttgtgtttaataaaagctaactccatgttcata

SEQ ID NO: 418826 - DNA, 959 bp, Homo sapiens
ctggtgatctagaggatcccatctcaggccaggacgagctagcccgaactgacttcagcagctaccccaaaccaatcaagggtttgtttacgggagtgccaaaccagccctcggctgctatgagttggcaagatggccgagtctacttcttcaagggcaaagtctactggcgcctcaaccagcagcttcgagtagagaaaggctatcccagaaatatttcccacaactggatgcactgtcgtccccggactatagacactaccccatcaggtgggaataccactccctcaggtacgggcataaccttggataccactctctcagccacagaaaccacgtttgaatactgactgctcacccacagacacaatcttggacattaacccctgaggctccaccacccaccctttcatttcccccccagaagcctaaggcctaatagctgaatgaaatacctgtctgctcagtagaaccttgcaggtgctgtagcaggcgcaagaccgtagatctcaggcctctaacacttccaactccagccaccactttcctgtgcattttcactcctgagaagtgctcccctaactcagatcccctaacttagatttggcccccaactccatttcctgtctgtcttagacagcccttccaactgtgtcatctcttctctggaggtcaatggtggagggagatgcctgggtcctgttcttcctacataaaatgcaagaaaacagcatggccagtaaactgagcaagggccttggaatccttgagaatcacatttatgtgcttatgattacgggcaagctaattaaccttgttgaatctcagattccccatttgcaacattaggttaagaccagtactgcaggattgttgcactaaatgaaatactgtatgtgaagtgcctggcacagtgtctggtacatttgtgtttaataaaagctaactccatgttcata

SEQ ID NO: 418827 - DNA, 1584 bp, Homo sapiens
aagaggactagaggctggagagtaaaaagaactgggggtaagagcccctctgcctagcactgctcccccaaggctcccagaaatctcaggtcagaggcacggacagcctctggagctctcgtctggtgggaccatgaactgccagcagctgtggctgggcttcctactccccatgacagtctcaggccgggtcctggggcttgcagaggtggcgcccgtggactacctgtcacaatatgggtacctacagaagcctctagaaggatctaataacttcaagccagaagatatcaccgaggctctgagagcttttcaggaagcatctgaacttccagtctcaggtcagctggatgatgccacaagggcccgcatgaggcagcctcgttgtggcctagaggatcccttcaaccagaagacccttaaatacctgttgctgggccgctggagaaagaagcacctgactttccgcatcttgaacctgccctccacccttccaccccacacagcccgggcagccctgcgtcaagccttccaggactggagcaatgtggctcccttgaccttccaagaggtgcaggctggtgcggctgacatccgcctctccttccatggccgccaaagctcgtactgttccaatacttttgatgggcctgggagagtcctggcccatgccgacatcccagagctgggcagtgtgcacttcgacgaagacgagttctggactgaggggacctaccgtggggtgaacctgcgcatcattgcagcccatgaagtgggccatgctctggggcttgggcactcccgatattcccaggccctcatggccccagtctacgagggctaccggccccactttaagctgcacccagatgatgtggcagggatccaggctctctatggcaagaagagtccagtgataagggatgaggaagaagaagagacagagctgcccactgtgcccccagtgcccacagaacccagtcccatgccagacccttgcagtagtgaactggatgccatgatgctggggccccgtgggaagacctatgctttcaagggggactatgtgtggactgtatcagattcaggaccgggccccttgttccgagtgtctgccctttgggaggggctccccggaaacctggatgctgctgtctactcgcctcgaacacaatggattcacttctttaagggagacaaggtgtggcgctacattaatttcaagatgtctcctggcttccccaagaagctgaatagggtagaacctaacctggatgcagctctctattggcctctcaaccaaaaggtgttcctctttaagggctccgggtactggcagtgggacgagctagcccgaactgacttcagcagctaccccaaaccaatcaagggtttgtttacgggagtgccaaaccagccctcggctgctatgagttggcaagatggccgagtctacttcttcaagggcaaagtctactggcgcctcaaccagcagcttcgagtagagaaaggctatcccagaaatatttcccacaactggatgcactgtcgtcctggcctgagatgggatcctctagaccacct

SEQ ID NO: 418828 - DNA, 3274 bp, Homo sapiens
aagaggactagaggctggagagtaaaaagaactgggggtaagagcccctctgcctagcactgctcccccaaggctcccagaaatctcaggtcagaggcacggacagcctctggagctctcgtctggtgggaccatgaactgccagcagctgtggctgggcttcctactccccatgacagtctcaggccgggtcctggggcttgcagaggtggcgcccgtggactacctgtcacaatatgggtacctacagaagcctctagaaggatctaataacttcaagccagaagatatcaccgaggctctgagagcttttcaggaagcatctgaacttccagtctcaggtcagctggatgatgccacaagggcccgcatgaggcagcctcgttgtggcctagaggatcccttcaaccagaagacccttaaatacctgttgctgggccgctggagaaagaagcacctgactttccgcatcttgaacctgccctccacccttccaccccacacagcccgggcagccctgcgtcaagccttccaggactggagcaatgtggctcccttgaccttccaagaggtgcaggctggtgcggctgacatccgcctctccttccatggccgccaaagctcgtactgttccaatacttttgatgggcctgggagagtcctggcccatgccgacatcccagagctgggcagtgtgcacttcgacgaagacgagttctggactgaggggacctaccgtggggtgaacctgcgcatcattgcagcccatgaagtgggccatgctctggggcttgggcactcccgatattcccaggccctcatggccccagtctacgagggctaccggccccactttaagctgcacccagatgatgtggcagggatccaggctctctatggcaagaagagtccagtgataagggatgaggaagaagaagagacagagctgcccactgtgcccccagtgcccacagaacccagtcccatgccagacccttgcagtagtgaactggatgccatgatgctggggccccgtgggaagacctatgctttcaagggggactatgtgtggactgtatcagattcaggaccgggccccttgttccgagtgtctgccctttgggaggggctccccggaaacctggatgctgctgtctactcgcctcgaacacaatggattcacttctttaagggagacaaggtgtggcgctacattaatttcaagatgtctcctggcttccccaagaagctgaatagggtagaacctaacctggatgcagctctctattggcctctcaaccaaaaggtgttcctctttaagggctccgggtactggcagtgggacgagctagcccgaactgacttcagcagctaccccaaaccaatcaagggtttgtttacgggagtgccaaaccagccctcggctgctatgagttggcaagatggccgagtctacttcttcaagggcaaagtctactggcgcctcaaccagcagcttcgagtagagaaaggctatcccagaaatatttcccacaactggatgcactgtcgtccccggactatagacactaccccatcaggtgggaataccactccctcaggtacgggcataaccttggataccactctctcagccacagaaaccacgtttgaatactgactgctcacccacagacacaatcttggacattaacccctgaggctccaccacccaccctttcatttcccccccagaagcctaaggcctaatagctgaatgaaatacctgtctgctcagtagaaccttgcaggtgctgtagcaggcgcaagaccgtagatctcaggcctctaacacttccaactccagccaccactttcctgtgcattttcactcctgagaagtgctcccctaactcagatcccctaacttagatttggcccccaactccatttcctgtctgtcttagacagcccttccaactgtgtcatctcttctctggaggtcaatggtggagggagatgcctgggtcctgttcttcctacataaaatgcaagaaaacagcatggccagtaaactgagcaagggccttggaatccttgagaatcacatttatgtgcttatgattacgggcaagctaattaaccttgttgaatctcagattccccatttgcaacattaggttaagaccagtactgcaggattgttgcactaaatgaaatactgtatgtgaagtgcctggcacagtgtctggtacatttgtgtttaataaaagctaactccatgttcataagagaggactgaacagctcttcctctagctgtctggctgtataactcttacagtagtctgtataataagggcatctctattagatctttaggggacagaggatttgtcaagatggttagctctttgttttggggtgcagagaaagaaaagagcagcaacagcagaggctggactccctggttcagtatttaatgccattttattcacatgctcccatgttctccctccctcccattgtagccttgctgcccaggggagggatatgtcttcctttatgcatctgggaaaccaggaacagaccctgcgcaggagagtcagagggggaagagttagaatgggtcagtggctggaacaaagttctggttaaggaggaaattagtgccacccacggtgagaagcagagaaggcacttgcatcctatgcagccctgaagaccaggctcctttgggcaaaaggcaagactctggcaggtgggtcaatgctctctccttggagcaagaagccagcttttggggaaggcaggtcctgaggcaggcactgccctgtggtcttccccaggttgaggagagaagtggaagccccatggaagacagtgctcccagctgaggtaggaggcggaggtgggggtgggggtagtttaagcctatggggcccagggggaaaggccaaacagaaacccaactaccccctaatgaagggcctggaggttggggtatcttggagctcctcagagcccttcttcccatcaaaaaggtatcaaatgccttggaagctccctgatcctacaaaacaaaaaaatgcttatttttaccactgtgaggcaagctgaggtgaacatttaaaaggctatttcaagacgaggtgcggtggctataatcctagcactttgggaggctgaagcaggaggatcacttgagcccaggagttcaagaccagcttgggcaacatagggagaccctgtctctgcaaaaaaataaaaacgaatacataaaaattaaaaaaaaa

SEQ ID NO: 418829 - DNA, 2346 bp, Homo sapiens
aagaggactagaggctggagagtaaaaagaactgggggtaagagcccctctgcctagcactgctcccccaaggctcccagaaatctcaggtcagaggcacggacagcctctggagctctcgtctggtgggaccatgaactgccagcagctgtggctgggcttcctactccccatgacagtctcaggccgggtcctggggcttgcagaggtggcgcccgtggactacctgtcacaatatgggtacctacagaagcctctagaaggatctaataacttcaagccagaagatatcaccgaggctctgagtctcaggtcagctggatgatgccacaagggcccgcatgaggcagcctcgttgtggcctagaggatcccttcaaccagaagacccttaaatacctgttgctgggccgctggagaaagaagcacctgactttccgcatcttgaacctgccctccacccttccaccccacacagcccgggcagccctgcgtcaagccttccaggactggagcaatgtggctcccttgaccttccaagaggtgcaggctggtgcggctgacatccgcctctccttccatggccgccaaagctcgtactgttccaatacttttgatgggcctgggagagtcctggcccatgccgacatcccagagctgggcagtgtgcacttcgacgaagacgagttctggactgaggggacctaccgtggggtgaacctgcgcatcattgcagcccatgaagtgggccatgctctggggcttgggcactcccgatattcccaggccctcatggccccagtctacgagggctaccggccccactttaagctgcacccagatgatgtggcagggatccaggctctctatggcaagaagagtccagtgataagggatgaggaagaagaagagacagagctgcccactgtgcccccagtgcccacagaacccagtcccatgccagacccttgcagtagtgaactggatgccatgatgctgggtgaggcccctcccctccaggctgttggcaggcggtgggggcagcctgctgatcctgaggcctggacaaatgggagtgacatgggacttcagcatgagcaatggagggccccgtgggaagacctatgctttcaagggggactatgtgtggactgtatcagattcaggaccgggccccttgttccgagtgtctgccctttgggaggggctccccggaaacctggatgctgctgtctactcgcctcgaacacaatggattcacttctttaagggagacaaggtgtggcgctacattaatttcaagatgtctcctggcttccccaagaagctgaatagggtagaacctaacctggatgcagctctctattggcctctcaaccaaaaggtgttcctctttaagggctccgggtactggcagtgggacgagctagcccgaactgacttcagcagctaccccaaaccaatcaagggtttgtttacgggagtgccaaaccagccctcggctgctatgagttggcaagatggccgagtctacttcttcaagggcaaagtctactggcgcctcaaccagcagcttcgagtagagaaaggctatcccagaaatatttcccacaactggatgcactgtcgtccccggactatagacactaccccatcaggtgggaataccactccctcaggtacgggcataaccttggataccactctctcagccacagaaaccacgtttgaatactgactgctcacccacagacacaatcttggacattaacccctgaggctccaccacccaccctttcatttcccccccagaagcctaaggcctaatagctgaatgaaatacctgtctgctcagtagaaccttgcaggtgctgtagcaggcgcaagaccgtagatctcaggcctctaacacttccaactccagccaccactttcctgtgcattttcactcctgagaagtgctcccctaactcagatcccctaacttagatttggcccccaactccatttcctgtctgtcttagacagcccttccaactgtgtcatctcttctctggaggtcaatggtggagggagatgcctgggtcctgttcttcctacataaaatgcaagaaaacagcatggccagtaaactgagcaagggccttggaatccttgagaatcacatttatgtgcttatgattacgggcaagctaattaaccttgttgaatctcagattccccatttgcaacattaggttaagaccagtactgcaggattgttgcactaaatgaaatactgtatgtgaagtgcctggcacagtgtctggtacatttgtgtttaataaaagctaactccatgttcata

SEQ ID NO: 418830 - DNA, 274 bp, Homo sapiens
ctggtgatctagaggatcccatctcaggccaggacgagctagcccgaactgacttcagcagctaccccaaaccaatcaagggtttgtttacgggagtgccaaaccagccctcggctgctatgagttggcaagatggccgagtctacttcttcaagggcaaagtctactggcgcctcaaccagcagcttcgagtagagaaaggctatcccagaaatatttcccacaactggatgcactgtcgtcctggcctgagatgggatcctctagaccacct

SEQ ID NO: 418831 - DNA, 2867 bp, Homo sapiens
aagaggactagaggctggagagtaaaaagaactgggggtaagagcccctctgcctagcactgctcccccaaggctcccagaaatctcaggtcagaggcacggacagcctctggagctctcgtctggtgggaccatgaactgccagcagctgtggctgggcttcctactccccatgacagtctcaggccgggtcctggggcttgcagaggtggcgcccgtggactacctgtcacaatatgggtacctacagaagcctctagaaggatctaataacttcaagccagaagatatcaccgaggctctgagagcttttcaggaagcatctgaacttccagtctcaggtcagctggatgatgccacaagggcccgcatgaggcagcctcgttgtggcctagaggatcccttcaaccagaagacccttaaatacctgttgctgggccgctggagaaagaagcacctgactttccgcatcttgaacctgccctccacccttccaccccacacagcccgggcagccctgcgtcaagccttccaggactggagcaatgtggctcccttgaccttccaagaggtgcaggctggtgcggctgacatccgcctctccttccatggccgccaaagctcgtactgttccaatacttttgatgggcctgggagagtcctggcccatgccgacatcccagagctgggcagtgtgcacttcgacgaagacgagttctggactgaggggacctaccgtggggtgaacctgcgcatcattgcagcccatgaagtgggccatgctctggggcttgggcactcccgatattcccaggccctcatggccccagtctacgagggctaccggccccactttaagctgcacccagatgatgtggcagggatccaggctctctatggcaagaagagtccagtgataagggatgaggaagaagaagagacagagctgcccactgtgcccccagtgcccacagaacccagtcccatgccagacccttgcagtagtgaactggatgccatgatgctgggtgaggcccctcccctccaggctgttggcaggcggtgggggcagcctgctgatcctgaggcctggacaaatgggagtgacatgggacttcagcatgagcaatggaggttagaccccaggcattaatgaccatggaaggagacatgtgacatggggagggagagttcggagccaaattaaaggtggcttaggcaggcacttaccaaggctgccacgctctaagggccactagaacacatctggaaatgcagcaagatggagaaaactatattacccagattgcctgttagagagggtgcacctggttggaaggacaactaggaagccacttggaggggagggtgaggttcctaaggaggaatagctatctgcagggcttttgttttgttgagtggaccaaagctgaaacgctctgagcaacaaagcattctgagtcctctttgtctgcctttaattttctctttgaattaaagttgaatgaatttttgaagaatcagcctgcagggagagggcaaattgttagtcagcctgagatacccccaagtttctgtctacttgacctctgtctttttgacttgttgacacaccattacgctcagggccccgtgggaagacctatgctttcaagggggactatgtgtggactgtatcagattcaggaccgggccccttgttccgagtgtctgccctttgggaggggctccccggaaacctggatgctgctgtctactcgcctcgaacacaatggattcacttctttaagggagacaaggtgtggcgctacattaatttcaagatgtctcctggcttccccaagaagctgaatagggtagaacctaacctggatgcagctctctattggcctctcaaccaaaaggtgttcctctttaagggctccgggtactggcagtgggacgagctagcccgaactgacttcagcagctaccccaaaccaatcaagggtttgtttacgggagtgccaaaccagccctcggctgctatgagttggcaagatggccgagtctacttcttcaagggcaaagtctactggcgcctcaaccagcagcttcgagtagagaaaggctatcccagaaatatttcccacaactggatgcactgtcgtccccggactatagacactaccccatcaggtgggaataccactccctcaggtacgggcataaccttggataccactctctcagccacagaaaccacgtttgaatactgactgctcacccacagacacaatcttggacattaacccctgaggctccaccacccaccctttcatttcccccccagaagcctaaggcctaatagctgaatgaaatacctgtctgctcagtagaaccttgcaggtgctgtagcaggcgcaagaccgtagatctcaggcctctaacacttccaactccagccaccactttcctgtgcattttcactcctgagaagtgctcccctaactcagatcccctaacttagatttggcccccaactccatttcctgtctgtcttagacagcccttccaactgtgtcatctcttctctggaggtcaatggtggagggagatgcctgggtcctgttcttcctacataaaatgcaagaaaacagcatggccagtaaactgagcaagggccttggaatccttgagaatcacatttatgtgcttatgattacgggcaagctaattaaccttgttgaatctcagattccccatttgcaacattaggttaagaccagtactgcaggattgttgcactaaatgaaatactgtatgtgaagtgcctggcacagtgtctggtacatttgtgtttaataaaagctaactccatgttcata

SEQ ID NO: 418832 - DNA, 2449 bp, Homo sapiens
aagaggactagaggctggagagtaaaaagaactgggggtaagagcccctctgcctagcactgctcccccaaggctcccagaaatctcaggtcagaggcacggacagcctctggagctctcgtctggtgggaccatgaactgccagcagctgtggctgggcttcctactccccatgacagtctcaggccgggtcctggggcttgcagaggtggcgcccgtggactacctgtcacaatatgggtacctacagaagcctctagaaggatctaataacttcaagccagaagatatcaccgaggctctgagagcttttcaggaagcatctgaacttccagtctcaggtcagctggatgatgccacaagggcccgcatgaggcagcctcgttgtggcctagaggatcccttcaaccagaagacccttaaatacctgttgctgggccgctggagaaagaagcacctgactttccgcatcttgaacctgccctccacccttccaccccacacagcccgggcagccctgcgtcaagccttccaggactggagcaatgtggctcccttgaccttccaagaggtgcaggctggtgcggctgacatccgcctctccttccatggccgccaaagctcgtactgttccaatacttttgatgggcctgggagagtcctggcccatgccgacatcccagagctgggcagtgtgcacttcgacgaagacgagttctggactgaggggacctaccgtggggtgaacctgcgcatcattgcagcccatgaagtgggccatgctctggggcttgggcactcccgatattcccaggccctcatggccccagtctacgagggctaccggccccactttaagctgcacccagatgatgtggcagggatccaggctctctatggcaagaagagtccagtgataagggatgaggaagaagaagagacagagctgcccactgtgcccccagtgcccacagaacccagtcccatgccagacccttgcagtagtgaactggatgccatgatgctggggccccgtgggaagacctatgctttcaagggggactatgtgtggactgtatcagattcaggaccgggccccttgttccgagtgtctgccctttgggaggggctccccggaaacctggatgctgctgtctactcgcctcgaacacaatggattcacttctttaagggagacaaggtgtggcgctacattaatttcaagatgtctcctggcttccccaagaagctgaatagggtagaacctaacctggatgcagctctctattggcctctcaaccaaaaggtgttcctctttaaggtataaagttcaaagcaagggcaaatcccttcttaggaggagtgggctaccttatactgagaagcaaagcttgcgcttgaagggagatgttctgcagctgcagtgggctgggggtggacccctgggggtcctaagctctctcctcttcctctcccctctccccacccatcccatatccagggctccgggtactggcagtgggacgagctagcccgaactgacttcagcagctaccccaaaccaatcaagggtttgtttacgggagtgccaaaccagccctcggctgctatgagttggcaagatggccgagtctacttcttcaagggcaaagtctactggcgcctcaaccagcagcttcgagtagagaaaggctatcccagaaatatttcccacaactggatgcactgtcgtccccggactatagacactaccccatcaggtgggaataccactccctcaggtacgggcataaccttggataccactctctcagccacagaaaccacgtttgaatactgactgctcacccacagacacaatcttggacattaacccctgaggctccaccacccaccctttcatttcccccccagaagcctaaggcctaatagctgaatgaaatacctgtctgctcagtagaaccttgcaggtgctgtagcaggcgcaagaccgtagatctcaggcctctaacacttccaactccagccaccactttcctgtgcattttcactcctgagaagtgctcccctaactcagatcccctaacttagatttggcccccaactccatttcctgtctgtcttagacagcccttccaactgtgtcatctcttctctggaggtcaatggtggagggagatgcctgggtcctgttcttcctacataaaatgcaagaaaacagcatggccagtaaactgagcaagggccttggaatccttgagaatcacatttatgtgcttatgattacgggcaagctaattaaccttgttgaatctcagattccccatttgcaacattaggttaagaccagtactgcaggattgttgcactaaatgaaatactgtatgtgaagtgcctggcacagtgtctggtacatttgtgtttaataaaagctaactccatgttcata

SEQ ID NO: 418833 - DNA, 1193 bp, Homo sapiens
cactgaatttgtgatagcagatctagaggtatcacctcggacgtgttatccccgggaatactggatgctgtcgctgtgtactcgcctcgagcacaactggattcacattctttaagggagacaaggtgtggcgctacattaatttcaagatgtctcctggcttccccaagaagctgaatagggtagaacctaacctggatgcagctctctattggcctctcaaccaaaaggtgttcctctttaagggctccgggtactggcagtgggacgagctagcccgaactgacttcagcagctaccccaaaccaatcaagggtttgtttacgggagtgccaaaccagccctcggctgctatgagttggcaagatggccgagtctacttcttcaagggcaaagtctactggcgcctcaaccagcagcttcgagtagagaaaggctatcccagaaatatttcccacaactggatgcactgtcgtccccggactatagacactaccccatcaggtgggaataccactccctcaggtacgggcataaccttggataccactctctcagccacagaaaccacgtttgaatactgactgctcacccacagacacaatcttggacattaacccctgaggctccaccacccaccctttcatttcccccccagaagcctaaggcctaatagctgaatgaaatacctgtctgctcagtagaaccttgcaggtgctgtagcaggcgcaagaccgtagatctcaggcctctaacacttccaactccagccaccactttcctgtgcattttcactcctgagaagtgctcccctaactcagatcccctaacttagatttggcccccaactccatttcctgtctgtcttagacagcccttccaactgtgtcatctcttctctggaggtcaatggtggagggagatgcctgggtcctgttcttcctacataaaatgcaagaaaacagcatggccagtaaactgagcaagggccttggaatccttgagaatcacatttatgtgcttatgattacgggcaagctaattaaccttgttgaatctcagattccccatttgcaacattaggttaagaccagtactgcaggattgttgcactaaatgaaatactgtatgtgaagtgcctggcacagtgtctggtacatttgtgtttaataaaagctaactccatgttcata

SEQ ID NO: 418834 - DNA, 6047 bp, Homo sapiens
  misc_feature (193)..(193): n is a, c, g, or t
  misc_feature (2070)..(2070): n is a, c, g, or t
  misc_feature (2101)..(2101): n is a, c, g, or t
  misc_feature (2145)..(2145): n is a, c, g, or t
  misc_feature (2162)..(2162): n is a, c, g, or t
  misc_feature (2184)..(2184): n is a, c, g, or t
  misc_feature (2186)..(2186): n is a, c, g, or t
  misc_feature (2219)..(2219): n is a, c, g, or t
  misc_feature (2228)..(2228): n is a, c, g, or t
  misc_feature (2235)..(2235): n is a, c, g, or t
  misc_feature (2321)..(2321): n is a, c, g, or t
  misc_feature (2552)..(2552): n is a, c, g, or t
  misc_feature (2686)..(2686): n is a, c, g, or t
  misc_feature (3344)..(3344): n is a, c, g, or t
  misc_feature (3531)..(3531): n is a, c, g, or t
  misc_feature (3976)..(3976): n is a, c, g, or t
  misc_feature (4079)..(4079): n is a, c, g, or t
  misc_feature (4560)..(4560): n is a, c, g, or t
agaagggcgctgagaagggagctggaaggaaaagaaggaaacattccttcctcaactggaggaagacacgcggccacacacagaaccagcggccccaggaccgtcaccctgcgtgcccgggcctgtccctcctgaccccaggattatagtggcgaggcagggtgttagccaagcggattgagccaggacacancaccgcggagccctgcaggcgagtcctccggaggctgagagcaaacggctgcactaggaacccagcagtcagaccggcccccaccctggagtgaacacatcgccactgccaggcatcgcagggaggactaccccaatggcacctggctgggcgacgagaacaaccccgagatgcgggtacgctgcgccatcatcccctccgacatgctgcacatcagcaccaactgccgcacggccgagaagatggcgctaacgctgctggactacctcttccaccgcgaggtgcaggctgtgtccaacctctcggggcagggcaagcacgggaagaagcagctggacccgctcaccatctacggcatccggtgtcaccttttctataaatttggcatcacagaatccgactggtaccgaatcaagcagagcatcgactccaagtgccgcacggcgtggcggcgcaagcagcggggccagagcctggcggtcaagagcttctcgcggagaacgcccaactcgtcctcctactgcccttcagagccgatgatgagcaccccacctcctgccagcgagctcccgcagccacagccgcagccgcaggccctgcactacgcgctggccaacgcacagcaggtgcagatccaccagatcggagaagacggacaggtgcaagtaatcccacagggacacctccacatcgcccaggtgccgcagggggagcaagtccagatcacgcaggacagcgaggagcccgtgttctggtactacgtgaaggaggtcctcaacaagcacgagctgcaagcgcttctactccctgcgccacatcgcctcagacgtgggccggggccgcacctggctgcgctgtgccctcaacgaacactccctggagcgctacctgcacatgctcctggccgaccgctgcaggctcagtactttttatgaagactggtcttttgtgatggatgaagagaggtccagtatgcttcctaccatggcagcaggtccgaactccatactctttgcgattaacattgacaacaaggatttgaacgggcagagtaagtttgctcccaccgtttcagacctcttaaaggagtcaacgcagaatgtgaccttgctgaaggagtccacgcaaggagtgagcagcgtgttcagggagatcacagcctcctctgccatctccatcctcatcaaacctgaacaggagaccgaccccttgcccgtcgtgtccaggaatgtcagtgctgatgccaaatgcaaaaaggagcggaagaagaaaaagcaagtgaccaacattatctcatttgatgatgaggaagatgagcagaactctggggacatgtttaaaaagacacctggggcaggggagagctcagaggacaactccgaccactcctctgtcaatatcatgtccgcctttgaaagccccttcgggccaaactccaatggaagtcagagcagcaactcgtggaaaattgattccctgtctttgaacagggagtttgggtaccagaagcttgatgtgaaaagcatcgatgatgaagatgtgggatgaaaacgaagatgacgtgtatggaaactcatcaggacggaagcacaggggccactcagagtcgcccgagaaaaacggagcacactctgtcacccaggctggagtgcaatggcacgatctcagctcactacaacctctgcctcccgggttcaagtgattctactgcctcagcctcccgtgtagctgggattacaggcgcgcaccaacacacccgactaatttttgtatttttagtaaagacagggtttcaccatgttggccaggctggtcttgcactcctgacctcacgtgatctgccccaccttggcctcccaaagtgctgggattacagngtctcgctctgtcgcacagtctggagtgcantggcgtgatctcggcccactaaaacctccacctcctgaatctangcaattctcctgtctcngcctcctgagtagctgggactncnggctcacaccaccatgcccggctaatttttgtntttttagtngggacgnggttttgccatattggtcaggctggtcttgaagtcctggcctcaggtgatccaccagcctcagcctcccaaaatgctgggattacnggcatgagtcaccatgcccagcctaaacttggcaagataataaataacctttttaagtgtcgttgggcacttgtctggttgtttttctttaggttaccatgccagcaatgattccttttgagtttctgacagaagatagtggttttcatccaaataagtcaactactctaccccatccctaagccacttgtatggaaagaaaaagaggaagaagccagtactgtgactgcntaagcttcccccagcatcacccgctatgagatgtgtggcagctgagacccgggaactgctcaagggcaccaggccccatctgtctgcactcactcaccttcctcaggtactcgcatgggcatgtcactgacttnacgtgctgctgcagctccttggtgagctggccctggtcatgggacaggaactgtggggtcaggacaatagagagcttcaccatttgcagaatgagaacaggggctcatgatgagtgccaacctattagataatttaaaaaaaaagtgttgaatgagtggaaaaacaaggtgatgtttgagtctatagtggtcaagggcttcagaaaaggacagaaccaagttcaaattcctgtactttgaatttctacttcatgccatgcaaaattactttaccccttttaacctcagttttcttctgtgtgaaacaggaacaatagtttcattcgtcattcagtttctctcaaggtttcacgagatcatacctataaaacatccaagtcatttaaatgtatcatcatttctgtcataattagtgggatccatttcactattattggatatacagttctgtgcctgaaacctacaaaaaaagaaaatgttaagtctaaaaagcattagtgatttctcatttttatattactaattataaccctatttaatcacacaaggccttgtccgtggcaggtgctcaataaacacttgtcgaatcaatgcatgtgggctccggagccacactgtttagattctattctgcctccaccacttatcagctgtgtgntctgggtaagataattcacctctttatgtctgcacttccctctccataaactatatataatgagaatccttagctcattcggttgtggtgaggggtgaatgatttggcacacaggaggggcttgttaaacattagctgtgatgatctccttccaaatcttcattttcagagccacagatgaggccanagtgcaaccaggtgaccttagagtgtaagtacacatgatcgccagctatgctctgtctccaccataggtccaagactgggtagttccggcctggaggtttctgctgcatctgccttctcagtgctcacctaagggcttttgtattttcctcctcgcatccccacagatggggttcaggctgccggacacagctgggtgatgccagggcagtggtcacctgtgccagccctgtgaggtagctggaggatcattgttccttccttctcgggctctgggcagatgccagggctggggtgacccatgccctcaagtttcttgctttggtgggccacattttcccttggcaaagagggtaaaggtcacaggatgccagagagctgtgacttctctgtgccctgggcccaaactatgaagacctgacacactatgctaaaagtccaaggcngggtgctccccagagcttcttgcctcaccgcttctgctgagggaggaatgaatactatgtcctcccagagctttgggagcttgtagcaagcagcctccccagnacaaaatctcttggaaacctctaactgtgtctgaaacattagtgcaaatgttgcatcatatttcccatatgtccgcatgttttaggaaaaaaccctcaatttcctaaatatgcaagaaaaatcgatattgtaggacaatgtgactttttaaaaaatgttatttaaaaatcttccccacctccttttctgccctccaagactgccaaatacttgttgaacaaatattattaaaagcctactacgtgccagccatgattcatggtcttggggacacagcagagaacaaactgacaggattcctctcttatgcaactcacattcttatacgataatgataagggttaacattaattaagccgtcaccacgtgttagtcacggtgcagtcattcccacacattattacacttaaacctgctagcaagcttgcaaggtagttagttgtttttcctttaaaaactgagtctcggaatgatgaagcantctgtccaatgtcacacggctagtaagtgtggagaccttgcatccaatcaatgcccgtctcattctaaaggccatgttatgtgttctccagcccatggagaataattttaacacagtcaatgaaatttctacacaacaatgttcttgtttcaagtccaagaatgcctcctacacctcctataatactggctttctggtgagtaaagatggcattctcatgtgtaatcaggtggcaaatggagatatgaccaaagtaaccatctgcctacactcataaccctgtacacactcttcctgtgtcgattcaattcaagtaccccttttgatcacttagcaaatctgacctttaaaagggttaaggtttttatatccatgtaagtttctgtattgctttggaagtctctggttaaattaatactcttttaatagtgacctgtgattctgttttgatcaagtgttttcaaacttgacgtctttgatgggtttctccagtgtcaaaatcctaaatcaagtctttttggcttaaaactaactttgggattttttcagctgcatcccttggggagtctaaagaatgtatctctcatcttgtagaggtattaagtgattcgatttatttggtagattaaatgggcaggcattgtcaaatgtggcgatactgcatgggagggcactgtcaagtgaggtgacattagatctcatctcagttatatttatgggtatgttgttgatatacgtgttccaaaaattgcatacatttatacaaatttaatatgatttgtaattttgatagttatgctaaatgtttgctaaagttatatttgtataaacacgtcatgaatggctgggcaccgtcactcatgcctgtaatcccagcactttgggagacaaaggcaggtggatcacctgaggtcgggagttccagaccagcctaatagagtgaaaccctgtctccactaaaaatacaaaagttagccatgcctggtggcacatgcctgtggtctcagctactcgggaggctgagacaggagaattgcttgaacccaggaggcggaggttgcagtgagccgagatcatgccactgcactcccgcctgggtgacagaggtagaatctaactaaaaaaaaaaaaaagttattaattatttctgaagattgtatgaaatttataaaagtctggtggccctgatatgatgctgccagtcatgattctgattactgtcttaaaatgctgcacgtaagtaattaaatttccttgtgaactgggaagtttcatcagacttctatcataactattgtttccatcatccacagttactattttgaattcttctctaaaaatatttgtaattggcaatagtccaaattttcttttgttttctttcctgtttttgagacacagtctggctctgttgcctaagctggagtgcagtgagccgagatcatgccactgcactcccgcctgggtgacagaggtagaatctaact

SEQ ID NO: 418835 - DNA, 2145 bp, Homo sapiens
  misc_feature (1244)..(1244): n is a, c, g, or t
gtgctcgcttcggcagcacatatactaaaattggaacgatacagagaagattagcatggcccctgcgcaaggatgacacgcgaattcgtgaagcgttccatatttttacctgctttgaaacgccagcgactagaaatcaattgccaggatccatctataaagtcattcctgtattccatcaaccagacaatctgcttgcggttggatagcattgaagccaaattgcaagccctggaggctacttgtaaatccttagaagaaaagctggatctggtcacgaacaagcagcacagccccatccaggttcccatggtggccggctcccctctcggggcaacccagacgtgcaacaaagtgcgatggctgtgcctgggcgtcggcagaacaccattgtggtgaaggtgccgggccaagaagacagccaccacgaggacggggagagcggctcggaggccagcgactctgtgtccagctgtgggcaggcgggcagtcagagcatcgggagcaacgtcacgctcatcaccctgaactcggaagaggactaccccaatggcacctggctgggcgacgagaacaaccccgagatgcgggtacgctgcgccatcatcccctccgacatgctgcacatcagcaccaactgccgcacggccgagaagatggcgctaacgctgctggactacctcttccaccgcgaggtgcaggctgtgtccaacctctcggggcagggcaagcacgggaagaagcagctggacccgctcaccatctacggcatccggtgtcaccttttctataaatttggcatcacagaatccgactggtaccgaatcaagcagagcatcgactccaagtgccgcacggcgtggcggcgcaagcagcggggccagagcctggcggtcaagagcttctcgcggagaacgcccaactcgtcctcctactgcccttcagagccgatgatgagcaccccacctcctgccagcgagctcccgcagccacagccgcagccgcaggccctgcactacgcgctggccaacgcacagcaggtgcagatccaccagatcggagaagacggacaggtgcaagtaatcccacagggacacctccacatcgcccaggtgccgcagggggagcaagtccagatcacgcaggacagcgagggcaacctccagatccatcacgtggggcaggacggtcaggtgctgcagggtgcacagctgatcgccgtggcctcctcggaccccgcggcngcgggcgtggatgggtcgccactccagggcagcgacatccaggttcagtacgtgcagctggcgccagtgagtgaccacacggccggggcacagacggccgaagccctgcagcccacgctacagccggagatgcagctcgagcacggggccatccagattcagtgagcggtgcccatggcaccaggagcccctcgccggctccgcctacggcccggcccccacgcgccctgctctcacggcctcggcacaggcagcggctgcacgtgttctgctgaagtgcgtctgaaggccgctgcctccgcggggaacagcatcctatcaactgaaagagcagccgccgccgcccccagccggagacccctttcgtttgagtcctgctgttggtgtcggagcacgaggggaggcacggtgcggagagcgtcgcatatgcgcgggaaatcaagaactatgatatttttctgtttaaacagctttttttaatttgctatggtgtttataacaaaaaagaaaatttgaaaaaaaaaatcccaggggagtagcaggagccctttgctgtgtgctctgtccagtgtcatgagacgggagccctttgctgtgtgctctgtccagtgtcatgagacgggagccctttgctgtgtgctctgtccagtgtcatgagacgggagccctttgctgtgtgctctgtccagtgtcatgagacgggagccctttgctgtgtgctctgtccagtgtcatgagacgggagccctttgctgtgtgctctgtccagtgtcatgaggcaggtgtttgcaaagccagctctcggttccgatggggtattgctgacctacttttctaggggaaatgctcttaaacactgtaattatgcatttctaatgaaataaaatgtatttatgaccac

SEQ ID NO: 418836 - DNA, 964 bp, Homo sapiens
atgctgtttcgatgttaggtgtaatctgtttttattgttgagaagatttgactagttttatatgtaaatttactgattaataataacatattaaagtacatttttaaaattaaatgggcttaaccaagaattgcaactgcacatagaagtgaaaccatgactaaatcatcacatttgaaacaggacgtgtgacttgtgtgtaaaatgtgaacttgttactcacatgtttctggctcatagctcagaagctagttccagtgtggggattgttctgtctgaatagatagagttgagatcaggaaatagctgtttggtgtttcttggggttgtcttcttacagttcaggagacccttcctaaagccggtcttttctcacttccagtcattcctgtattccatcaaccagacaatctgcttgcggttggatagcattgaagccaaattgcaagccctggaggctacttgtaaatccttagaagaaaagctggatctggtcacgaacaagcagcacagccccatccaggttcccatggtggccggctcccctctcggggcaacccagacgtgcaacaaagtgcgatggtgaacccgtgagcaactgtggtacctccacctgtcccacaacctacaactcagcagtaccaagggctggacgctggtgccaccacacgggtcccgcgaagcctgctgcgaagtgaaggaagccagacacaaaagtctccatcctgcgggagtcactcacaggacaattctggaggacgcaaagctgtaggagcgaggagagacaggtggtggttgggggccgggaaggggcctgactgcagaggggcaaaatgtgggctgcctctgtcggggcagaagtgccccactctagacccttaccaagtcgtcggctgtacatcgaaaacgggtgagccttatgtgtgtacgtgataccgcaataaacctgacttgtaaaagcaaa

SEQ ID NO: 418837 - DNA, 641 bp, Homo sapiens
cttagtttcaagggcagcctaggcaaaatatggggcccctttctcccccaaaaataaaaatttttattattattaaataaattaaaggaaagagccacccatgaagatacttagctgaggccaggtacagtggctcatgcctatactcccaaagtgctgggattacaggtgtgaaccactgcgcccagccccaagtggctttttcaattacatgagccaacatattctcacaagtccattcgagtttggtgtctgttacttgcaaataagggagttctgattggttcccagtgaaacctcatctgtaagacctctgagccaccagtatccacggggcttgtcctataacagctcctgtgcaatccagtaaccttgaacactggaagccactgagcccttctgtgagtagatgcacacctctgaggctaagattactggtgtactcattgggaccagtttggtctcagtgactgaaaactcaacccaaacttgttcatttggaaaggaaaagtcaaccaggcacagtggctcatgcctgtagttccagcactttgggaggctgaggtggacagatcgcttgagcccaggggttcaagaccaacctgggcaacatagcaaaaccctgcctctacaaaaaaaaa

SEQ ID NO: 418838 - DNA, 740 bp, Homo sapiens
gcagagcggcggcttctctcgcgaggacggacgccattatcgcatctccccgacaaacaccacgagaattccgcagcccacacggtgaccaaaagccagccccactgtgagttgaactctttcgtgttgaccggccactctccgtgctctggatgatgtcggaacacgacctggccgatgtggttcagattgcagtggaagacctgagccctgaccacccaggtacagagctgtgggacagtagttgttttggagaatcatgtagtgacagatgaagacgaacctgctttgaaacgccagcgactagaaatcaattgccaggatccatctataaagtcattcctgtattccatcaaccagacaatctgcttgcggttggatagcattgaagccaaattgcaagccctggaggctacttgtaaatccttagaagaaaagctggatctggtcacgaacaagcagcacagccccatccaggttcccatggtggccggctcccctctcggggcaacccagacgtgcaacaaagtgcgatggctgtgcctgggcgtcggcagaacaccattgtggtgaaggtgccgggccaagaagacagccaccacgaggacggggagagcggctcggaggccagcgactctgtgtccagctgtgggcaggcgggcagtcagagcatcgggagcaacgtcacgctcatcaccctgaactcggaagaggactaacccaattggcacctggctggg

SEQ ID NO: 418839 - DNA, 2119 bp, Homo sapiens
  misc_feature (1378)..(1378): n is a, c, g, or t
taggctaggtacgaggccgggtgttaatcggccgaggaacaccacgagaattccgcagcccacacggtgaccaaaagccagccccactgtgagttgaactctttcgtgttgaccggccactctccgtgctctggatgatgtcggaacacgacctggccgatgtggttcagattgcagtggaagacctgagccctgaccacccagttgttttggagaatcatgtagtgacagatgaagacgaacctgctttgaaacgccagcgactagaaatcaattgccaggatccatctataaagtcattcctgtattccatcaaccagacaatctgcttgcggttggatagcattgaagccaaattgcaagccctggaggctacttgtaaatccttagaagaaaagctggatctggtcacgaacaagcagcacagccccatccaggttcccatggtggccggctcccctctcggggcaacccagacgtgcaacaaagtgcgatggctgtgcctgggcgtcggcagaacaccattgtggtgaaggtgccgggccaagaagacagccaccacgaggacggggagagcggctcggaggccagcgactctgtgtccagctgtgggcaggcgggcagtcagagcatcgggagcaacgtcacgctcatcaccctgaactcggaagaggactaccccaatggcacctggctgggcgacgagaacaaccccgagatgcgggtacgctgcgccatcatcccctccgacatgctgcacatcagcaccaactgccgcacggccgagaagatggcgctaacgctgctggactacctcttccaccgcgaggtgcaggctgtgtccaacctctcggggcagggcaagcacgggaagaagcagctggacccgctcaccatctacggcatccggtgtcaccttttctataaatttggcatcacagaatccgactggtaccgaatcaagcagagcatcgactccaagtgccgcacggcgtggcggcgcaagcagcggggccagagcctggcggtcaagagcttctcgcggagaacgcccaactcgtcctcctactgcccttcagagccgatgatgagcaccccacctcctgccagcgagctcccgcagccacagccgcagccgcaggccctgcactacgcgctggccaacgcacagcaggtgcagatccaccagatcggagaagacggacaggtgcaagtaatcccacagggacacctccacatcgcccaggtgccgcagggggagcaagtccagatcacgcaggacagcgagggcaacctccagatccatcacgtggggcaggacggtcaggtgctgcagggtgcacagctgatcgccgtggcctcctcggaccccgcggcngcgggcgtggatgggtcgccactccagggcagcgacatccaggttcagtacgtgcagctggcgccagtgagtgaccacacggccggggcacagacggccgaagccctgcagcccacgctacagccggagatgcagctcgagcacggggccatccagattcagtgagcggtgcccatggcaccaggagcccctcgccggctccgcctacggcccggcccccacgcgccctgctctcacggcctcggcacaggcagcggctgcacgtgttctgctgaagtgcgtctgaaggccgctgcctccgcggggaacagcatcctatcaactgaaagagcagccgccgccgcccccagccggagacccctttcgtttgagtcctgctgttggtgtcggagcacgaggggaggcacggtgcggagagcgtcgcatatgcgcgggaaatcaagaactatgatatttttctgtttaaacagctttttttaatttgctatggtgtttataacaaaaaagaaaatttgaaaaaaaaaatcccaggggagtagcaggagccctttgctgtgtgctctgtccagtgtcatgagacgggagccctttgctgtgtgctctgtccagtgtcatgaggcaggtgtttgcaaagccagctctcggttccgatggggtattgctgacctacttttctaggggaaatgctcttaaacactgtaattatgcatttctaatgaaataaaatgtatttatgaccac

SEQ ID NO: 418840 - DNA, 5206 bp, Homo sapiens
  misc_feature (1132)..(1132): n is a, c, g, or t
  misc_feature (1163)..(1163): n is a, c, g, or t
  misc_feature (1207)..(1207): n is a, c, g, or t
  misc_feature (1224)..(1224): n is a, c, g, or t
  misc_feature (1246)..(1246): n is a, c, g, or t
  misc_feature (1248)..(1248): n is a, c, g, or t
  misc_feature (1281)..(1281): n is a, c, g, or t
  misc_feature (1290)..(1290): n is a, c, g, or t
  misc_feature (1297)..(1297): n is a, c, g, or t
  misc_feature (1383)..(1383): n is a, c, g, or t
  misc_feature (1614)..(1614): n is a, c, g, or t
  misc_feature (1748)..(1748): n is a, c, g, or t
  misc_feature (2406)..(2406): n is a, c, g, or t
  misc_feature (2593)..(2593): n is a, c, g, or t
  misc_feature (3038)..(3038): n is a, c, g, or t
  misc_feature (3141)..(3141): n is a, c, g, or t
  misc_feature (3622)..(3622): n is a, c, g, or t
ggttcaatcttctgtttgtaaccagaagctttaaaccagcagagacctcagacaaatcatatccctcctggggtgaccaggtgcagatcttccagggagccgtctaatggaatttcctggttaatggacacagagaaccactgctaagaacgatttccttttctctttcaatctgcagtactttttatgaagactggtcttttgtgatggatgaagagaggtccagtatgcttcctaccatggcagcaggtccgaactccatactctttgcgattaacattgacaacaaggatttgaacgggcagagtaagtttgctcccaccgtttcagacctcttaaaggagtcaacgcagaatgtgaccttgctgaaggagtccacgcaaggagtgagcagcgtgttcagggagatcacagcctcctctgccatctccatcctcatcaaacctgaacaggagaccgaccccttgcccgtcgtgtccaggaatgtcagtgctgatgccaaatgcaaaaaggagcggaagaagaaaaagcaagtgaccaacattatctcatttgatgatgaggaagatgagcagaactctggggacatgtttaaaaagacacctggggcaggggagagctcagaggacaactccgaccactcctctgtcaatatcatgtccgcctttgaaagccccttcgggccaaactccaatggaagtcagagcagcaactcgtggaaaattgattccctgtctttgaacagggagtttgggtaccagaagcttgatgtgaaaagcatcgatgatgaagatgtgggatgaaaacgaagatgacgtgtatggaaactcatcaggacggaagcacaggggccactcagagtcgcccgagaaaaacggagcacactctgtcacccaggctggagtgcaatggcacgatctcagctcactacaacctctgcctcccgggttcaagtgattctactgcctcagcctcccgtgtagctgggattacaggcgcgcaccaacacacccgactaatttttgtatttttagtaaagacagggtttcaccatgttggccaggctggtcttgcactcctgacctcacgtgatctgccccaccttggcctcccaaagtgctgggattacagngtctcgctctgtcgcacagtctggagtgcantggcgtgatctcggcccactaaaacctccacctcctgaatctangcaattctcctgtctcngcctcctgagtagctgggactncnggctcacaccaccatgcccggctaatttttgtntttttagtngggacgnggttttgccatattggtcaggctggtcttgaagtcctggcctcaggtgatccaccagcctcagcctcccaaaatgctgggattacnggcatgagtcaccatgcccagcctaaacttggcaagataataaataacctttttaagtgtcgttgggcacttgtctggttgtttttctttaggttaccatgccagcaatgattccttttgagtttctgacagaagatagtggttttcatccaaataagtcaactactctaccccatccctaagccacttgtatggaaagaaaaagaggaagaagccagtactgtgactgcntaagcttcccccagcatcacccgctatgagatgtgtggcagctgagacccgggaactgctcaagggcaccaggccccatctgtctgcactcactcaccttcctcaggtactcgcatgggcatgtcactgacttnacgtgctgctgcagctccttggtgagctggccctggtcatgggacaggaactgtggggtcaggacaatagagagcttcaccatttgcagaatgagaacaggggctcatgatgagtgccaacctattagataatttaaaaaaaaagtgttgaatgagtggaaaaacaaggtgatgtttgagtctatagtggtcaagggcttcagaaaaggacagaaccaagttcaaattcctgtactttgaatttctacttcatgccatgcaaaattactttaccccttttaacctcagttttcttctgtgtgaaacaggaacaatagtttcattcgtcattcagtttctctcaaggtttcacgagatcatacctataaaacatccaagtcatttaaatgtatcatcatttctgtcataattagtgggatccatttcactattattggatatacagttctgtgcctgaaacctacaaaaaaagaaaatgttaagtctaaaaagcattagtgatttctcatttttatattactaattataaccctatttaatcacacaaggccttgtccgtggcaggtgctcaataaacacttgtcgaatcaatgcatgtgggctccggagccacactgtttagattctattctgcctccaccacttatcagctgtgtgntctgggtaagataattcacctctttatgtctgcacttccctctccataaactatatataatgagaatccttagctcattcggttgtggtgaggggtgaatgatttggcacacaggaggggcttgttaaacattagctgtgatgatctccttccaaatcttcattttcagagccacagatgaggccanagtgcaaccaggtgaccttagagtgtaagtacacatgatcgccagctatgctctgtctccaccataggtccaagactgggtagttccggcctggaggtttctgctgcatctgccttctcagtgctcacctaagggcttttgtattttcctcctcgcatccccacagatggggttcaggctgccggacacagctgggtgatgccagggcagtggtcacctgtgccagccctgtgaggtagctggaggatcattgttccttccttctcgggctctgggcagatgccagggctggggtgacccatgccctcaagtttcttgctttggtgggccacattttcccttggcaaagagggtaaaggtcacaggatgccagagagctgtgacttctctgtgccctgggcccaaactatgaagacctgacacactatgctaaaagtccaaggcngggtgctccccagagcttcttgcctcaccgcttctgctgagggaggaatgaatactatgtcctcccagagctttgggagcttgtagcaagcagcctccccagnacaaaatctcttggaaacctctaactgtgtctgaaacattagtgcaaatgttgcatcatatttcccatatgtccgcatgttttaggaaaaaaccctcaatttcctaaatatgcaagaaaaatcgatattgtaggacaatgtgactttttaaaaaatgttatttaaaaatcttccccacctccttttctgccctccaagactgccaaatacttgttgaacaaatattattaaaagcctactacgtgccagccatgattcatggtcttggggacacagcagagaacaaactgacaggattcctctcttatgcaactcacattcttatacgataatgataagggttaacattaattaagccgtcaccacgtgttagtcacggtgcagtcattcccacacattattacacttaaacctgctagcaagcttgcaaggtagttagttgtttttcctttaaaaactgagtctcggaatgatgaagcantctgtccaatgtcacacggctagtaagtgtggagaccttgcatccaatcaatgcccgtctcattctaaaggccatgttatgtgttctccagcccatggagaataattttaacacagtcaatgaaatttctacacaacaatgttcttgtttcaagtccaagaatgcctcctacacctcctataatactggctttctggtgagtaaagatggcattctcatgtgtaatcaggtggcaaatggagatatgaccaaagtaaccatctgcctacactcataaccctgtacacactcttcctgtgtcgattcaattcaagtaccccttttgatcacttagcaaatctgacctttaaaagggttaaggtttttatatccatgtaagtttctgtattgctttggaagtctctggttaaattaatactcttttaatagtgacctgtgattctgttttgatcaagtgttttcaaacttgacgtctttgatgggtttctccagtgtcaaaatcctaaatcaagtctttttggcttaaaactaactttgggattttttcagctgcatcccttggggagtctaaagaatgtatctctcatcttgtagaggtattaagtgattcgatttatttggtagattaaatgggcaggcattgtcaaatgtggcgatactgcatgggagggcactgtcaagtgaggtgacattagatctcatctcagttatatttatgggtatgttgttgatatacgtgttccaaaaattgcatacatttatacaaatttaatatgatttgtaattttgatagttatgctaaatgtttgctaaagttatatttgtataaacacgtcatgaatggctgggcaccgtcactcatgcctgtaatcccagcactttgggagacaaaggcaggtggatcacctgaggtcgggagttccagaccagcctaatagagtgaaaccctgtctccactaaaaatacaaaagttagccatgcctggtggcacatgcctgtggtctcagctactcgggaggctgagacaggagaattgcttgaacccaggaggcggaggttgcagtgagccgagatcatgccactgcactcccgcctgggtgacagaggtagaatctaactaaaaaaaaaaaaaagttattaattatttctgaagattgtatgaaatttataaaagtctggtggccctgatatgatgctgccagtcatgattctgattactgtcttaaaatgctgcacgtaagtaattaaatttccttgtgaactgggaagtttcatcagacttctatcataactattgtttccatcatccacagttactattttgaattcttctctaaaaatatttgtaattggcaatagtccaaattttcttttgttttctttcctgtttttgagacacagtctggctctgttgcctaagctggagtgcagtggtgggatctcggctcactgcaagctccgcctcccgggttcacaccattctcctgcctcagctaaaaatacaaaattacccgggcgtggtggtacatgcctgtaatcccagctactcgggaggctgaggcaggagaatcgcttgaacctcgg

SEQ ID NO: 418841 - DNA, 3035 bp, Homo sapiens
aaagtagatgacattccatccacactgtgtgagcaaattggagagattgccttgatagaggactgatgtttttcactgatgagatggtgaccaaaagccagccccactgtgagttgaactctttcgtgttgaccggccactctccgtgctctggatgatgtcggaacacgacctggccgatgtggttcagattgcagtggaagacctgagccctgaccacccagttgttttggagaatcatgtagtgacagatgaagacgaacctgctttgaaacgccagcgactagaaatcaattgccaggatccatctataaagtcattcctgtattccatcaaccagacaatctgcttgcggttggatagcattgaagccaaattgcaagccctggaggctacttgtaaatccttagaagaaaagctggatctggtcacgaacaagcagcacagccccatccaggttcccatggtggccggctcccctctcggggcaacccagacgtgcaacaaagtgcgatgcgtcgtcccccagactacagtaatactcaacaatgatcggcagaacgccattgtagccaagatggaagaccccttgagcaacagggcaccggattccctggaaaatgtcattagcaacgctgtgcctgggcgtcggcagaacaccattgtggtgaaggtgccgggccaagaagacagccaccacgaggacggggagagcggctcggaggccagcgactctgtgtccagctgtgggcaggcgggcagtcagagcatcgggagcaacgtcacgctcatcaccctgaactcggaagaggactaccccaatggcacctggctgggcgacgagaacaaccccgagatgcgggtacgctgcgccatcatcccctccgacatgctgcacatcagcaccaactgccgcacggccgagaagatggcgctaacgctgctggactacctcttccaccgcgaggtgcaggctgtgtccaacctctcggggcagggcaagcacgggaagaagcagctggacccgctcaccatctacggcatccggtgtcaccttttctataaatttggcatcacagaatccgactggtaccgaatcaagcagagcatcgactccaagtgccgcacggcgtggcggcgcaagcagcggggccagagcctggcggtcaagagcttctcgcggagaacgcccaactcgtcctcctactgcccttcagagccgatgatgagcaccccacctcctgccagcgagctcccgcagccacagccgcagccgcaggccctgcactacgcgctggccaacgcacagcaggtgcagatccaccagatcggagaagacggacaggtgcaagtaatcccacagggacacctccacatcgcccaggtgccgcagggggagcaagtccagatcacgcaggacagcgaggagcccgtgttctggtactacgtgaaggaggtcctcaacaagcacgagctgcaagcgcttctactccctgcgccacatcgcctcagacgtgggccggggccgcacctggctgcgctgtgccctcaacgaacactccctggagcgctacctgcacatgctcctggccgaccgctgcaggctcagtactttttatgaagactggtcttttgtgatggatgaagagaggtccagtatgcttcctaccatggcagcaggtccgaactccatactctttgcgattaacattgacaacaaggatttgaacgggcagagtaagtttgctcccaccgtttcagacctcttaaaggagtcaacgcagaatgtgaccttgctgaaggagtccacgcaaggagtgagcagcgtgttcagggagatcacagcctcctctgccatctccatcctcatcaaacctgaacaggagaccgaccccttgcccgtcgtgtccaggaatgtcagtgctgatgccaaatgcaaaaaggagcggaagaagaaaaagcaagtgaccaacattatctcatttgatgatgaggaagatgagcagaactctggggacatgtttaaaaagacacctggggcaggggagagctcagaggacaactccgaccactcctctgtcaatatcatgtccgcctttgaaagccccttcgggccaaactccaatggaagtcagagcagcaactcgtggaaaattgattccctgtctttgaacagggagtttgggtaccagaagcttgatgtgaaaagcatcgatgatgaagatgtgggatgaaaacgaagatgacgtgtatggaaactcatcaggacggaagcacaggggccactcagagtcgcccgagaaaaacggagcacactctgtcacccaggctggagtgcaatggcacgatctcagctcactacaacctctgcctcccgggttcaagtgattctactgcctcagcctcccgtgtagctgggattacaggcgcgcaccaacacacccgactaatttttgtatttttagtaaagacagggtttcaccatgttggccaggctggtcttgcactcctgacctcacgtgatctgccccaccttggcctcccaaagtgctgggattacaggtgtgaaccactgcgcccagccccaagtggctttttcaattacatgagccaacatattctcacaagtccattcgagtttggtgtctgttacttgcaaataagggagttctgattggttcccagtgaaacctcatctgtaagacctctgagccaccagtatccacggggcttgtcctataacagctcctgtgcaatccagtaaccttgaacactggaagccactgagcccttctgtgagtagatgcacacctctgaggctaagattactggtgtactcattgggaccagtttggtctcagtgactgaaaactcaacccaaacttgttcatttggaaaggaaaagtcaaccaggcacagtggctcatgcctgtagttccagcactttgggaggctgaggtggacagatcgcttgagcccaggggttcaagaccaacctgggcaacatagcaaaaccctgcctctacaaaaaaaaa

SEQ ID NO: 418842 - DNA, 3055 bp, Homo sapiens
gcagagcggcggcttctctcgcgaggacggacgccattatcgcatctccccgacaaacaccacgagaattccgcagcccacacggtgaccaaaagccagccccactgtgagttgaactctttcgtgttgaccggccactctccgtgctctggatgatgtcggaacacgacctggccgatgtggttcagattgcagtggaagacctgagccctgaccacccaggtacagagctgtgggacagtagttgttttggagaatcatgtagtgacagatgaagacgaacctgctttgaaacgccagcgactagaaatcaattgccaggatccatctataaagtcattcctgtattccatcaaccagacaatctgcttgcggttggatagcattgaagccaaattgcaagccctggaggctacttgtaaatccttagaagaaaagctggatctggtcacgaacaagcagcacagccccatccaggttcccatggtggccggctcccctctcggggcaacccagacgtgcaacaaagtgcgatgcgtcgtcccccagactacagtaatactcaacaatgatcggcagaacgccattgtagccaagatggaagaccccttgagcaacagggcaccggattccctggaaaatgtcattagcaacgctgtgcctgggcgtcggcagaacaccattgtggtgaaggtgccgggccaagaagacagccaccacgaggacggggagagcggctcggaggccagcgactctgtgtccagctgtgggcaggcgggcagtcagagcatcgggagcaacgtcacgctcatcaccctgaactcggaagaggactaccccaatggcacctggctgggcgacgagaacaaccccgagatgcgggtacgctgcgccatcatcccctccgacatgctgcacatcagcaccaactgccgcacggccgagaagatggcgctaacgctgctggactacctcttccaccgcgaggtgcaggctgtgtccaacctctcggggcagggcaagcacgggaagaagcagctggacccgctcaccatctacggcatccggtgtcaccttttctataaatttggcatcacagaatccgactggtaccgaatcaagcagagcatcgactccaagtgccgcacggcgtggcggcgcaagcagcggggccagagcctggcggtcaagagcttctcgcggagaacgcccaactcgtcctcctactgcccttcagagccgatgatgagcaccccacctcctgccagcgagctcccgcagccacagccgcagccgcaggccctgcactacgcgctggccaacgcacagcaggtgcagatccaccagatcggagaagacggacaggtgcaagtaatcccacagggacacctccacatcgcccaggtgccgcagggggagcaagtccagatcacgcaggacagcgaggagcccgtgttctggtactacgtgaaggaggtcctcaacaagcacgagctgcaagcgcttctactccctgcgccacatcgcctcagacgtgggccggggccgcacctggctgcgctgtgccctcaacgaacactccctggagcgctacctgcacatgctcctggccgaccgctgcaggctcagtactttttatgaagactggtcttttgtgatggatgaagagaggtccagtatgcttcctaccatggcagcaggtccgaactccatactctttgcgattaacattgacaacaaggatttgaacgggcagagtaagtttgctcccaccgtttcagacctcttaaaggagtcaacgcagaatgtgaccttgctgaaggagtccacgcaaggagtgagcagcgtgttcagggagatcacagcctcctctgccatctccatcctcatcaaacctgaacaggagaccgaccccttgcccgtcgtgtccaggaatgtcagtgctgatgccaaatgcaaaaaggagcggaagaagaaaaagcaagtgaccaacattatctcatttgatgatgaggaagatgagcagaactctggggacatgtttaaaaagacacctggggcaggggagagctcagaggacaactccgaccactcctctgtcaatatcatgtccgcctttgaaagccccttcgggccaaactccaatggaagtcagagcagcaactcgtggaaaattgattccctgtctttgaacagggagtttgggtaccagaagcttgatgtgaaaagcatcgatgatgaagatgtgggatgaaaacgaagatgacgtgtatggaaactcatcaggacggaagcacaggggccactcagagtcgcccgagaaaaacggagcacactctgtcacccaggctggagtgcaatggcacgatctcagctcactacaacctctgcctcccgggttcaagtgattctactgcctcagcctcccgtgtagctgggattacaggcgcgcaccaacacacccgactaatttttgtatttttagtaaagacagggtttcaccatgttggccaggctggtcttgcactcctgacctcacgtgatctgccccaccttggcctcccaaagtgctgggattacaggtgtgaaccactgcgcccagccccaagtggctttttcaattacatgagccaacatattctcacaagtccattcgagtttggtgtctgttacttgcaaataagggagttctgattggttcccagtgaaacctcatctgtaagacctctgagccaccagtatccacggggcttgtcctataacagctcctgtgcaatccagtaaccttgaacactggaagccactgagcccttctgtgagtagatgcacacctctgaggctaagattactggtgtactcattgggaccagtttggtctcagtgactgaaaactcaacccaaacttgttcatttggaaaggaaaagtcaaccaggcacagtggctcatgcctgtagttccagcactttgggaggctgaggtggacagatcgcttgagcccaggggttcaagaccaacctgggcaacatagcaaaaccctgcctctacaaaaaaaaa

SEQ ID NO: 418843 - DNA, 3101 bp, Homo sapiens
atgctgtttcgatgttaggtgtaatctgtttttattgttgagaagatttgactagttttatatgtaaatttactgattaataataacatattaaagtacatttttaaaattaaatgggcttaaccaagaattgcaactgcacatagaagtgaaaccatgactaaatcatcacatttgaaacaggacgtgtgacttgtgtgtaaaatgtgaacttgttactcacatgtttctggctcatagctcagaagctagttccagtgtggggattgttctgtctgaatagatagagttgagatcaggaaatagctgtttggtgtttcttggggttgtcttcttacagttcaggagacccttcctaaagccggtcttttctcacttccagtcattcctgtattccatcaaccagacaatctgcttgcggttggatagcattgaagccaaattgcaagccctggaggctacttgtaaatccttagaagaaaagctggatctggtcacgaacaagcagcacagccccatccaggttcccatggtggccggctcccctctcggggcaacccagacgtgcaacaaagtgcgatgcgtcgtcccccagactacagtaatactcaacaatgatcggcagaacgccattgtagccaagatggaagaccccttgagcaacagggcaccggattccctggaaaatgtcattagcaacgctgtgcctgggcgtcggcagaacaccattgtggtgaaggtgccgggccaagaagacagccaccacgaggacggggagagcggctcggaggccagcgactctgtgtccagctgtgggcaggcgggcagtcagagcatcgggagcaacgtcacgctcatcaccctgaactcggaagaggactaccccaatggcacctggctgggcgacgagaacaaccccgagatgcgggtacgctgcgccatcatcccctccgacatgctgcacatcagcaccaactgccgcacggccgagaagatggcgctaacgctgctggactacctcttccaccgcgaggtgcaggctgtgtccaacctctcggggcagggcaagcacgggaagaagcagctggacccgctcaccatctacggcatccggtgtcaccttttctataaatttggcatcacagaatccgactggtaccgaatcaagcagagcatcgactccaagtgccgcacggcgtggcggcgcaagcagcggggccagagcctggcggtcaagagcttctcgcggagaacgcccaactcgtcctcctactgcccttcagagccgatgatgagcaccccacctcctgccagcgagctcccgcagccacagccgcagccgcaggccctgcactacgcgctggccaacgcacagcaggtgcagatccaccagatcggagaagacggacaggtgcaagtaatcccacagggacacctccacatcgcccaggtgccgcagggggagcaagtccagatcacgcaggacagcgaggagcccgtgttctggtactacgtgaaggaggtcctcaacaagcacgagctgcaagcgcttctactccctgcgccacatcgcctcagacgtgggccggggccgcacctggctgcgctgtgccctcaacgaacactccctggagcgctacctgcacatgctcctggccgaccgctgcaggctcagtactttttatgaagactggtcttttgtgatggatgaagagaggtccagtatgcttcctaccatggcagcaggtccgaactccatactctttgcgattaacattgacaacaaggatttgaacgggcagagtaagtttgctcccaccgtttcagacctcttaaaggagtcaacgcagaatgtgaccttgctgaaggagtccacgcaaggagtgagcagcgtgttcagggagatcacagcctcctctgccatctccatcctcatcaaacctgaacaggagaccgaccccttgcccgtcgtgtccaggaatgtcagtgctgatgccaaatgcaaaaaggagcggaagaagaaaaagcaagtgaccaacattatctcatttgatgatgaggaagatgagcagaactctggggacatgtttaaaaagacacctggggcaggggagagctcagaggacaactccgaccactcctctgtcaatatcatgtccgcctttgaaagccccttcgggccaaactccaatggaagtcagagcagcaactcgtggaaaattgattccctgtctttgaacagggagtttgggtaccagaagcttgatgtgaaaagcatcgatgatgaagatgtgggatgaaaacgaagatgacgtgtatggaaactcatcaggacggaagcacaggggccactcagagtcgcccgagaaaaacggagcacactctgtcacccaggctggagtgcaatggcacgatctcagctcactacaacctctgcctcccgggttcaagtgattctactgcctcagcctcccgtgtagctgggattacaggcgcgcaccaacacacccgactaatttttgtatttttagtaaagacagggtttcaccatgttggccaggctggtcttgcactcctgacctcacgtgatctgccccaccttggcctcccaaagtgctgggattacaggtgtgaaccactgcgcccagccccaagtggctttttcaattacatgagccaacatattctcacaagtccattcgagtttggtgtctgttacttgcaaataagggagttctgattggttcccagtgaaacctcatctgtaagacctctgagccaccagtatccacggggcttgtcctataacagctcctgtgcaatccagtaaccttgaacactggaagccactgagcccttctgtgagtagatgcacacctctgaggctaagattactggtgtactcattgggaccagtttggtctcagtgactgaaaactcaacccaaacttgttcatttggaaaggaaaagtcaaccaggcacagtggctcatgcctgtagttccagcactttgggaggctgaggtggacagatcgcttgagcccaggggttcaagaccaacctgggcaacatagcaaaaccctgcctctacaaaaaaaaa

SEQ ID NO: 418844 - DNA, 2601 bp, Homo sapiens
gcagagcggcggcttctctcgcgaggacggacgccattatcgcatctccccgacaaacaccacgagaattccgcagcccacacttgttttggagaatcatgtagtgacagatgaagacgaacctgctttgaaacgccagcgactagaaatcaattgccaggatccatctataaagtcattcctgtattccatcaaccagacaatctgcttgcggttggatagcattgaagccaaattgcaagccctggaggctacttgtaaatccttagaagaaaagctggatctggtcacgaacaagcagcacagccccatccaggttcccatggtggccggctcccctctcggggcaacccagacgtgcaacaaagtgcgatgaggactaccccaatggcacctggctgggcgacgagaacaaccccgagatgcgggtacgctgcgccatcatcccctccgacatgctgcacatcagcaccaactgccgcacggccgagaagatggcgctaacgctgctggactacctcttccaccgcgaggtgcaggctgtgtccaacctctcggggcagggcaagcacgggaagaagcagctggacccgctcaccatctacggcatccggtgtcaccttttctataaatttggcatcacagaatccgactggtaccgaatcaagcagagcatcgactccaagtgccgcacggcgtggcggcgcaagcagcggggccagagcctggcggtcaagagcttctcgcggagaacgcccaactcgtcctcctactgcccttcagagccgatgatgagcaccccacctcctgccagcgagctcccgcagccacagccgcagccgcaggccctgcactacgcgctggccaacgcacagcaggtgcagatccaccagatcggagaagacggacaggtgcaagtaatcccacagggacacctccacatcgcccaggtgccgcagggggagcaagtccagatcacgcaggacagcgaggagcccgtgttctggtactacgtgaaggaggtcctcaacaagcacgagctgcaagcgcttctactccctgcgccacatcgcctcagacgtgggccggggccgcacctggctgcgctgtgccctcaacgaacactccctggagcgctacctgcacatgctcctggccgaccgctgcaggctcagtactttttatgaagactggtcttttgtgatggatgaagagaggtccagtatgcttcctaccatggcagcaggtccgaactccatactctttgcgattaacattgacaacaaggatttgaacgggcagagtaagtttgctcccaccgtttcagacctcttaaaggagtcaacgcagaatgtgaccttgctgaaggagtccacgcaaggagtgagcagcgtgttcagggagatcacagcctcctctgccatctccatcctcatcaaacctgaacaggagaccgaccccttgcccgtcgtgtccaggaatgtcagtgctgatgccaaatgcaaaaaggagcggaagaagaaaaagcaagtgaccaacattatctcatttgatgatgaggaagatgagcagaactctggggacatgtttaaaaagacacctggggcaggggagagctcagaggacaactccgaccactcctctgtcaatatcatgtccgcctttgaaagccccttcgggccaaactccaatggaagtcagagcagcaactcgtggaaaattgattccctgtctttgaacagggagtttgggtaccagaagcttgatgtgaaaagcatcgatgatgaagatgtgggatgaaaacgaagatgacgtgtatggaaactcatcaggacggaagcacaggggccactcagagtcgcccgagaaaaacggagcacactctgtcacccaggctggagtgcaatggcacgatctcagctcactacaacctctgcctcccgggttcaagtgattctactgcctcagcctcccgtgtagctgggattacaggcgcgcaccaacacacccgactaatttttgtatttttagtaaagacagggtttcaccatgttggccaggctggtcttgcactcctgacctcacgtgatctgccccaccttggcctcccaaagtgctgggattacaggtgtgaaccactgcgcccagccccaagtggctttttcaattacatgagccaacatattctcacaagtccattcgagtttggtgtctgttacttgcaaataagggagttctgattggttcccagtgaaacctcatctgtaagacctctgagccaccagtatccacggggcttgtcctataacagctcctgtgcaatccagtaaccttgaacactggaagccactgagcccttctgtgagtagatgcacacctctgaggctaagattactggtgtactcattgggaccagtttggtctcagtgactgaaaactcaacccaaacttgttcatttggaaaggaaaagtcaaccaggcacagtggctcatgcctgtagttccagcactttgggaggctgaggtggacagatcgcttgagcccaggggttcaagaccaacctgggcaacatagcaaaaccctgcctctacaaaaaaaaa

SEQ ID NO: 418845 - DNA, 1972 bp, Homo sapiens
tgttttgttttgtttttagagacagggccttgctctgttaactaggctggagtgcagtggtgcaatcatagctcattacagcctcaaactcctggggtccagccatcctcctgcctccgcctcccaactactcatgagcctgaaatgggaagatcgcttgagcccaggagttcaagactgcagtgaactatgatcgtgccactgtgctctagcctgggtgacagagtgagaccttgtccccaccccacccctcaaaaacaaaacaaaacaaaaaaaacccaaacaaggaaaaggaatgctgtttggtgcacgtgtagtagtgatattaatagttggttttcattgagcaccaattatatgccagagcccgtgttctggtactacgtgaaggaggtcctcaacaagcacgagctgcaagcgcttctactccctgcgccacatcgcctcagacgtgggccggggccgcacctggctgcgctgtgccctcaacgaacactccctggagcgctacctgcacatgctcctggccgaccgctgcaggctcagtactttttatgaagactggtcttttgtgatggatgaagagaggtccagtatgcttcctaccatggcagcaggtccgaactccatactctttgcgattaacattgacaacaaggatttgaacgggcagagtaagtttgctcccaccgtttcagacctcttaaaggagtcaacgcagaatgtgaccttgctgaaggagtccacgcaaggagtgagcagcgtgttcagggagatcacagcctcctctgccatctccatcctcatcaaacctgaacaggagaccgaccccttgcccgtcgtgtccaggaatgtcagtgctgatgccaaatgcaaaaaggagcggaagaagaaaaagcaagtgaccaacattatctcatttgatgatgaggaagatgagcagaactctggggacatgtttaaaaagacacctggggcaggggagagctcagaggacaactccgaccactcctctgtcaatatcatgtccgcctttgaaagccccttcgggccaaactccaatggaagtcagagcagcaactcgtggaaaattgattccctgtctttgaacagggagtttgggtaccagaagcttgatgtgaaaagcatcgatgatgaagatgtgggatgaaaacgaagatgacgtgtatggaaactcatcaggacggaagcacaggggccactcagagtcgcccgagaaaaacggagcacactctgtcacccaggctggagtgcaatggcacgatctcagctcactacaacctctgcctcccgggttcaagtgattctactgcctcagcctcccgtgtagctgggattacaggcgcgcaccaacacacccgactaatttttgtatttttagtaaagacagggtttcaccatgttggccaggctggtcttgcactcctgacctcacgtgatctgccccaccttggcctcccaaagtgctgggattacaggtgtgaaccactgcgcccagccccaagtggctttttcaattacatgagccaacatattctcacaagtccattcgagtttggtgtctgttacttgcaaataagggagttctgattggttcccagtgaaacctcatctgtaagacctctgagccaccagtatccacggggcttgtcctataacagctcctgtgcaatccagtaaccttgaacactggaagccactgagcccttctgtgagtagatgcacacctctgaggctaagattactggtgtactcattgggaccagtttggtctcagtgactgaaaactcaacccaaacttgttcatttggaaaggaaaagtcaaccaggcacagtggctcatgcctgtagttccagcactttgggaggctgaggtggacagatcgcttgagcccaggggttcaagaccaacctgggcaacatagcaaaaccctgcctctacaaaaaaaaa

SEQ ID NO: 418846 - DNA, 2137 bp, Homo sapiens
  misc_feature (1396)..(1396): n is a, c, g, or t
gcagagcggcggcttctctcgcgaggacggacgccattatcgcatctccccgacaaacaccacgagaattccgcagcccacacggtgaccaaaagccagccccactgtgagttgaactctttcgtgttgaccggccactctccgtgctctggatgatgtcggaacacgacctggccgatgtggttcagattgcagtggaagacctgagccctgaccacccagttgttttggagaatcatgtagtgacagatgaagacgaacctgctttgaaacgccagcgactagaaatcaattgccaggatccatctataaagtcattcctgtattccatcaaccagacaatctgcttgcggttggatagcattgaagccaaattgcaagccctggaggctacttgtaaatccttagaagaaaagctggatctggtcacgaacaagcagcacagccccatccaggttcccatggtggccggctcccctctcggggcaacccagacgtgcaacaaagtgcgatggctgtgcctgggcgtcggcagaacaccattgtggtgaaggtgccgggccaagaagacagccaccacgaggacggggagagcggctcggaggccagcgactctgtgtccagctgtgggcaggcgggcagtcagagcatcgggagcaacgtcacgctcatcaccctgaactcggaagaggactaccccaatggcacctggctgggcgacgagaacaaccccgagatgcgggtacgctgcgccatcatcccctccgacatgctgcacatcagcaccaactgccgcacggccgagaagatggcgctaacgctgctggactacctcttccaccgcgaggtgcaggctgtgtccaacctctcggggcagggcaagcacgggaagaagcagctggacccgctcaccatctacggcatccggtgtcaccttttctataaatttggcatcacagaatccgactggtaccgaatcaagcagagcatcgactccaagtgccgcacggcgtggcggcgcaagcagcggggccagagcctggcggtcaagagcttctcgcggagaacgcccaactcgtcctcctactgcccttcagagccgatgatgagcaccccacctcctgccagcgagctcccgcagccacagccgcagccgcaggccctgcactacgcgctggccaacgcacagcaggtgcagatccaccagatcggagaagacggacaggtgcaagtaatcccacagggacacctccacatcgcccaggtgccgcagggggagcaagtccagatcacgcaggacagcgagggcaacctccagatccatcacgtggggcaggacggtcaggtgctgcagggtgcacagctgatcgccgtggcctcctcggaccccgcggcngcgggcgtggatgggtcgccactccagggcagcgacatccaggttcagtacgtgcagctggcgccagtgagtgaccacacggccggggcacagacggccgaagccctgcagcccacgctacagccggagatgcagctcgagcacggggccatccagattcagtgagcggtgcccatggcaccaggagcccctcgccggctccgcctacggcccggcccccacgcgccctgctctcacggcctcggcacaggcagcggctgcacgtgttctgctgaagtgcgtctgaaggccgctgcctccgcggggaacagcatcctatcaactgaaagagcagccgccgccgcccccagccggagacccctttcgtttgagtcctgctgttggtgtcggagcacgaggggaggcacggtgcggagagcgtcgcatatgcgcgggaaatcaagaactatgatatttttctgtttaaacagctttttttaatttgctatggtgtttataacaaaaaagaaaatttgaaaaaaaaaatcccaggggagtagcaggagccctttgctgtgtgctctgtccagtgtcatgagacgggagccctttgctgtgtgctctgtccagtgtcatgaggcaggtgtttgcaaagccagctctcggttccgatggggtattgctgacctacttttctaggggaaatgctcttaaacactgtaattatgcatttctaatgaaataaaatgtatttatgaccac

SEQ ID NO: 418847 - DNA, 774 bp, Homo sapiens
ggttcaatcttctgtttgtaaccagaagctttaaaccagcagagacctcagacaaatcatatccctcctggggtgaccaggtgcagatcttccagggagccgtctaatggaatttcctggttaatggacacagagaaccactgctaagaacgatttccttttctctttcaatctgcagtactttttatgaagactggtcttttgtgatggatgaagagaggtccagtatgcttcctaccatggcagcaggtccgaactccatactctttgcgattaacattgacaacaaggatttgaacgggcagagtaagtttgctcccaccgtttcagacctcttaaaggagtcaacgcagaatgtgaccttgctgaaggagtccacgcaaggagtgagcagcgtgttcagggagatcacagcctcctctgccatctccatcctcatcaaacctgaacaggagaccgaccccttgcccgtcgtgtccaggaatgtcagtgctgatgccaaatgcaaaaaggagcggaagaagaaaaagcaagtgaccaacattatctcatttgatgatgaggaagatgagcagaactctggggacatgtttaaaaagacacctggggcaggggagagctcagaggacaactccgaccactcctctgtcaatatcatgtccgcctttgaaagccccttcgggccaaactccaatggaagtcagagcagctactcgggaggctgaggcagaagaatggcgtgaacccaggaggcagagcttgcagtgagctgag

SEQ ID NO: 418848 - DNA, 1604 bp, Homo sapiens
ggttcaatcttctgtttgtaaccagaagctttaaaccagcagagacctcagacaaatcatatccctcctggggtgaccaggtgcagatcttccagggagccgtctaatggaatttcctggttaatggacacagagaaccactgctaagaacgatttccttttctctttcaatctgcagtactttttatgaagactggtcttttgtgatggatgaagagaggtccagtatgcttcctaccatggcagcaggtccgaactccatactctttgcgattaacattgacaacaaggatttgaacgggcagagtaagtttgctcccaccgtttcagacctcttaaaggagtcaacgcagaatgtgaccttgctgaaggagtccacgcaaggagtgagcagcgtgttcagggagatcacagcctcctctgccatctccatcctcatcaaacctgaacaggagaccgaccccttgcccgtcgtgtccaggaatgtcagtgctgatgccaaatgcaaaaaggagcggaagaagaaaaagcaagtgaccaacattatctcatttgatgatgaggaagatgagcagaactctggggacatgtttaaaaagacacctggggcaggggagagctcagaggacaactccgaccactcctctgtcaatatcatgtccgcctttgaaagccccttcgggccaaactccaatggaagtcagagcagcaactcgtggaaaattgattccctgtctttgaacagggagtttgggtaccagaagcttgatgtgaaaagcatcgatgatgaagatgtgggatgaaaacgaagatgacgtgtatggaaactcatcaggacggaagcacaggggccactcagagtcgcccgagaaaaacggagcacactctgtcacccaggctggagtgcaatggcacgatctcagctcactacaacctctgcctcccgggttcaagtgattctactgcctcagcctcccgtgtagctgggattacaggcgcgcaccaacacacccgactaatttttgtatttttagtaaagacagggtttcaccatgttggccaggctggtcttgcactcctgacctcacgtgatctgccccaccttggcctcccaaagtgctgggattacaggtgtgaaccactgcgcccagccccaagtggctttttcaattacatgagccaacatattctcacaagtccattcgagtttggtgtctgttacttgcaaataagggagttctgattggttcccagtgaaacctcatctgtaagacctctgagccaccagtatccacggggcttgtcctataacagctcctgtgcaatccagtaaccttgaacactggaagccactgagcccttctgtgagtagatgcacacctctgaggctaagattactggtgtactcattgggaccagtttggtctcagtgactgaaaactcaacccaaacttgttcatttggaaaggaaaagtcaaccaggcacagtggctcatgcctgtagttccagcactttgggaggctgaggtggacagatcgcttgagcccaggggttcaagaccaacctgggcaacatagcaaaaccctgcctctacaaaaaaaaa

SEQ ID NO: 418849 - DNA, 3033 bp, Homo sapiens
gcagagcggcggcttctctcgcgaggacggacgccattatcgcatctccccgacaaacaccacgagaattccgcagcccacacggtgaccaaaagccagccccactgtgagttgaactctttcgtgttgaccggccactctccgtgctctggatgatgtcggaacacgacctggccgatgtggttcagattgcagtggaagacctgagccctgaccacccagttgttttggagaatcatgtagtgacagatgaagacgaacctgctttgaaacgccagcgactagaaatcaattgccaggatccatctataaagtcattcctgtattccatcaaccagacaatctgcttgcggttggatagcattgaagccaaattgcaagccctggaggctacttgtaaatccttagaagaaaagctggatctggtcacgaacaagcagcacagccccatccaggttcccatggtggccggctcccctctcggggcaacccagacgtgcaacaaagtgcgatgcgtcgtcccccagactacagtaatactcaacaatgatcggcagaacgccattgtagccaagatggaagaccccttgagcaacagggcaccggattccctggaaaatgtcattagcaacgctgtgcctgggcgtcggcagaacaccattgtggtgaaggtgccgggccaagaagacagccaccacgaggacggggagagcggctcggaggccagcgactctgtgtccagctgtgggcaggcgggcagtcagagcatcgggagcaacgtcacgctcatcaccctgaactcggaagaggactaccccaatggcacctggctgggcgacgagaacaaccccgagatgcgggtacgctgcgccatcatcccctccgacatgctgcacatcagcaccaactgccgcacggccgagaagatggcgctaacgctgctggactacctcttccaccgcgaggtgcaggctgtgtccaacctctcggggcagggcaagcacgggaagaagcagctggacccgctcaccatctacggcatccggtgtcaccttttctataaatttggcatcacagaatccgactggtaccgaatcaagcagagcatcgactccaagtgccgcacggcgtggcggcgcaagcagcggggccagagcctggcggtcaagagcttctcgcggagaacgcccaactcgtcctcctactgcccttcagagccgatgatgagcaccccacctcctgccagcgagctcccgcagccacagccgcagccgcaggccctgcactacgcgctggccaacgcacagcaggtgcagatccaccagatcggagaagacggacaggtgcaagtaatcccacagggacacctccacatcgcccaggtgccgcagggggagcaagtccagatcacgcaggacagcgaggagcccgtgttctggtactacgtgaaggaggtcctcaacaagcacgagctgcaagcgcttctactccctgcgccacatcgcctcagacgtgggccggggccgcacctggctgcgctgtgccctcaacgaacactccctggagcgctacctgcacatgctcctggccgaccgctgcaggctcagtactttttatgaagactggtcttttgtgatggatgaagagaggtccagtatgcttcctaccatggcagcaggtccgaactccatactctttgcgattaacattgacaacaaggatttgaacgggcagagtaagtttgctcccaccgtttcagacctcttaaaggagtcaacgcagaatgtgaccttgctgaaggagtccacgcaaggagtgagcagcgtgttcagggagatcacagcctcctctgccatctccatcctcatcaaacctgaacaggagaccgaccccttgcccgtcgtgtccaggaatgtcagtgctgatgccaaatgcaaaaaggagcggaagaagaaaaagcaagtgaccaacattatctcatttgatgatgaggaagatgagcagaactctggggacatgtttaaaaagacacctggggcaggggagagctcagaggacaactccgaccactcctctgtcaatatcatgtccgcctttgaaagccccttcgggccaaactccaatggaagtcagagcagcaactcgtggaaaattgattccctgtctttgaacagggagtttgggtaccagaagcttgatgtgaaaagcatcgatgatgaagatgtgggatgaaaacgaagatgacgtgtatggaaactcatcaggacggaagcacaggggccactcagagtcgcccgagaaaaacggagcacactctgtcacccaggctggagtgcaatggcacgatctcagctcactacaacctctgcctcccgggttcaagtgattctactgcctcagcctcccgtgtagctgggattacaggcgcgcaccaacacacccgactaatttttgtatttttagtaaagacagggtttcaccatgttggccaggctggtcttgcactcctgacctcacgtgatctgccccaccttggcctcccaaagtgctgggattacaggtgtgaaccactgcgcccagccccaagtggctttttcaattacatgagccaacatattctcacaagtccattcgagtttggtgtctgttacttgcaaataagggagttctgattggttcccagtgaaacctcatctgtaagacctctgagccaccagtatccacggggcttgtcctataacagctcctgtgcaatccagtaaccttgaacactggaagccactgagcccttctgtgagtagatgcacacctctgaggctaagattactggtgtactcattgggaccagtttggtctcagtgactgaaaactcaacccaaacttgttcatttggaaaggaaaagtcaaccaggcacagtggctcatgcctgtagttccagcactttgggaggctgaggtggacagatcgcttgagcccaggggttcaagaccaacctgggcaacatagcaaaaccctgcctctacaaaaaaaaa

SEQ ID NO: 418850 - DNA, 3104 bp, Homo sapiens
catgctggccaggctggtcttgaacccctgacctcagttgatccgcccgccttggcctcccaaagtgctgggattacaggcgtgagccaccgtgcccggccgccatcacttatttatattatgtgttacctataggacttatctaagaccataatcactgccgcgtgtgctaagtcccgcgcgcgtgcactcaggcccctctggatagacactggggacccctgaccacttatgtcagggaaaacgccaccaagcgctccggaacctcagggcaggacccgccgcagcagcagttgttttggagaatcatgtagtgacagatgaagacgaacctgctttgaaacgccagcgactagaaatcaattgccaggatccatctataaagtcattcctgtattccatcaaccagacaatctgcttgcggttggatagcattgaagccaaattgcaagccctggaggctacttgtaaatccttagaagaaaagctggatctggtcacgaacaagcagcacagccccatccaggttcccatggtggccggctcccctctcggggcaacccagacgtgcaacaaagtgcgatgcgtcgtcccccagactacagtaatactcaacaatgatcggcagaacgccattgtagccaagatggaagaccccttgagcaacagggcaccggattccctggaaaatgtcattagcaacgctgtgcctgggcgtcggcagaacaccattgtggtgaaggtgccgggccaagaagacagccaccacgaggacggggagagcggctcggaggccagcgactctgtgtccagctgtgggcaggcgggcagtcagagcatcgggagcaacgtcacgctcatcaccctgaactcggaagaggactaccccaatggcacctggctgggcgacgagaacaaccccgagatgcgggtacgctgcgccatcatcccctccgacatgctgcacatcagcaccaactgccgcacggccgagaagatggcgctaacgctgctggactacctcttccaccgcgaggtgcaggctgtgtccaacctctcggggcagggcaagcacgggaagaagcagctggacccgctcaccatctacggcatccggtgtcaccttttctataaatttggcatcacagaatccgactggtaccgaatcaagcagagcatcgactccaagtgccgcacggcgtggcggcgcaagcagcggggccagagcctggcggtcaagagcttctcgcggagaacgcccaactcgtcctcctactgcccttcagagccgatgatgagcaccccacctcctgccagcgagctcccgcagccacagccgcagccgcaggccctgcactacgcgctggccaacgcacagcaggtgcagatccaccagatcggagaagacggacaggtgcaagtaatcccacagggacacctccacatcgcccaggtgccgcagggggagcaagtccagatcacgcaggacagcgaggagcccgtgttctggtactacgtgaaggaggtcctcaacaagcacgagctgcaagcgcttctactccctgcgccacatcgcctcagacgtgggccggggccgcacctggctgcgctgtgccctcaacgaacactccctggagcgctacctgcacatgctcctggccgaccgctgcaggctcagtactttttatgaagactggtcttttgtgatggatgaagagaggtccagtatgcttcctaccatggcagcaggtccgaactccatactctttgcgattaacattgacaacaaggatttgaacgggcagagtaagtttgctcccaccgtttcagacctcttaaaggagtcaacgcagaatgtgaccttgctgaaggagtccacgcaaggagtgagcagcgtgttcagggagatcacagcctcctctgccatctccatcctcatcaaacctgaacaggagaccgaccccttgcccgtcgtgtccaggaatgtcagtgctgatgccaaatgcaaaaaggagcggaagaagaaaaagcaagtgaccaacattatctcatttgatgatgaggaagatgagcagaactctggggacatgtttaaaaagacacctggggcaggggagagctcagaggacaactccgaccactcctctgtcaatatcatgtccgcctttgaaagccccttcgggccaaactccaatggaagtcagagcagcaactcgtggaaaattgattccctgtctttgaacagggagtttgggtaccagaagcttgatgtgaaaagcatcgatgatgaagatgtgggatgaaaacgaagatgacgtgtatggaaactcatcaggacggaagcacaggggccactcagagtcgcccgagaaaaacggagcacactctgtcacccaggctggagtgcaatggcacgatctcagctcactacaacctctgcctcccgggttcaagtgattctactgcctcagcctcccgtgtagctgggattacaggcgcgcaccaacacacccgactaatttttgtatttttagtaaagacagggtttcaccatgttggccaggctggtcttgcactcctgacctcacgtgatctgccccaccttggcctcccaaagtgctgggattacaggtgtgaaccactgcgcccagccccaagtggctttttcaattacatgagccaacatattctcacaagtccattcgagtttggtgtctgttacttgcaaataagggagttctgattggttcccagtgaaacctcatctgtaagacctctgagccaccagtatccacggggcttgtcctataacagctcctgtgcaatccagtaaccttgaacactggaagccactgagcccttctgtgagtagatgcacacctctgaggctaagattactggtgtactcattgggaccagtttggtctcagtgactgaaaactcaacccaaacttgttcatttggaaaggaaaagtcaaccaggcacagtggctcatgcctgtagttccagcactttgggaggctgaggtggacagatcgcttgagcccaggggttcaagaccaacctgggcaacatagcaaaaccctgcctctacaaaaaaaaa

SEQ ID NO: 418851 - DNA, 3115 bp, Homo sapiens
gcagagcggcggcttctctcgcgaggacggacgccattatcgcatctccccgacaaacaccacgagaattccgcagcccacacggtgaccaaaagccagccccactgtgagttgaactctttcgtgttgaccggccactctccgtgctctggatgatgtcggaacacgacctggccgatgtggttcagattgcagtggaagacctgagccctgaccacccagttgttttggagaatcatgtagtgacagatgaagacgaacctgctttgaaacgccagcgactagaaatcaattgccaggatccatctataaagtcattcctgtattccatcaaccagacaatctgcttgcggttggatagcattgaagccaaattgcaagccctggaggctacttgtaaatccttagaagaaaagctggatctggtcacgaacaagcagcacagccccatccaggttcccatggtggccggctcccctctcggggcaacccagacgtgcaacaaagtgcgatgccttccacaacaaagcggaccttagatatcccttgtgaccagaaagtgctaaggcttaaaaacgcatgatggaaaactgtggcgtcgtcccccagactacagtaatactcaacaatgatcggcagaacgccattgtagccaagatggaagaccccttgagcaacagggcaccggattccctggaaaatgtcattagcaacgctgtgcctgggcgtcggcagaacaccattgtggtgaaggtgccgggccaagaagacagccaccacgaggacggggagagcggctcggaggccagcgactctgtgtccagctgtgggcaggcgggcagtcagagcatcgggagcaacgtcacgctcatcaccctgaactcggaagaggactaccccaatggcacctggctgggcgacgagaacaaccccgagatgcgggtacgctgcgccatcatcccctccgacatgctgcacatcagcaccaactgccgcacggccgagaagatggcgctaacgctgctggactacctcttccaccgcgaggtgcaggctgtgtccaacctctcggggcagggcaagcacgggaagaagcagctggacccgctcaccatctacggcatccggtgtcaccttttctataaatttggcatcacagaatccgactggtaccgaatcaagcagagcatcgactccaagtgccgcacggcgtggcggcgcaagcagcggggccagagcctggcggtcaagagcttctcgcggagaacgcccaactcgtcctcctactgcccttcagagccgatgatgagcaccccacctcctgccagcgagctcccgcagccacagccgcagccgcaggccctgcactacgcgctggccaacgcacagcaggtgcagatccaccagatcggagaagacggacaggtgcaagtaatcccacagggacacctccacatcgcccaggtgccgcagggggagcaagtccagatcacgcaggacagcgaggagcccgtgttctggtactacgtgaaggaggtcctcaacaagcacgagctgcaagcgcttctactccctgcgccacatcgcctcagacgtgggccggggccgcacctggctgcgctgtgccctcaacgaacactccctggagcgctacctgcacatgctcctggccgaccgctgcaggctcagtactttttatgaagactggtcttttgtgatggatgaagagaggtccagtatgcttcctaccatggcagcaggtccgaactccatactctttgcgattaacattgacaacaaggatttgaacgggcagagtaagtttgctcccaccgtttcagacctcttaaaggagtcaacgcagaatgtgaccttgctgaaggagtccacgcaaggagtgagcagcgtgttcagggagatcacagcctcctctgccatctccatcctcatcaaacctgaacaggagaccgaccccttgcccgtcgtgtccaggaatgtcagtgctgatgccaaatgcaaaaaggagcggaagaagaaaaagcaagtgaccaacattatctcatttgatgatgaggaagatgagcagaactctggggacatgtttaaaaagacacctggggcaggggagagctcagaggacaactccgaccactcctctgtcaatatcatgtccgcctttgaaagccccttcgggccaaactccaatggaagtcagagcagcaactcgtggaaaattgattccctgtctttgaacagggagtttgggtaccagaagcttgatgtgaaaagcatcgatgatgaagatgtgggatgaaaacgaagatgacgtgtatggaaactcatcaggacggaagcacaggggccactcagagtcgcccgagaaaaacggagcacactctgtcacccaggctggagtgcaatggcacgatctcagctcactacaacctctgcctcccgggttcaagtgattctactgcctcagcctcccgtgtagctgggattacaggcgcgcaccaacacacccgactaatttttgtatttttagtaaagacagggtttcaccatgttggccaggctggtcttgcactcctgacctcacgtgatctgccccaccttggcctcccaaagtgctgggattacaggtgtgaaccactgcgcccagccccaagtggctttttcaattacatgagccaacatattctcacaagtccattcgagtttggtgtctgttacttgcaaataagggagttctgattggttcccagtgaaacctcatctgtaagacctctgagccaccagtatccacggggcttgtcctataacagctcctgtgcaatccagtaaccttgaacactggaagccactgagcccttctgtgagtagatgcacacctctgaggctaagattactggtgtactcattgggaccagtttggtctcagtgactgaaaactcaacccaaacttgttcatttggaaaggaaaagtcaaccaggcacagtggctcatgcctgtagttccagcactttgggaggctgaggtggacagatcgcttgagcccaggggttcaagaccaacctgggcaacatagcaaaaccctgcctctacaaaaaaaaa

SEQ ID NO: 418852 - DNA, 656 bp, Homo sapiens
  misc_feature (608)..(608): n is a, c, g, or t
gcagagcggcggcttctctcgcgaggacggacgccattatcgcatctccccgacaaacaccacgagaattccgcagcccacacggtgaccaaaagccagccccactgtgagttgaactctttcgtgttgaccggccactctccgtgctctggatgatgtcggaacacgacctggccgatgtggttcagattgcagtggaagacctgagccctgaccacccaggtacagagctgtgggacagtagttgttttggagaatcatgtagtgacagatgaagacgaacctgctttgaaacgccagcgactagaaatcaattgccaggatccatctataaagtcattcctgtattccatcaaccagacaatctgcttgcggttggatagcattgaagccaaattgcaagccctggaggctacttgtaaatccttagaagaaaagctggatctggtcacgaacaagcagcacagccccatccaggttcccatggtggccggctcccctctcggggcaacccagacgtgcaacaaagtgcgatggcgctaccgttttggaatgataccaacacttacgtggttacgaacgttagatctgtcccataggaatgagtngggatggagtgactgaaaatgtcaagccagttctcatgcaagtgtgcc

SEQ ID NO: 418853 - DNA, 1328 bp, Homo sapiens
agtaaaatcaaattctttaaactttcttctattccaatattccttatcccaagttaaggagcgttaccaactatattttgataataaaaatgtaaactgagttgtggcaatgattaatatcaattagagaatattttcacaataaatttgtgtcattgagattgacattgcctggactattccacatattttgttttggaatgcagttaagattgggacttatacactgtagggtagaatgagtaacagtacccccggttcccttgtattgacaagtccacgacctggttcttgctgatattttcaatttattactgcagtagataattgctctgaaagtgcaacactaaatcactcttgtcatagcctctgctccgtttccactggcaaatacttggaaattcattcttcgagcattgtggaccacaagcttctctctgggtggaaaattattgccactgccagtatcatagggaacacacacacacacacacacacacacgaacagaaggattcaaaaagcagacactggagaggagtaggggccaatttcaaacagaaaacccagtaaagggctggagaggacacctcccttttggcccctgtactccccgttctttcagaaaaaaagcatccccaaaacagtggtaattagagggtgttcaggaatggaaaagtaggaagagtgtagtacaaatacaataaggaaatgcctgttactctcatatgatttctctgagaccaggtggccaaggatcccctagtcttccacatatgttttaaagagaggccttaatttaaggtactgcagtctttgctcacaagagccaagtaagacggtgctacttggaggttgctataggactctgacgctatttatttgaatcctaggtgctcttgtgacttctctgacttcagtccttctggagtcagatcacccagcttctctgatgagtgactggtcatttttaaagcatgcctgcagcagtcttcaagaggtttctgcctgggcatcacgatcagcacacatttgctcatacacataccaggtgatgaggactcaaccactgcagacaggcagagccatgcaaataaagccatccagcaaggtcaccttttcctcagatgccccagtttcaggatgatagaatttgcatattaagtgttaataggcctggcaataaccagcttttgcttcccttcctcaatgagggacatgccagaaacagacttgcacacaggctctgctcatatgggaaacaggcctgacacacagggtctgctcatatgggaaaatgatttcagtcacagtccttagctccaaattc

SEQ ID NO: 418854 - DNA, 953 bp, Homo sapiens
ctggtgagctttacatgtcctcatttttgagagagggtaacagcttccaattaattacatctccttgggcacaaagaattgcttttgtggtgggacagaagttcaaaggtgtagaaggctgtgtgcagatgctgagtggctaacaggggctgtgccagttaggaagctcgtctctcagttccacacccgctctttttagctctgcttttgtgataccagcgacagaactctgcaaacatctctgcttcgcagctggcatcctgttggatttttccagtagagggaagcttccatgctgcaggaagaaggggcgtgctccttcccgttcctgtcagcactgctgcagcagtttgctctcacagctgcatgtgatcccagctgccatttctgacctgctcagaaccagcttcatgatgggctcaaagacccaggaccaggtgctcttgtgacttctctgacttcagtccttctggagtcagatcacccagcttctctgatgagtgactggtcatttttaaagcatgcctgcagcagtcttcaagaggtttctgcctgggcatcacgatcagcacacatttgctcatacacataccagctctggcatgtacacgtggccacggtacccttcgtacaacacgggaagagaacaacaggacgcccaagaggcatctggacagcacacagcaaacagaaaggctgaacgcccccccatggaaccccattaaaaaacaatgtttgtctattacaaagtcacgttttccgtttttccgctttataaagtcagcgatgctggagggtgtctagcggaatccgtcctccaggaatgagtgcaaaaggagagcgcacggctcagggacgtcccttcagtgagcaatggaaggactggctggaggcctcccatccatttcggacaaacacacacatacagaaaaggattattgccagcttgtgta

SEQ ID NO: 418855 - DNA, 795 bp, Homo sapiens
ctggtgagctttacatgtcctcatttttgagagagggtaacagcttccaattaattacatctccttgggcacaaagaattgcttttgtggtgggacagaagttcaaaggtgtagaaggctgtgtgcagatgctgagtggctaacaggggctgtgccagttaggaagctcgtctctcagttccacacccgctctttttagctctgcttttgtgataccagcgacagaactctgcaaacatctctgcttcgcagctggcatcctgttggatttttccagtagagggaagcttccatgctgcaggaagaaggggcgtgctccttcccgttcctgtcagcactgctgcagcagtttgctctcacagctgcatgtgatcccagctgccatttctgacctgctcagaaccagcttcatgatgggctcaaagacccaggaccagctctggcatgtacacgtggccacggtacccttcgtacaacacgggaagagaacaacaggacgcccaagaggcatctggacagcacacagcaaacagaaaggctgaacgcccccccatggaaccccattaaaaaacaatgtttgtctattacaaagtcacgttttccgtttttccgctttataaagtcagcgatgctggagggtgtctagcggaatccgtcctccaggaatgagtgcaaaaggagagcgcacggctcagggacgtcccttcagtgagcaatggaaggactggctggaggcctcccatccatttcggacaaacacacacatacagaaaaggattattgccagcttgtgta

SEQ ID NO: 418856 - DNA, 742 bp, Homo sapiens
agtaaaatcaaattctttaaactttcttctattccaatattccttatcccaagttaaggagcgttaccaactatattttgataataaaaatgtaaactgagttgtggcaatgattaatatcaattagagaatattttcacaataaatttgtgtcattgagattgacattgcctggactattccacatattttgttttggaatgcagttaagattgggacttatacactgtagggtagaatgagtaacagtacccccggttcccttgtattgacaagtccacgacctggttcttgctgatattttcaatttattactgcagtagataattgctctgaaagtgcaacactaaatcactcttgtcatagcctctgctccgtttccactggcaaatacttggaaattcattcttcgagcattgtggaccacaagcttctctctgggtggaaaattattgccactgccagtatcatagggaacacaaacacacctagccaggaggcctgaccactcactcactcctaagcacactctacacatacacactgactttcccacacacacaacagtcaggtagatgcccaaaggagggcaaatccaaatatctgctctctttggaattttcacggcaaatctgaatttaggcaaaagtgaagacctccctggggtcttcaaagacagcctttgctctccatgtagccaatggtgctcttatatttgccgagcccttcacaactgtctgga

SEQ ID NO: 418857 - DNA, 667 bp, Homo sapiens
agtaaaatcaaattctttaaactttcttctattccaatattccttatcccaagttaaggagcgttaccaactatattttgataataaaaatgtaaactgagttgtggcaatgattaatatcaattagagaatattttcacaataaatttgtgtcattgagattgacattgcctggactattccacatattttgttttggaatgcagttaagattgggacttatacactgtagggtagaatgagtaacagtacccccggttcccttgtattgacaagtccacgacctggttcttgctgatattttcaatttattactgcagtagataattgctctgaaagtgcaacactaaatcactcttgtcatagcctctgctccgtttccactggcaaatacttggaaattcattcttcgagcattgtggaccacaagcttctctctgggtggaaaattattgccactgccagtatcatagggaacacaacacacaacagtcaggtagatgcccaaaggagggcaaatccaaatatctgctctctttggaattttcacggcaaatctgaatttaggcaaaagtgaagacctccctggggtcttcaaagacagcctttgctctccatgtagccaatggtgctcttatatttgccgagcccttcacaactgtctgga

SEQ ID NO: 418858 - DNA, 1402 bp, Homo sapiens
agtaaaatcaaattctttaaactttcttctattccaatattccttatcccaagttaaggagcgttaccaactatattttgataataaaaatgtaaactgagttgtggcaatgattaatatcaattagagaatattttcacaataaatttgtgtcattgagattgacattgcctggactattccacatattttgttttggaatgcagttaagattgggacttatacactgtagggtagaatgagtaacagtacccccggttcccttgtattgacaagtccacgacctggttcttgctgatattttcaatttattactgcagtagataattgctctgaaagtgcaacactaaatcactcttgtcatagcctctgctccgtttccactggcaaatacttggaaattcattcttcgagcattgtggaccacaagcttctctctgggtggaaaattattgccactgccagtatcatagggaacacacacacacacacacacacacacgaacagaaggattcaaaaagcagacactggagaggagtaggggccaatttcaaacagaaaacccagtaaagggctggagaggagtaggggccaatttcaaacagaaaacccagcaaaggagttagaggagaacagctccaactgtgcaaagtggagaccgactctccactctccagtggcaacctcacattctggtactgtgcaaagcggagaccgactcttcactctcctcacattctggttacgttggccctggtagacctttatccctttgcctctgtaacggtgataccataatcataaccgtgccacatctcagcatatcagaggcccatggagtaaaaatagatgaaaagacctctcaagctagtttggaaaaatagagggtttagataaactgactatttaatctcctacttaaacctgttaggcagaatatctgggagaacactgggcgtaagatgctgcctaacaggcataaccccttgctctaaccagcctagggccagtatgtttttgatggaaaagacaactgtcaaatactacaacgacaaaaaggaagggaaaacatgagcagctctagaaaacgtaagattcaaaactctgaacaacaacaacaacaacaacaaaactatggacaacacacctagccaggaggcctgaccactcactcactcctaagcacactctacacatacacactgactttcccacacacacaacagtcaggtagatgcccaaaggagggcaaatccaaatatctgctctctttggaattttcacggcaaatctgaatttaggcaaaagtgaagacctccctggggtcttcaaagacagcctttgctctccatgtagccaatggtgctcttatatttgccgagcccttcacaactgtctgga

SEQ ID NO: 418859 - DNA, 1290 bp, Homo sapiens
agtaaaatcaaattctttaaactttcttctattccaatattccttatcccaagttaaggagcgttaccaactatattttgataataaaaatgtaaactgagttgtggcaatgattaatatcaattagagaatattttcacaataaatttgtgtcattgagattgacattgcctggactattccacatattttgttttggaatgcagttaagattgggacttatacactgtagggtagaatgagtaacagtacccccggttcccttgtattgacaagtccacgacctggttcttgctgatattttcaatttattactgcagtagataattgctctgaaagtgcaacactaaatcactcttgtcatagcctctgctccgtttccactggcaaatacttggaaattcattcttcgagcattgtggaccacaagcttctctctgggtggaaaattattgccactgccagtatcatagggaacacacacacacacacacacacacacgaacagaaggattcaaaaagcagacactggagaggagtaggggccaatttcaaacagaaaacccagtaaagggctggagaggagtaggggccaatttcaaacagaaaacccagcaaaggagttagaggagaacagctccaactgtgcaaagtggagaccgactctccactctccagtggcaacctcacattctggtactgtgcaaagcggagaccgactcttcactctcctcacattctggttacgttggccttaatttaaggtactgcagtctttgctcacaagagccaagtaagacggtgctacttggaggttgctataggactctgacgctatttatttgaatcctaggtgctcttgtgacttctctgacttcagtccttctggagtcagatcacccagcttctctgatgagtgactggtcatttttaaagcatgcctgcagcagtcttcaagaggtttctgcctgggcatcacgatcagcacacatttgctcatacacataccaggtgatgaggactcaaccactgcagacaggcagagccatgcaaataaagccatccagcaaggtcaccttttcctcagatgccccagtttcaggatgatagaatttgcatattaagtgttaataggcctggcaataaccagcttttgcttcccttcctcaatgagggacatgccagaaacagacttgcacacaggctctgctcatatgggaaacaggcctgacacacagggtctgctcatatgggaaaatgatttcagtcacagtccttagctccaaattc

SEQ ID NO: 418860 - DNA, 1449 bp, Homo sapiens
agtaaaatcaaattctttaaactttcttctattccaatattccttatcccaagttaaggagcgttaccaactatattttgataataaaaatgtaaactgagttgtggcaatgattaatatcaattagagaatattttcacaataaatttgtgtcattgagattgacattgcctggactattccacatattttgttttggaatgcagttaagattgggacttatacactgtagggtagaatgagtaacagtacccccggttcccttgtattgacaagtccacgacctggttcttgctgatattttcaatttattactgcagtagataattgctctgaaagtgcaacactaaatcactcttgtcatagcctctgctccgtttccactggcaaatacttggaaattcattcttcgagcattgtggaccacaagcttctctctgggtggaaaattattgccactgccagtatcatagggaacacacacacacacacacacacacacgaacagaaggattcaaaaagcagacactggagaggagtggggccaatttcaaacagaaaacccaataaagggctggagaggagtaaggggccaatttcaaacagaaaacccagtaaagggctggagaggagtaggggccaatttcaaacagaaaacccagcaaaggagttagaggagaacagctccaactgtgcaaagtggagaccgactctccactctccagtggcaacctcacattctggtactgtgcaaagcggagaccgactcttcactctcctcacattctggttacgttggccctggtagacctttatccctttgcctctgtaacggtgataccataatcataaccgtgccacatctcagcatatcagaggcccatggagtaaaaatagatgaaaagacctctcaagctagtttggaaaaatagagggtttagataaactgactatttaatctcctacttaaacctgttaggcagaatatctgggagaacactgggcgtaagatgctgcctaacaggcataaccccttgctctaaccagcctagggccagtatgtttttgatggaaaagacaactgtcaaatactacaacgacaaaaaggaagggaaaacatgagcagctctagaaaacgtaagattcaaaactctgaacaacaacaacaacaacaacaaaactatggacaacacacctagccaggaggcctgaccactcactcactcctaagcacactctacacatacacactgactttcccacacacacaacagtcaggtagatgcccaaaggagggcaaatccaaatatctgctctctttggaattttcacggcaaatctgaatttaggcaaaagtgaagacctccctggggtcttcaaagacagcctttgctctccatgtagccaatggtgctcttatatttgccgagcccttcacaactgtctgga

SEQ ID NO: 418861 - DNA, 1357 bp, Homo sapiens
agtaaaatcaaattctttaaactttcttctattccaatattccttatcccaagttaaggagcgttaccaactatattttgataataaaaatgtaaactgagttgtggcaatgattaatatcaattagagaatattttcacaataaatttgtgtcattgagattgacattgcctggactattccacatattttgttttggaatgcagttaagattgggacttatacactgtagggtagaatgagtaacagtacccccggttcccttgtattgacaagtccacgacctggttcttgctgatattttcaatttattactgcagtagataattgctctgaaagtgcaacactaaatcactcttgtcatagcctctgctccgtttccactggcaaatacttggaaattcattcttcgagcattgtggaccacaagcttctctctgggtggaaaattattgccactgccagtatcatagggaacacacacacacacacacacacacacgaacagaaggattcaaaaagcagacactggagaggagtgtaggggccaatttcaaacagaaaacccagcaaaggagttagaggagaacagctccaactgtgcaaagtggagaccgactctccactctccagtggcaacctcacattctggtactgtgcaaagcggagaccgactcttcactctcctcacattctggttacgttggccctggtagacctttatccctttgcctctgtaacggtgataccataatcataaccgtgccacatctcagcatatcagaggcccatggagtaaaaatagatgaaaagacctctcaagctagtttggaaaaatagagggtttagataaactgactatttaatctcctacttaaacctgttaggcagaatatctgggagaacactgggcgtaagatgctgcctaacaggcataaccccttgctctaaccagcctagggccagtatgtttttgatggaaaagacaactgtcaaatactacaacgacaaaaaggaagggaaaacatgagcagctctagaaaacgtaagattcaaaactctgaacaacaacaacaacaacaacaaaactatggacaacacacctagccaggaggcctgaccactcactcactcctaagcacactctacacatacacactgactttcccacacacacaacagtcaggtagatgcccaaaggagggcaaatccaaatatctgctctctttggaattttcacggcaaatctgaatttaggcaaaagtgaagacctccctggggtcttcaaagacagcctttgctctccatgtagccaatggtgctcttatatttgccgagcccttcacaactgtctgga

SEQ ID NO: 418862 - DNA, 1272 bp, Homo sapiens
agtaaaatcaaattctttaaactttcttctattccaatattccttatcccaagttaaggagcgttaccaactatattttgataataaaaatgtaaactgagttgtggcaatgattaatatcaattagagaatattttcacaataaatttgtgtcattgagattgacattgcctggactattccacatattttgttttggaatgcagttaagattgggacttatacactgtagggtagaatgagtaacagtacccccggttcccttgtattgacaagtccacgacctggttcttgctgatattttcaatttattactgcagtagataattgctctgaaagtgcaacactaaatcactcttgtcatagcctctgctccgtttccactggcaaatacttggaaattcattcttcgagcattgtggaccacaagcttctctctgggtggaaaattattgccactgccagtatcatagggaacacacacacacacacacacacacacgaacagaaggattcaaaaagcagacactggagaggagtaggggccaatttcaaacagaaaacccagtaaagggctggagaggacacctcccttttggcccctgtactccccgttctttcagaaaaaaagcatccccaaaacagtggtaattagagggtgttcaggaatggaaaagtaggaagagtgtagtacaaatacaataaggaaatgcctgttactctcatatgatttctctgagaccaggtggccaaggatcccctagtcttccacatatgttttaaagagaggccttaatttaaggtactgcagtctttgctcacaagagccaagtaagacggtgctacttggaggttgctataggactctgacgctatttatttgaatcctaggtgctcttgtgacttctctgacttcagtccttctggagtcagatcacccagcttctctgatgagtgactggtcatttttaaagcatgcctgcagcagtcttcaagaggtttctgcctgggcatcacgatcagcacacatttgctcatacacataccaggtgatgaggactcaaccactgcagacaggcagagccatgcaaataaagccatccagcaaggtcaccttttcctcagatgccccagtttcaggatgatagaatttgcatattaagtgttaataggcctggcaataaccagcttttgcttcccttcctcaatgagggacatgccagaaacagaccggacgcgtgggtcgacccaccggccgtccgcgacgcgtgg

SEQ ID NO: 418863 - DNA, 1953 bp, Homo sapiens
aaggccacatagagtgtttgcagtggttaattaaaatgggagcagacagtaatattaccaacaaagcaggggagagacccagtgatgtggcaaagaggtttgcccatttggcagcagtgaagctgttagaggagctacagaaatatgatatagatgacgaaaatgaaattgatgaaaatgatgtgaaatattttataagacatggtgttgagggaagcactgatgccaaggatgatttatgtctgagtgacttggataaaacagatgccagaatgagagcttacaagaaaattgtagaattgagacacctcctggaaattgccgagagcaactataaacacttgggaggcataacagaagaagatttaaagcagaagaaagaacagcttgagtctgaaaagaccatcaaagaactgcagggccagctggagtatgaacgactacgtagagaaaaattagaatgtcagcttgatgaatatcgagcagaagttgatcaactcagggaaacactggaaaaaattcaagtcccaaactttgtggctatggaagacagcgcttcttgtgagtcaaacaaagagaagaggcgagtaaaaaaaaaggtttcttctggaggggtgtttgtgagaagatttacaattgggcaagtcactttacctagggcagagtggataaggggatgaagagtgacgacagtgttatgctactggagcttccttcacatggaggaaagacgcattccctcttaatattttagaatattttaaatcttaacaaaccaataatttacttgtttatgtctctctccttaagattgtcaattcaatgagaatgaaaccatgttcatctctgtgcacacagggactagcatgctgtttggcatatagcaggcagtcatattggttaactgaacaaatgcagtatactttgttacagtggactttaatatatatggtaacttattaattgactcagtgaaaattaatctataatatactaagaactctcttaggcaatagagataaaaatgaatcagaatgtaacaggataatgtcaaggtttttcttttgaaaacaaaccagcagttagatttttgaggaaaatatagttggaaagcctgactctcactcactggaccatatggaccaatctcttgactgctctatactgcagattccctgtttatagctaaacaaatgacaaggctattttgaataatgattgtcaaacttttatagctattaccaaggcattatgaactcaaaatgtttactttctggtcttgtcttcttgatctgggtaagactgaagaactaagatgaaaaggatattttaaaatttctttgaaattacatatgatttactaatagatattactttgtaagaaaaaatatatctaataacaaaacaaaatacgaatttaaattttcctatgagtttcttgagagtaggtactagatatcaatgtttgctgaattgaagtcattaagaaaagctttgttttatgtaataaatttaagatgggttaacttaaactacattaagaagcagggataaactggtttttgagtatcaaatatttaaaaaatacatgtaataatcagagctcaatatttagcaactctacagatttcatattaagtgttgtaatttgcactaaagcacacatttatttatttaggtaatggagtcttgctctgtcacccaggctggagtgcagtggtgctatctcggctcactgcaagattctcctgcctcagcctcccgagtagctggaattacaggcatgtgccaccatgcctggctaatttttgtatttttagcagagacggggtttcaccatgttggccaggctggtctagaactcctgacctcaagtgatccacccgcctcagcctcccaaagtgctgagattacaggtgtgagccaccgcgcctggcctatcattttaaaatt

SEQ ID NO: 418864 - DNA, 687 bp, Homo sapiens
gcctgtttatcgatgtagaatttcaacagtatttatcgaagtactgggtacaggccattttttgttttgttgttgttgtttttgaactaccaccacagtcatgcaaatgaatatgagctgttgaattaattaccctatcttctacatctcttctacttcccatcacgctggcctacaggagtttccggcatgtgctgtaggccagcgacttacttgtaactctctaaatgaagtttttttgatcctgtaatcactgaaggtacatactccatgtggacttcccttaaacaggcaaacacctacaggtatggtgtgcaacagattgtacaattacattttggcctaaatacatttttgcttactagtatttaaaataaattcttaatcagaggaggcctttgggttttattggtcaaatctttgtaagctggcttttgtctttttaaaaaatttcttgaatttgtggttgtgtccaatttgcaaacatttccaaaaatgtttgctttgcttacaaaccacatgattttaatgttttttgtataccataatatctagccccaaacatttgattactacatgtgcattggtgattttgatcatccattcttaatatttgatttctgtgtcacctactgtcatttgttaaaccgctggcctacagcacatgccggtgtgctgtaggccagc

SEQ ID NO: 418865 - DNA, 5703 bp, Homo sapiens
gtgggtggttcgcagaagcagcagtgaagagaagctactgtgtttggtgcgggagcgagctggccacacctgtgaggctgcagtgattgtgattctcatcctggtgtgggaaggaatcccgctgtctctggctgacaaactctactcggagcttaccgagacgctgaggaaatacggcacgctcaccaatcgccggtgtgccttgaatgaagagagaacttgcgcctgtcaggggctggatccagaaacctgtggtgcctccttctcttttggttgttcatggagcatgtactacaatggatgtaagtttgccagaagcaagatcccaaggaagtttaagctgcttggggatgacccaaaagaggaagagaaactggagtctcatttgcaaaacctgtccactcttatggcaccaacatataagaaacttgcacctgatgcatataataatcagattgaatatgaacacagagcaccagagtgccgtctgggtctgaaggaaggccgtccattctcaggggtcactgcatgtttggacttctgtgctcatgcccacagagacttgcacaacatgcagaatggcagcacattggtatgcactctcactagagaagacaatcgagaatttggaggaaaacctgaggatgagcagcttcacgttctgcctttatacaaagtctctgacgtggatgagtttgggagtgtggaagctcaggaggagaaaaaacggagtggtgccattcaggtactgagttcttttcggcgaaaagtcaggatgttagcagagccagtcaagacttgccgacaaaggaaactagaagccaagaaagctgcagctgaaaagctttcctccctggagaacagctcaaataaaaatgaaaaggaaaagtcagccccatcacgtacaaaacaaactgaaaacgcaagccaggctaaacagttggcagaacttttgcgactttcaggaccagtcatgcagcagtcccagcagccccagcctctacagaagcagccaccacagccccagcagcagcagagaccccagcagcagcagccacatcaccctcagacagagtctgtcaactcttattctgcttctggatccaccaatccatacatgagacggcccaatccagttagtccttatccaaactcttcacacacttcagatatctatggaagcaccagccctatgaacttctattccacctcatctcaagctgcaggttcatatttgaattcttctaatcccatgaacccttaccctgggcttttgaatcagaatacccaatatccatcatatcaatgcaatggaaacctatcagtggacaactgctccccatatctgggttcctattctccccagtctcagccgatggatctgtataggtatccaagccaagaccctctgtctaagctcagtctaccacccatccatacactttaccagccaaggtttggaaatagccagagttttacatctaaatacttaggttatggaaaccaaaatatgcagggagatggtttcagcagttgtaccattagaccaaatgtacatcatgtagggaaattgcctccttatcccactcatgagatggatggccacttcatgggagccacctctagattaccacccaatctgagcaatccaaacatggactataaaaatggtgaacatcattcaccttctcacataatccataactacagtgcagctccgggcatgttcaacagctctcttcatgccctgcatctccaaaacaaggagaatgacatgctttcccacacagctaatgggttatcaaagatgcttccagctcttaaccatgatagaactgcttgtgtccaaggaggcttacacaaattaagtgatgctaatggtcaggaaaagcagccattggcactagtccagggtgtggcttctggtgcagaggacaacgatgaggtctggtcagacagcgagcagagctttctggatcctgacattgggggagtggccgtggctccaactcatgggtcaattctcattgagtgtgcaaagcgtgagctgcatgccacaacccctttaaagaatcccaataggaatcaccccaccaggatctccctcgtcttttaccagcataagagcatgaatgagccaaaacatggcttggctctttgggaagccaaaatggctgaaaaagcccgtgagagaggaagagtgtgaaaagtatggcccagactatgtgcctcagaaatcccatggcaaaaaagtgaaacgggagcctgctgagccacatgaaacttcagagcccacttacctgcgtttcatcaagtctcttgccgaaaggaccatgtccgtgaccacagactccacagtaactacatctccatatgccttcactcgggtcacagggccttacaacagatatatatgatatcacccccttttgttggttacctcacttgaaaagaccacaaccaacctgtcagtagtatagttctcatgacgtgggcagtggggaaaggtcacagtattcatgacaaatgtggtgggaaaaacctcagctcaccagcaacaaaagaggttatcttaccatagcacttaattttcactggctcccaagtggtcacagatggcatctaggaaaagaccaaagcattctatgcaaaaagaaggtggggaagaaagtgttccgcaatttacatttttaaacactggttctattattggacgagatgatatgtaaatgtgatcccccccccccgcttacaactctacacatctgtgaccacttttaataatatcaagtttgcatagtcatggaacacaaatcaaacaagtactgtagtattacagtgacaggaatcttaaaataccatctggtgctgaatatatgatgtactgaaatactggaattatggctttttgaaatgcagtttttactgtaatcttaacttttatttatcaaaatagctacaggaaacatgaatagcaggaaaacactgaatttgtttggatgttctaagaaatggtgctaagaaaatggtgtctttaatagctaaaaatttaatgcctttatatcatcaagatgctatcagtgtactccagtgcccttgaataataggggtaccttttcattcaagtttttatcataattacctattcttacacaagcttagtttttaaaatgtggacattttaaaggcctctggattttgctcatccagtgaagtccttgtaggacaataaacgtatatatgtacatatatacacaaacatgtatatgtgcacacacatgtatatgtataaatattttaaatggtgttttagaagcactttgtctacctaagctttgacaacttgaacaatgctaaggtactgagatgtttaaaaaacaagtttactttcattttagaatgcaaagttgatttttttaaggaaacaaagaaagcttttaaaatatttttgcttttagccatgcatctgctgatgagcaattgtgtccatttttaacacagccagttaaatccaccatggggcttactggattcaagggaatacgttagtccacaaaacatgttttctggtgctcatctcacatgctatactgtaaaacagttttatacaaaattgtatgacaagttcattgctcaaaaatgtacagttttaagaattttctattaactgcaggtaataattagctgcatgctgcagactcaacaaagctagttcactgaagcctatgctattttatggatcataggctcttcagagaactgaatggcagtctgcctttgtgttgataattatgtacattgtgacgttgtcatttcttagcttaagtgtcctctttaacaagaggattgagcagactgatgcctgcataagatgaataaacagggttagttccatgtgaatctgtcagttaaaaagaaacaaaaacaggcagctggtttgctgtggtggttttaaatcattaatttgtataaagaagtgaaagagttgtatagtaaattaaattgtaaacaaaacttttttaatgcaatgctttagtattttagtactgtaaaaaaattaaatatatacatatatatatatatatatatatatatatatatgagtttgaagcagaattcacatcatgatggtgctactcagcctgctacaaatatatcataatgtgagctaagaattcattaaatgtttgagtgatgttcctacttgtcatatacctcaacactagtttggcaataggatattgaactgagagtgaaagcattgtgtaccatcatttttttccaagtccttttttttattgttaaaaaaaaaagcataccttttttcaatacttgatttcttagcaagtataacttgaacttcaacctttttgttctaaaaattcagggatatttcagctcatgctctccctatgccaacatgtcacctgtgtttatgtaaaattgttgtaggttaataaatatattctttgtcagggatttaacccttttattttgaatcccttctattttacttgtacatgtgctgatgtaactaaaactaattttgtaaatctgttggctctttttattgtaaagaaaagcattttaaaagtttgaggaatcttttgactgtttcaagcaggaaaaaaaaattacatgaaaatagaatgcactgagttgataaagggaaaaattgtaaggcaggagtttccggcatgtgctgtaggccagcgacttacttgtaactctctaaatgaagtttttttgatcctgtaatcactgaaggtacatactccatgtggacttcccttaaacaggcaaacacctacaggtatggtgtgcaacagattgtacaattacattttggcctaaatacatttttgcttactagtatttaaaataaattcttaatcagaggaggcctttgggttttattggtcaaatctttgtaagctggcttttgtctttttaaaaaatttcttgaatttgtggttgtgtccaatttgcaaacatttccaaaaatgtttgctttgcttacaaaccacatgattttaatgttttttgtataccataatatctagccccaaacatttgattactacatgtgcattggtgattttgatcatccattcttaatatttgatttctgtgtcacctactgtcatttgttaaaccgctggcctacaagcacatggaagtatagtttggggggttggggagagtttacataaggaagagaagaaattgagtggcatattgtaaatatcagatctataattgtaaatataaaacctgcctcagttagaatgaatggaaagcagatctacaatttgctaatataggaatatcaggttgactatatagccatacttgaaaatgcttctgagtggtgtcaactttacttgaatgaatttttcatcttgattgacgcacagtgatgtacagttcacttctgaagctagtggttaacttgtgtaggaaacttttgcagtttgacactaagataacttctgtgtgcatttttctatgcttttttaaaaactagtttcatttcattttcatgagatgtttggtttataagatctgaggatggttataaatactgtaagtattgtaatgttatgaatgcaggttatttgaaagctgtttattattatatcattcctgataatgctatgtgagtgtttttaataaaatttatatttatttaatgcactctaa

SEQ ID NO: 418866 - DNA, 5137 bp, Homo sapiens
gtgggtggttcgcagaagcagcagtgaagagaagctactgtgtttggtgcgggagcgagctggccacacctgtgaggctgcagtgattgtgattctcatcctggtgtgggaaggaatcccgctgtctctggctgacaaactctactcggagcttaccgagacgctgaggaaatacggcacgctcaccaatcgccggtgtgccttgaatgaagagagaacttgcgcctgtcaggggctggatccagaaacctgtggtgcctccttctcttttggttgttcatggagcatgtactacaatggatgtaagtttgccagaagcaagatcccaaggaagtttaagctgcttggggatgacccaaaagaggaagagaaactggagtctcatttgcaaaacctgtccactcttatggcaccaacatataagaaacttgcacctgatgcatataataatcagattgaatatgaacacagagcaccagagtgccgtctgggtctgaaggaaggccgtccattctcaggggtcactgcatgtttggacttctgtgctcatgcccacagagacttgcacaacatgcagaatggcagcacattggtatgcactctcactagagaagacaatcgagaatttggaggaaaacctgaggatgagcagcttcacgttctgcctttatacaaagtctctgacgtggatgagtttgggagtgtggaagctcaggaggagaaaaaacggagtggtgccattcaggtactgagttcttttcggcgaaaagtcaggatgttagcagagccagtcaagacttgccgacaaaggaaactagaagccaagaaagctgcagctgaaaagctttcctccctggagaacagctcaaataaaaatgaaaaggaaaagtcagccccatcacgtacaaaacaaactgaaaacgcaagccaggctaaacagttggcagaacttttgcgactttcaggaccagtcatgcagcagtcccagcagccccagcctctacagaagcagccaccacagccccagcagcagcagagaccccagcagcagcagccacatcaccctcagacagagtctgtcaactcttattctgcttctggatccaccaatccatacatgagacggcccaatccagttagtccttatccaaactcttcacacacttcagatatctatggaagcaccagccctatgaacttctattccacctcatctcaagctgcaggttcatatttgaattcttctaatcccatgaacccttaccctgggcttttgaatcagaatacccaatatccatcatatcaatgcaatggaaacctatcagtggacaactgctccccatatctgggttcctattctccccagtctcagccgatggatctgtataggtatccaagccaagaccctctgtctaagctcagtctaccacccatccatacactttaccagccaaggtttggaaatagccagagttttacatctaaatacttaggttatggaaaccaaaatatgcagggagatggtttcagcagttgtaccattagaccaaatgtacatcatgtagggaaattgcctccttatcccactcatgagatggatggccacttcatgggagccacctctagattaccacccaatctgagcaatccaaacatggactataaaaatggtgaacatcattcaccttctcacataatccataactacagtgcagctccgggcatgttcaacagctctcttcatgccctgcatctccaaaacaaggagaatgacatgctttcccacacagctaatgggttatcaaagatgcttccagctcttaaccatgatagaactgcttgtgtccaaggaggcttacacaaattaagtgatgctaatggtcaggaaaagcagccattggcactagtccagggtgtggcttctggtgcagaggacaacgatgaggtctggtcagacagcgagcagagctttctggatcctgacattgggggagtggccgtggctccaactcatgggtcaattctcattgagtgtgcaaagcgtgagctgcatgccacaacccctttaaagaatcccaataggaatcaccccaccaggatctccctcgtcttttaccagcataagagcatgaatgagccaaaacatggcttggctctttgggaagccaaaatggctgaaaaagcccgtgagagaggaagagtgtgaaaagtatggcccagactatgtgcctcagaaatcccatggcaaaaaagtgaaacgggagcctgctgagccacatgaaacttcagagcccacttacctgcgtttcatcaagtctcttgccgaaaggaccatgtccgtgaccacagactccacagtaactacatctccatatgccttcactcgggtcacagggccttacaacagatatatatgatatcacccccttttgttggttacctcacttgaaaagaccacaaccaacctgtcagtagtatagttctcatgacgtgggcagtggggaaaggtcacagtattcatgacaaatgtggtgggaaaaacctcagctcaccagcaacaaaagaggttatcttaccatagcacttaattttcactggctcccaagtggtcacagatggcatctaggaaaagaccaaagcattctatgcaaaaagaaggtggggaagaaagtgttccgcaatttacatttttaaacactggttctattattggacgagatgatatgtaaatgtgatcccccccccccgcttacaactctacacatctgtgaccacttttaataatatcaagtttgcatagtcatggaacacaaatcaaacaagtactgtagtattacagtgacaggaatcttaaaataccatctggtgctgaatatatgatgtactgaaatactggaattatggctttttgaaatgcagtttttactgtaatcttaacttttatttatcaaaatagctacaggaaacatgaatagcaggaaaacactgaatttgtttggatgttctaagaaatggtgctaagaaaatggtgtctttaatagctaaaaatttaatgcctttatatcatcaagatgctatcagtgtactccagtgcccttgaataataggggtaccttttcattcaagtttttatcataattacctattcttacacaagcttagtttttaaaatgtggacattttaaaggcctctggattttgctcatccagtgaagtccttgtaggacaataaacgtatatatgtacatatatacacaaacatgtatatgtgcacacacatgtatatgtataaatattttaaatggtgttttagaagcactttgtctacctaagctttgacaacttgaacaatgctaaggtactgagatgtttaaaaaacaagtttactttcattttagaatgcaaagttgatttttttaaggaaacaaagaaagcttttaaaatatttttgcttttagccatgcatctgctgatgagcaattgtgtccatttttaacacagccagttaaatccaccatggggcttactggattcaagggaatacgttagtccacaaaacatgttttctggtgctcatctcacatgctatactgtaaaacagttttatacaaaattgtatgacaagttcattgctcaaaaatgtacagttttaagaattttctattaactgcaggtaataattagctgcatgctgcagactcaacaaagctagttcactgaagcctatgctattttatggatcataggctcttcagagaactgaatggcagtctgcctttgtgttgataattatgtacattgtgacgttgtcatttcttagcttaagtgtcctctttaacaagaggattgagcagactgatgcctgcataagatgaataaacagggttagttccatgtgaatctgtcagttaaaaagaaacaaaaacaggcagctggtttgctgtggtggttttaaatcattaatttgtataaagaagtgaaagagttgtatagtaaattaaattgtaaacaaaacttttttaatgcaatgctttagtattttagtactgtaaaaaaattaaatatatacatatatatatatatatatatatatatatatatgagtttgaagcagaattcacatcatgatggtgctactcagcctgctacaaatatatcataatgtgagctaagaattcattaaatgtttgagtgatgttcctacttgtcatatacctcaacactagtttggcaataggatattgaactgagagtgaaagcattgtgtaccatcatttttttccaagtccttttttttattgttaaaaaaaaaagcataccttttttcaatacttgatttcttagcaagtataacttgaacttcaacctttttgttctaaaaattcagggatatttcagctcatgctctccctatgccaacatgtcacctgtgtttatgtaaaattgttgtaggttaataaatatattctttgtcagggatttaacccttttattttgaatcccttctattttacttgtacatgtgctgatgtaactaaaactaattttgtaaatctgttggctctttttattgtaaagaaaagcattttaaaagtttgaggaatcttttgactgtttcaagcaggaaggagtttccggcatgtgctgtaggccagcgacttacttgtaactctctaaatgaagtttttttgatcctgtaatcactgaaggtacatactccatgtggacttcccttaaacaggcaaacacctacaggtatggtgtgcaacagattgtacaattacattttggcctaaatacatttttgcttactagtatttaaaataaattcttaatcagaggaggcctttgggttttattggtcaaatctttgtaagctggcttttgtctttttaaaaaatttcttgaatttgtggttgtgtccaatttgcaaacatttccaaaaatgtttgctttgcttacaaaccacatgattttaatgttttttgtataccataatatctagccccaaacatttgattactacatgtgcattggtgattttgatcatccattcttaatatttgatttctgtgtcacctactgtcatttgttaaaccgctggcctacagcacatgccggtgtgctgtaggccagc

SEQ ID NO: 418867 - DNA, 1037 bp, Homo sapiens
  misc_feature (24)..(24): n is a, c, g, or t
  misc_feature (59)..(59): n is a, c, g, or t
catcatatacaattcagatccgtncccggcatgtgccgtcgccagcgagtctctgttanctctctcaattgacgttactttgatccttttttcacttgttttccctaaatccatgtggacttcccttaaacaggcaaacacctacaggtatggtgtgcaacagattgtacaattacattttggcctaaatacatttttgcttactagtatttaaaataaattcttaatcagaggaggcctttgggttttattggtcaaatctttgtaagctggcttttgtctttttaaaaaatttcttgaatttgtggttgtgtccaatttgcaaacatttccaaaaatgtttgctttgcttacaaaccacatgattttaatgttttttgtataccataatatctagccccaaacatttgattactacatgtgcattggtgattttgatcatccattcttaatatttgatttctgtgtcacctactgtcatttgttaaaccgctggcctacaagcacatggaagtatagtttggggggttggggagagtttacataaggaagagaagaaattgagtggcatattgtaaatatcagatctataattgtaaatataaaacctgcctcagttagaatgaatggaaagcagatctacaatttgctaatataggaatatcaggttgactatatagccatacttgaaaatgcttctgagtggtgtcaactttacttgaatgaatttttcatcttgattgacgcacagtgatgtacagttcacttctgaagctagtggttaacttgtgtaggaaacttttgcagtttgacactaagataacttctgtgtgcatttttctatgcttttttaaaaactagtttcatttcattttcatgagatgtttggtttataagatctgaggatggttataaatactgtaagtattgtaatgttatgaatgcaggttatttgaaagctgtttattattatatcattcctgataatgctatgtgagtgtttttaataaaatttatatttatttaatgcactctaa

SEQ ID NO: 418868 - DNA, 5195 bp, Homo sapiens
gtgggtggttcgcagaagcagcagtgaagagaagctactgtgtttggtgcgggagcgagctggccacacctgtgaggctgcagtgattgtgattctcatcctggtgtgggaaggaatcccgctgtctctggctgacaaactctactcggagcttaccgagacgctgaggaaatacggcacgctcaccaatcgccggtgtgccttgaatgaagagagaacttgcgcctgtcaggggctggatccagaaacctgtggtgcctccttctcttttggttgttcatggagcatgtactacaatggatgtaagtttgccagaagcaagatcccaaggaagtttaagctgcttggggatgacccaaaagaggaagagaaactggagtctcatttgcaaaacctgtccactcttatggcaccaacatataagaaacttgcacctgatgcatataataatcagattgaatatgaacacagagcaccagagtgccgtctgggtctgaaggaaggccgtccattctcaggggtcactgcatgtttggacttctgtgctcatgcccacagagacttgcacaacatgcagaatggcagcacattggtatgcactctcactagagaagacaatcgagaatttggaggaaaacctgaggatgagcagcttcacgttctgcctttatacaaagtctctgacgtggatgagtttgggagtgtggaagctcaggaggagaaaaaacggagtggtgccattcaggtactgagttcttttcggcgaaaagtcaggatgttagcagagccagtcaagacttgccgacaaaggaaactagaagccaagaaagctgcagctgaaaagctttcctccctggagaacagctcaaataaaaatgaaaaggaaaagtcagccccatcacgtacaaaacaaactgaaaacgcaagccaggctaaacagttggcagaacttttgcgactttcaggaccagtcatgcagcagtcccagcagccccagcctctacagaagcagccaccacagccccagcagcagcagagaccccagcagcagcagccacatcaccctcagacagagtctgtcaactcttattctgcttctggatccaccaatccatacatgagacggcccaatccagttagtccttatccaaactcttcacacacttcagatatctatggaagcaccagccctatgaacttctattccacctcatctcaagctgcaggttcatatttgaattcttctaatcccatgaacccttaccctgggcttttgaatcagaatacccaatatccatcatatcaatgcaatggaaacctatcagtggacaactgctccccatatctgggttcctattctccccagtctcagccgatggatctgtataggtatccaagccaagaccctctgtctaagctcagtctaccacccatccatacactttaccagccaaggtttggaaatagccagagttttacatctaaatacttaggttatggaaaccaaaatatgcagggagatggtttcagcagttgtaccattagaccaaatgtacatcatgtagggaaattgcctccttatcccactcatgagatggatggccacttcatgggagccacctctagattaccacccaatctgagcaatccaaacatggactataaaaatggtgaacatcattcaccttctcacataatccataactacagtgcagctccgggcatgttcaacagctctcttcatgccctgcatctccaaaacaaggagaatgacatgctttcccacacagctaatgggttatcaaagatgcttccagctcttaaccatgatagaactgcttgtgtccaaggaggcttacacaaattaagtgatgctaatggtcaggaaaagcagccattggcactagtccagggtgtggcttctggtgcagaggacaacgatgaggtctggtcagacagcgagcagagctttctggatcctgacattgggggagtggccgtggctccaactcatgggtcaattctcattgagtgtgcaaagcgtgagctgcatgccacaacccctttaaagaatcccaataggaatcaccccaccaggatctccctcgtcttttaccagcataagagcatgaatgagccaaaacatggcttggctctttgggaagccaaaatggctgaaaaagcccgtgagagaggaagagtgtgaaaagtatggcccagactatgtgcctcagaaatcccatggcaaaaaagtgaaacgggagcctgctgagccacatgaaacttcagagcccacttacctgcgtttcatcaagtctcttgccgaaaggaccatgtccgtgaccacagactccacagtaactacatctccatatgccttcactcgggtcacagggccttacaacagatatatatgatatcacccccttttgttggttacctcacttgaaaagaccacaaccaacctgtcagtagtatagttctcatgacgtgggcagtggggaaaggtcacagtattcatgacaaatgtggtgggaaaaacctcagctcaccagcaacaaaagaggttatcttaccatagcacttaattttcactggctcccaagtggtcacagatggcatctaggaaaagaccaaagcattctatgcaaaaagaaggtggggaagaaagtgttccgcaatttacatttttaaacactggttctattattggacgagatgatatgtaaatgtgatcccccccccccgcttacaactctacacatctgtgaccacttttaataatatcaagtttgcatagtcatggaacacaaatcaaacaagtactgtagtattacagtgacaggaatcttaaaataccatctggtgctgaatatatgatgtactgaaatactggaattatggctttttgaaatgcagtttttactgtaatcttaacttttatttatcaaaatagctacaggaaacatgaatagcaggaaaacactgaatttgtttggatgttctaagaaatggtgctaagaaaatggtgtctttaatagctaaaaatttaatgcctttatatcatcaagatgctatcagtgtactccagtgcccttgaataataggggtaccttttcattcaagtttttatcataattacctattcttacacaagcttagtttttaaaatgtggacattttaaaggcctctggattttgctcatccagtgaagtccttgtaggacaataaacgtatatatgtacatatatacacaaacatgtatatgtgcacacacatgtatatgtataaatattttaaatggtgttttagaagcactttgtctacctaagctttgacaacttgaacaatgctaaggtactgagatgtttaaaaaacaagtttactttcattttagaatgcaaagttgatttttttaaggaaacaaagaaagcttttaaaatatttttgcttttagccatgcatctgctgatgagcaattgtgtccatttttaacacagccagttaaatccaccatggggcttactggattcaagggaatacgttagtccacaaaacatgttttctggtgctcatctcacatgctatactgtaaaacagttttatacaaaattgtatgacaagttcattgctcaaaaatgtacagttttaagaattttctattaactgcaggtaataattagctgcatgctgcagactcaacaaagctagttcactgaagcctatgctattttatggatcataggctcttcagagaactgaatggcagtctgcctttgtgttgataattatgtacattgtgacgttgtcatttcttagcttaagtgtcctctttaacaagaggattgagcagactgatgcctgcataagatgaataaacagggttagttccatgtgaatctgtcagttaaaaagaaacaaaaacaggcagctggtttgctgtggtggttttaaatcattaatttgtataaagaagtgaaagagttgtatagtaaattaaattgtaaacaaaacttttttaatgcaatgctttagtattttagtactgtaaaaaaattaaatatatacatatatatatatatatatatatatatatatatgagtttgaagcagaattcacatcatgatggtgctactcagcctgctacaaatatatcataatgtgagctaagaattcattaaatgtttgagtgatgttcctacttgtcatatacctcaacactagtttggcaataggatattgaactgagagtgaaagcattgtgtaccatcatttttttccaagtccttttttttattgttaaaaaaaaaagcataccttttttcaatacttgatttcttagcaagtataacttgaacttcaacctttttgttctaaaaattcagggatatttcagctcatgctctccctatgccaacatgtcacctgtgtttatgtaaaattgttgtaggttaataaatatattctttgtcagggatttaacccttttattttgaatcccttctattttacttgtacatgtgctgatgtaactaaaactaattttgtaaatctgttggctctttttattgtaaagaaaagcattttaaaagtttgaggaatcttttgactgtttcaagcaggaaaaaaaaattacatgaaaatagaatgcactgagttgataaagggaaaaattgtaaggcaggagtttccggcatgtgctgtaggccagcgacttacttgtaactctctaaatgaagtttttttgatcctgtaatcactgaaggtacatactccatgtggacttcccttaaacaggcaaacacctacaggtatggtgtgcaacagattgtacaattacattttggcctaaatacatttttgcttactagtatttaaaataaattcttaatcagaggaggcctttgggttttattggtcaaatctttgtaagctggcttttgtctttttaaaaaatttcttgaatttgtggttgtgtccaatttgcaaacatttccaaaaatgtttgctttgcttacaaaccacatgattttaatgttttttgtataccataatatctagccccaaacatttgattactacatgtgcattggtgattttgatcatccattcttaatatttgatttctgtgtcacctactgtcatttgttaaaccgctggcctacagcacatgccggtgtgctgtaggccagc

SEQ ID NO: 418869 - DNA, 352 bp, Homo sapiens
agtgtggaagctcaggaggagaaaaaacggagtggtgccattcaggtactgagttcttttcggcgaaaagtcaggatgttagcagagccagtcaagacttgccgacaaaggaaactagaagccaagaaagctgcagctgaaaagctttcctccctggagaacagctcaaataaaaatgaaaaggaaaagtcagccccatcacgtacaaaacaaactgaaaacgcaagccaggctaaacagttggcaggtaaatttaatgtaaagcatttgtagataaatgtgttgtgtggtatattaaaaatgaaaattattttggttttgcccccatcaacttgtaagttctggggtacac

SEQ ID NO: 418870 - DNA, 2686 bp, Homo sapiens
ggatctgaagaacaatgaaatttcctggactattgaagacatgaatggtgctttctatgggcttgacaaactgaggcgactgatactcacaaggaaatcggatccgttctattactaaaaaagcctccactggtttggatgcattggagcatctagacctgagtgacaacgcaatcatgtctttacaaggcaatgcattttcacaaatgaagaaactgcaacaattgcatttaaatacatcaagccttttgtgcgattgccagctaaaatggctcccacagtgggtggcggaaaacaactttcagagctttgtaaatgccagttgtgcccatcctcagctgctaaaaggaagaagcatttttgctgttagcccagatggctttgtgtgtgatgattttcccaaaccccagatcacggttcagccagaaacacagtcggcaataaaaggttccaatttgagtttcatctgctcagctgccagcagcagtgattccccaatgacttttgcttggaaaaaagacaatgaactactgcatgatgctgaaatggaaaattatgcacacctccgggcccaaggtggcgaggtgatggagtataccaccatccttcggctgcgcgaggtggaatttgccagtgaggggaaatatcagtgtgtcatctccaatcactttggttcatcctactctgtcaaagccaagcttacagtaaatatgcttccctcattcaccaagacccccatggatctcaccatccgagctggggccatggcacgcttggagtgtgctgctgtggggcacccagccccccagatagcctggcagaaggatgggggcacagacttcccagctgcacgggagagacgcatgcatgtgatgcccgaggatgacgtgttctttatcgtggatgtgaagatagaggacattggggtatacagctgcacagctcagaacagtgcaggaagtatttcagcaaatgcaactctgactgtcctagaaacaccatcatttttgcggccactgttggaccgaactgtaaccaagggagaaacagccgtcctacagtgcattgctggaggaagccctccccctaaactgaactggaccaaagatgatagcccattggtggtaaccgagaggcacttttttgcagcaggcaatcagcttctgattattgtggactcagatgtcagtgatgctgggaaatacacatgtgagatgtctaacacccttggcactgagagaggaaacgtgcgcctcagtgtgatccccactccaacctgcgactcccctcagatgacagccccatcgttagacgatgacggatgggccactgtgggtgtcgtgatcatagccgtggtttgctgtgtggtgggcacgtcactcgtgtgggtggtcatcatataccacacaaggcggaggaatgaagattgcagcattaccaacacagatgagaccaacttgccagcagatattcctagttatttgtcatctcagggaacgttagctgacaggcaggatgggtacgtgtcttcagaaagtggaagccaccaccagtttgtcacatcttcaggtgctggatttttcttaccacaacatgacagtagtgggacctgccatattgacaatagcagtgaagctgatgtggaagctgccacagatctgttcctttgtccgtttttgggatccacaggccctatgtatttgaagggaaatgtgtatggctcagatccttttgaaacatatcatacaggttgcagtcctgacccaagaacagttttaatggaccactatgagcccagttacataaagaaaaaggagtgctacccatgttctcatccttcagaagaatcctgcgaacggagcttcagtaatatatcgtggccttcacatgtgaggaagctacttaacactagttactctcacaatgaaggacctggaatgaaaaatctgtgtctaaacaagtcctctttagattttagtgcaaatccagagccagcgtcggttgcctcgagtaattctttcatgggtacctttggaaaagctctcaggagacctcacctagatgcctattcaagctttggacagccatcagattgtcagccaagagccttttatttgaaagctcattcttccccagacttggactctgggtcagaggaagatgggaaagaaaggacagattttcaggaagaaaatcacatttgtacctttaaacagactttagaaaactacaggactccaaattttcagtcttatgacttggacacatagactgaatgagaccaaaggaaaagcttaacatactacctcaagtgaacttttatttaaaagagagagaatcttatgttttttaaatggagttatgaattttaaaaggataaaaatgctttatttatacagatgaaccaaaattacaaaaagttatgaaaatttttatactgggaatgatgctcatataagaatacctttttaaactattttttaactttgttttatgcaaaaaagtatcttacgtaaattaatgatataaatcatgattattttatgtatttttataatgccagatttctttttatggaaaatgagttactaaagcattttaaataatacctgccttgtaccattttttaaatagaagttacttcattatattttgcacattatatttaataaaatgtgtcaatttg

SEQ ID NO: 418871 - DNA, 2785 bp, Homo sapiens
ggatctgaagaacaatgaaatttcctggactattgaagacatgaatggtgctttctatgggcttgacaaactgaggcgactgatactcacaaggaaatcggatccgttctattactaaaaaagcctccactggtttggatgcattggagcatctagacctgagtgacaacgcaatcatgtctttacaaggcaatgcattttcacaaatgaagaaactgcaacaattgcatttaaatacatcaagccttttgtgcgattgccagctaaaatggctcccacagtgggtggcggaaaacaactttcagagctttgtaaatgccagttgtgcccatcctcagctgctaaaaggaagaagcatttttgctgttagcccagatggctttgtgtgtgatgattttcccaaaccccagatcacggttcagccagaaacacagtcggcaataaaaggttccaatttgagtttcatctgctcagctgccagcagcagtgattccccaatgacttttgcttggaaaaaagacaatgaactactgcatgatgctgaaatggaaaattatgcacacctccgggcccaaggtggcgaggtgatggagtataccaccatccttcggctgcgcgaggtggaatttgccagtgaggggaaatatcagtgtgtcatctccaatcactttggttcatcctactctgtcaaagccaagcttacagtaaatatgcttccctcattcaccaagacccccatggatctcaccatccgagctggggccatggcacgcttggagtgtgctgctgtggggcacccagccccccagatagcctggcagaaggatgggggcacagacttcccagctgcacgggagagacgcatgcatgtgatgcccgaggatgacgtgttctttatcgtggatgtgaagatagaggacattggggtatacagctgcacagctcagaacagtgcaggaagtatttcagcaaatgcaactctgactgtcctagaaacaccatcatttttgcggccactgttggaccgaactgtaaccaagggagaaacagccgtcctacagtgcattgctggaggaagccctccccctaaactgaactggaccaaagatgatagcccattggtggtaaccgagaggcacttttttgcagcaggcaatcagcttctgattattgtggactcagatgtcagtgatgctgggaaatacacatgtgagatgtctaacacccttggcactgagagaggaaacgtgcgcctcagtgtgatccccactccaacctgcgactcccctcagatgacagccccatcgttagacgatgacggatgggccactgtgggtgtcgtgatcatagccgtggtttgctgtgtggtgggcacgtcactcgtgtgggtggtcatcatataccacacaaggcggaggaatgaagattgcagcattaccaacacagatgagaccaacttgccagcagatattcctagttatttgtcatctcagggaacgttagctgacaggcaggatgggtacgtgtcttcagaaagtggaagccaccaccagtttgtcacatcttcaggtgctggatttttcttaccacaacatgacagtagtgggacctgccatattgacaatagcagtgaagctgatgtggaagctgccacagatctgttcctttgtccgtttttgggatccacaggccctatgtatttgaagggaaatgtgtatggctcagatccttttgaaacatatcatacaggtaggtggttttcttgcttgagtacagttctgtttcttagagagacttctagatgtgctaactgtaatctccttctgttactgcccccatattaaaaaggttgcagtcctgacccaagaacagttttaatggaccactatgagcccagttacataaagaaaaaggagtgctacccatgttctcatccttcagaagaatcctgcgaacggagcttcagtaatatatcgtggccttcacatgtgaggaagctacttaacactagttactctcacaatgaaggacctggaatgaaaaatctgtgtctaaacaagtcctctttagattttagtgcaaatccagagccagcgtcggttgcctcgagtaattctttcatgggtacctttggaaaagctctcaggagacctcacctagatgcctattcaagctttggacagccatcagattgtcagccaagagccttttatttgaaagctcattcttccccagacttggactctgggtcagaggaagatgggaaagaaaggacagattttcaggaagaaaatcacatttgtacctttaaacagactttagaaaactacaggactccaaattttcagtcttatgacttggacacatagactgaatgagaccaaaggaaaagcttaacatactacctcaagtgaacttttatttaaaagagagagaatcttatgttttttaaatggagttatgaattttaaaaggataaaaatgctttatttatacagatgaaccaaaattacaaaaagttatgaaaatttttatactgggaatgatgctcatataagaatacctttttaaactattttttaactttgttttatgcaaaaaagtatcttacgtaaattaatgatataaatcatgattattttatgtatttttataatgccagatttctttttatggaaaatgagttactaaagcattttaaataatacctgccttgtaccattttttaaatagaagttacttcattatattttgcacattatatttaataaaatgtgtcaatttg

SEQ ID NO: 418872 - DNA, 2730 bp, Homo sapiens
ggatctgaagaacaatgaaatttcctggactattgaagacatgaatggtgctttctatgggcttgacaaactgaggcgactgatactcacaaggaaatcggatccgttctattactaaaaaagcctccactggtttggatgcattggagcatctagacctgagtgacaacgcaatcatgtctttacaaggcaatgcattttcacaaatgaagaaactgcaacaattgcatttaaatacatcaagccttttgtgcgattgccagctaaaatggctcccacagtgggtggcggaaaacaactttcagagctttgtaaatgccagttgtgcccatcctcagctgctaaaaggaagaagcatttttgctgttagcccagatggctttgtgtgtgatgattttcccaaaccccagatcacggttcagccagaaacacagtcggcaataaaaggttccaatttgagtttcatctgctcagctgccagcagcagtgattccccaatgacttttgcttggaaaaaagacaatgaactactgcatgatgctgaaatggaaaattatgcacacctccgggcccaaggtggcgaggtgatggagtataccaccatccttcggctgcgcgaggtggaatttgccagtgaggggaaatatcagtgtgtcatctccaatcactttggttcatcctactctgtcaaagccaagcttacagtaaatatgcttccctcattcaccaagacccccatggatctcaccatccgagctggggccatggcacgcttggagtgtgctgctgtggggcacccagccccccagatagcctggcagaaggatgggggcacagacttcccagctgcacgggagagacgcatgcatgtgatgcccgaggatgacgtgttctttatcgtggatgtgaagatagaggacattggggtatacagctgcacagctcagaacagtgcaggaagtatttcagcaaatgcaactctgactgtcctagaaacaccatcatttttgcggccactgttggaccgaactgtaaccaagggagaaacagccgtcctacagtgcattgctggaggaagccctccccctaaactgaactggaccaaagatgatagcccattggtggtaaccgagaggcacttttttgcagcaggcaatcagcttctgattattgtggactcagatgtcagtgatgctgggaaatacacatgtgagatgtctaacacccttggcactgagagaggaaacgtgcgcctcagtgtgatccccactccaacctgcgactcccctcagatgacagccccatcgttagacgatgacggatgggccactgtgggtgtcgtgatcatagccgtggtttgctgtgtggtgggcacgtcactcgtgtgggtggtcatcatataccacacaaggcggaggaatgaagattgcagcattaccaacacagatgagaccaacttgccagcagatattcctagttatttgtcatctcagggaacgttagctgacaggcaggatgggtacgtgtcttcagaaagtggaagccaccaccagtttgtcacatcttcaggtgctggatttttcttaccacaacatgacagtagtgggacctgccatattgacaatagcagtgaagctgatgtggaagctgccacagatctgttcctttgtccgtttttgggatccacaggccctatgtatttgaagggaaatgtgtatggctcagatccttttgaaacatatcatacaggttgcagtcctgacccaagaacagttttaatggaccactatgagcccagttacataaagaaaaaggagtgctacccatgttctcatccttcagaagaatcctgcgaacggagcttcagtaatatatcgtggccttcacatgtgaggaagctacttaacactagttactctcacaatgaaggacctggaatgaaaaatctgtgtctaaacaagtcctctttagattttagtgcaaatccagagccagcgtcggttgcctcgagtaattctttcatgggtacctttggaaaagctctcaggagacctcacctagatgcctattcaagctttggacagccatcagattgtcagccaagagccttttatttgaaagctcattcttccccagacttggactctgggtcagaggaagatgggaaagaaaggacagattttcaggaagaaaatcacatttgtacctttaaacagactttagaaaactacaggactccaaattttcagtcttatgacttggacacatagactgaatgagaccaaaggaaaagcttaacatactacctcaagtgaacttttatttaaaagagagagaatcttatgttttttaaatggagttatgaattttaaaaggataaaaatgctttatttatacagatgaaccaaaattacaaaaagttatgaaaatttttatactgggaatgatgctcatataagaatacctttttaaactattttttaactttgttttatgcaaaaaagtatcttacgtaaattaatgatataaatcatgattattttatgtatttttataatgccagatttctttttatggaaaatgagttactaaagcattttaaataatacctgccttgtaccattttttaaatagaagttacttcattatattttgcacattatatttaataaaatgtgtcaatttgatgccaagccccatttatacaataacaatttttattatttttag

SEQ ID NO: 418873 - DNA, 1465 bp, Homo sapiens
acaggatccaaaatggcagcgctgtcgccttagctgggagagcgagccgttgtggctgtttgggagacttatggtcaccctgaagtactgcctgcctctagtgtcgcgtccctccagtatccgatgggagcgccgtccgcagggaatgtgtctctctgatcatggtgcctcgtgtccagctctggggaagaccgagacgaaatcgagtcagctggcgttgggagagggcttatttccgcttccgcttgcccactttcaggaatttgattctgagagcagggctgcggttccaggcagggtttgtacacatatttgcgttggaaggagagaggagcctaggacacatatgtattaactgtgcagctggtccgactcccgacagcttcagcgcacaccagccagccttggagttgctggaacggccctggctgcaagctggaatcacccggagagctttcgacattgatgcctgaggcccagctgtggagcgacagtttgaaaagagctgcaggtgactctaatgtgcagctaaagctaggaaccactgagctacatctcagggaagactgaaaattacaaagaatatgataaaatcttacttcaggaacaaagctacgtttttccaggttaatttattagtggttgggtttttttaagtttttgtgggtacacagtaggtgtgaacatttatgggccacctgagatattttgacacaggcatgcaataagtaataatctcatcaggacaaatgggatatccatcacctcaagcatttgtcctttgtgttacaaacgatccagttatattcttttagttactttaaaatatacaatattattggctgtaattactctgatgtgctatcaaatactagttatactatttcttattctattttttgtacccattaactatccccacttccccaccccgccaacccttcccagtctgttaaccatccttctactctccatctccataagactacactttcattcaaaaaatccaaattgctcaccataagcaaggcacagttacaaatatgagtaagttactgccccaaatgaactcttggtccaatggaaaaaatcagaatgtaaaatcacaatagaggcagtatgttctataattatgtcacattcaacatactatgagagtacaatggaggaagctattaactatggccgggaaaggtgggaaaggattcctttcactggtatacttaaatacttaagaaaaaaaaagtgtgatctaaacagtgaatagtacatgcaaaggcatagtctagaggataaaagtgaaaataattagtagcaaaatgaatgccttgtggatgaggtttaggggccaataactatcttgaggtaaggccaggttgtggctgcctttgtgttgtactaaggggtttggaccttcctaggagattagagcttgattaaagtcacaacatccataagagaaata

SEQ ID NO: 418874 - DNA, 691 bp, Homo sapiens
tagcctgatacgattgagctcgtaccatatgttggacgactttatatgggcagattttatggtaaatatacctcaataaaatcatttttcaaaatcaaatttacacatataccaaccattgctaaacaagtattcctgttttgtttgttacttcaagccatctatgcatttttggtatcactttttattttctgtaacagttacccctacatttactgggtctcagaaccttgtcaggctctgctttaaagttcctaccatgttggctctgtaactcaggtggagaagcctagaccaggagctggcgtagaccaaaggatacttgcctaataaggattagcttatactgaggaaaatactttaagcatttaaagtccagatgaggaagttgagcccagaattcagggaaccagctcaaagtgggcccatgcagacaggctgggtctaagagtccacaaggttggccagggcaggtaggatgcacaggaggcatctggatctggaagtacttggacagctgaggtcaagatcacacagaaatttattcctggacagccaaggtttacaggagcagaaatagcaaatattttcttgctccgtctctcccttttttcccagtgcccttttctgtacctacccagatcactttatacctagacatctgtcacaattttgtaactggtcttcgtcc

SEQ ID NO: 418875 - DNA, 1012 bp, Homo sapiens
acaggatccaaaatggcagcgctgtcgccttagctgggagagcgagccgttgtggctgtttgggagacttatggtcaccctgaagtactgcctgcctctagtgtcgcgtccctccagtatccgatgggagcgccgtccgcagggaatgtgtctctctgatcatggtgcctcgtgtccagctctggggaagaccgagacgaaatcgagtcagctggcgttgggagagggcttatttccgcttccgcttgcccactttcaggaatttgattctgagagcagggctgcggttccaggcagggtttgtacacatatttgcgttggaaggagagaggagcctaggacacatatgtattaactgtgcagctggtccgactcccgacagcttcagcgcacaccagccagccttggagttgctggaacggccctggctgcaagctggaatcacccggagagctttcgacattgatgcctgaggcccagctgtggagcgacagtttgaaaagagctgcagcttccccttctcagaatcctgctcttcctccagagagattcccaggagaagagggaacaaccaattcattcctgaaagccaggcctcgggacctgatgacatttgaagatgtggctgtggaattcagccagtgggagtgggggcagctgaaccctgctcagaaggacctctacagggaggtgatgctggagaacttcaggaacttggccattctgggccttctagtatccaaaccatatgtgatctgccagttggaggaagggggtgagcccttcatggtggagagagaaatctcaacaggagcccactcagactggaagagaaggtctaaatccaaggaatcaatgccaagttggggaatttccaaagaagaattattccagcttcatgaggaattacctgtgaccagttgcctgaagaagaaaactcttgggcttggtttactcatggttctgcatgatctgttggtatcacctgaaagtggacagctgcagtactgca

SEQ ID NO: 418876 - DNA, 4470 bp, Homo sapiens
acaggatccaaaatggcagcgctgtcgccttagctgggagagcgagccgttgtggctgtttgggagacttatggtcaccctgaagtactgcctgcctctagtgtcgcgtccctccagtatccgatgggagcgccgtccgcagggaatgtgtctctctgatcatggtgcctcgtgtccagctctggggaagaccgagacgaaatcgagtcagctggcgttgggagagggcttatttccgcttccgcttgcccactttcaggaatttgattctgagagcagggctgcggttccaggcagggtttgtacacatatttgcgttggaaggagagaggagcctaggacacatatgtattaactgtgcagctggtccgactcccgacagcttcagcgcacaccagccagccttggagttgctggaacggccctggctgcaagctggaatcacccggagagctttcgacattgatgcctgaggcccagctgtggagcgacagtttgaaaagagctgcaggtgactctaatgtgcagctaaagctaggaaccactgagctacatctcagggaagactgaaaattacaaagaatatgataaaatcttacttcaggaacaaagctacgtttttccagcttccccttctcagaatcctgctcttcctccagagagattcccaggagaagagggaacaaccaattcattcctgaaagccaggcctcgggacctgatgacatttgaagatgtggctgtggaattcagccagtgggagtgggggcagctgaaccctgctcagaaggacctctacagggaggtgatgctggagaacttcaggaacttggccattctgggccttctagtatccaaaccatatgtgatctgccagttggaggaagggggtgagcccttcatggtggagagagaaatctcaacaggagcccactcagactggaagagaaggtctaaatccaaggaatcaatgccaagttggggaatttccaaagaagaattattccaggtagtatcagtggaaaaacacattcaagatgtgctgcagttctcgaagttgaaagcagcctgcggttgtgatggccagttagagatgcagcagataaaacaggagagacacctgaaacaaatgtcaaccattcacaaatctgccaccacccttagcagagattataaatggaatggatttgggagaagcttaggtttaagatcagtccttgttaaccaacacagcattctcatgggagaaggatcttataaatgtgatacagaattcaggcagactttagggggaaacaactctcagagaacccacccagaaaagaaatcttgtaaatgtaatgagtgtgggaagtcctttcacttccagtcagaacttaggcgccatcagcgatgtcacactggagaaaagccgtatgaatgcagtgactgtggaagagcctttggtcatatttcatcccttattaaacatcaaagaactcatactggagaaaagccctatgaatgcagtgaatgtgggagagccttcagccagagttcgtctcttgttctgcactatagatttcacactggagagaaaccctacaaatgtaatgaatgtggacgagcctttggtcacacttcatcccttattaagcatcagaggactcatactggagaaaagccctatgaatgccgggaatgtgggagaaccttcagccagagctcatcactcattgtgcattacagatttcatactggagagaaaccttacaaatgtaataaatgtgggagagccttcagccagagttcatctctcactcaacattacagatttcacactggagagaaaccctacaaatgtaatgagtgtggaagggcctttgctcatactgcatcccttattaaacatcagagaagtcatgctggaaaaaaaaccctataaattcagtgaatatagaagggctttcagctggagtgcagacatcactggaacttaaagaattcatatcagagagagatcctaaaggtgtaatgtatgtgggaagaccacatcttgttccacatcaggcaataattactaaagagaatccctgtcaatgtcaagagggggtgggcttcccctctcttaccaaacatgggagaatccatactagtgagaaaccacgtgaatgtaatgaatgtgggaacgctttgatcagaggatgcatattattcagcatcagacagccgacactggggaggagccttatcaatgcagtgagtgtggcaagccttcagttacatactgattctttaagaaaatcagataacttgtactggagagaaatcctacaagtgtggtaagtatggaaaaatcttcagttgtatctcttcctttactaagcatcaagaacacatactagagagaggccctatgaaagcaggaaatagaggaaggccttcagtcagggctcatcccttattaagcatcagaaaattcatacctgagaaaaacctgtgaatgtgggtaatgtgggagagccttcagccaaacctcattgctttataaaccccttagaactctccctactagctggaaactctggtgacgtgatgaatgtgggaagggctttggtggatgttccaccaaaacacgttagagaatttgtacattagagaatttgtgctagagcaactcttcaaatttagtgaaactgggaaaacccattagtagagttcaagcttcagtattcatctcaaagagaaaccttgggaacatgatgaatgtgaggaaagttcctttccaacttgagatgtataaaactagagctgaaaagaagctgagaaatcaccttgtctggtgattttctgcctggtggggccatttgtataacgacacttgtgcattgcctcctcatgctgttactgacggggcagggtgtcatgcatgggtgcagaggatggaggctgagaaaggtagacagctacccatgatctagcccagtcgtattttagagctaataaaactgatgttcagaaagtgacatgccttggcctatagtcctaactgggctgggcctctttcctgtggttcacagctgtagtatggagattaatagactggatctttgcagtacaacacctctatgcacttctttctctgtagcacatgttacctttctttgtgaggcaatggagtggtctaggattgagcaaaaagcaatttttgttacatctttatgctaatagatttggaatttttgaaatgaaatgaaaccttgtttaaacattaaaattactaaaataggctgggcgcggtggctcacgcctgtaacctcagcactttgggaggccgaggcggacagatcacgaggtcaggagttcgagaccatcctggctaacacagtgaaaccctgtctctcctaaaaatacaaaaaaattagccaggcatggtggcgggcgcctgtagtcccagctacttggaaggctgagacaggagaatggcgtgaatcggggaggcagagcttgcagtcagccgagatcacgccactgcactccagcctgggagacagagtgagactccgtctcagaaaaaaaaaaaaaaaacaactaaaatatgggtattatgcacaatccagatctcaaaaacgtgattctaagtgaaagaaggcagatgccagagaccaggtattttctagtaccattttaggaaatgtccagaaatggcagatcttcagaaacaaagtaactgcaaatgttacaaggaatctttttagggtgacgaaaatgttctaaaactagatggtggtgatggttgaacgatttggtaacttcactaaaaatcattgaattgttcactttatatgggcagattttatggtaaatatacctcaataaaatcatttttcaaaatcaaatttacacatataccaaccattgctaaacaagtattcctgttttgtttgttacttcaagccatctatgcatttttggtatcactttttattttctgtaacagttacccctacatttactgggtctcagaaccttgtcaggctctgctttaaagttcctaccatgttggctctgtaactcaggtggagaagcctagaccaggagctggcgtagaccaaaggatacttgcctaataaggattagcttatactgaggaaaatactttaagcatttaaagtccagatgaggaagttgagcccagaattcagggaaccagctcaaagtgggcccatgcagacaggctgggtctaagagtccacaaggttggccagggcaggtaggatgcacaggaggcatctggatctggaagtacttggacagctgaggtcaagatcacacagaaatttattcctggacagccaaggtttacaggagcagaaatagcaaatattttcttgctccgtctctcccttttttcccagtgcccttttctgtacctacccagatcactttatacctagacatctgtcacaattttgtaactggtcttcgtcc

SEQ ID NO: 418877 - DNA, 3386 bp, Homo sapiens
acaggatccaaaatggcagcgctgtcgccttagctgggagagcgagccgttgtggctgtttgggagacttatggtcaccctgaagtactgcctgcctctagtgtcgcgtccctccagtatccgatgggagcgccgtccgcagggaatgtgtctctctgatcatggtgcctcgtgtccagctctggggaagaccgagacgaaatcgagtcagctggcgttgggagagggcttatttccgcttccgcttgcccactttcaggaatttgattctgagagcagggctgcggttccaggcagggtttgtacacatatttgcgttggaaggagagaggagcctaggacacatatgtattaactgtgcagctggtccgactcccgacagcttcagcgcacaccagccagccttggagttgctggaacggccctggctgcaagctggaatcacccggagagctttcgacattgatgcctgaggcccagctgtggagcgacagtttgaaaagagctgcaggtgactctaatgtgcagctaaagctaggaaccactgagctacatctcagggaagactgaaaattacaaagaatatgataaaatcttacttcaggaacaaagctacgtttttccagcttccccttctcagaatcctgctcttcctccagagagattcccaggagaagagggaacaaccaattcattcctgaaagccaggcctcgggacctgatgacatttgaagatgtggctgtggaattcagccagtgggagtgggggcagctgaaccctgctcagaaggacctctacagggaggtgatgctggagaacttcaggaacttggccattctgggccttctagtatccaaaccatatgtgatctgccagttggaggaagggggtgagcccttcatggtggagagagaaatctcaacaggagcccactcagactggaagagaaggtctaaatccaaggaatcaatgccaagttggggaatttccaaagaagaattattccaggtagtatcagtggaaaaacacattcaagatgtgctgcagttctcgaagttgaaagcagcctgcggttgtgatggccagttagagatgcagcagataaaacaggagagacacctgaaacaaatgtcaaccattcacaaatctgccaccacccttagcagagattataaatggaatggatttgggagaagcttaggtttaagatcagtccttgttaaccaacacagcattctcatgggagaaggatcttataaatgtgatacagaattcaggcagactttagggggaaacaactctcagagaacccacccagaaaagaaatcttgtaaatgtaatgagtgtgggaagtcctttcacttccagtcagaacttaggcgccatcagcgatgtcacactggagaaaagccgtatgaatgcagtgactgtggaagagcctttggtcatatttcatcccttattaaacatcaaagaactcatactggagaaaagccctatgaatgcagtgaatgtgggagagccttcagccagagttcgtctcttgttctgcactatagatttcacactggagagaaaccctacaaatgtaatgaatgtggacgagcctttggtcacacttcatcccttattaagcatcagaggactcatactggagaaaagccctatgaatgccgggaatgtgggagaaccttcagccagagctcatcactcattgtgcattacagatttcatactggagagaaaccttacaaatgtaataaatgtgggagagccttcagccagagttcatctctcactcaacattacagatttcacactggagagaaaccctacaaatgtaatgagtgtggaagggcctttgctcatactgcatcccttattaaacatcagagaagtcatgctggaaaaaaaaccctataaattcagtgaatatagaagggctttcagctggagtgcagacatcactggaacttaaagaattcatatcagagagagatcctaaaggtgtaatgtatgtgggaagaccacatcttgttccacatcaggcaataattactaaagagaatccctgtcaatgtcaagagggggtgggcttcccctctcttaccaaacatgggagaatccatactagtgagaaaccacgtgaatgtaatgaatgtgggaacgctttgatcagaggatgcatattattcagcatcagacagccgacactggggaggagccttatcaatgcagtgagtgtggcaagccttcagttacatactgattctttaagaaaatcagataacttgtactggagagaaatcctacaagtgtggtaagtatggaaaaatcttcagttgtatctcttcctttactaagcatcaagaacacatactagagagaggccctatgaaagcaggaaatagaggaaggccttcagtcagggctcatcccttattaagcatcagaaaattcatacctgagaaaaacctgtgaatgtgggtaatgtgggagagccttcagccaaacctcattgctttataaaccccttagaactctccctactagctggaaactctggtgacgtgatgaatgtgggaagggctttggtggatgttccaccaaaacacgttagagaatttgtacattagagaatttgtgctagagcaactcttcaaatttagtgaaactgggaaaacccattagtagagttcaagcttcagtattcatctcaaagagaaaccttgggaacatgatgaatgtgaggaaagttcctttccaacttgagatgtataaaactagagctgaaaagaagctgagaaatcaccttgtctggtgattttctgcctggtggggccatttgtataacgacacttgtgcattgcctcctcatgctgttactgacggggcagggtgtcatgcatgggtgcagaggatggaggctgagaaaggtagacagctacccatgatctagcccagtcgtattttagagctaataaaactgatgttcagaaagtgacatgccttggcctatagtcctaactgggctgggcctctttcctgtggttcacagctgtagtatggagattaatagactggatctttgcagtacaacacctctatgcacttctttctctgtagcacatgttacctttctttgtgaggcaatggagtggtctaggattgagcaaaaagcaatttttgttacatctttatgctaatagatttggaatttttgaaatgaaatgaaaccttgtttaaacattaaaattactaaaataggctgagccacggcgcccagccttcacatttcatttcttgtacgtcgttttgttttcccaggtgttaatgatatccctatttttcacttaattattaatgttatgagttgtctacctgc
